United States Patent Application Publication US 2020/0157537 A1 - sequence listing, part 4

SEQ ID NO: 7006 - DNA, 1281 bp, Homo sapiens
cctgttttttagacttatcctttcatcttctccacaaagcaagaaatctgccttttaagtttaagatttgatagtaataggaaaattgccttccctctacttagttgataaaccatcaaggaaccatattaatgaattatactacctccagcataagtgttttaatttcatcaggattcaactgtttcttgaatatttataaatgaaacatgggaaatattatggttgctgaaatgaatatttgccaacgcttatatttgctatacctagccctagtatatagaagtcattcttatatgtttaattataattataattggtatatctttacttgaccagagcatatgatccttaagaataaaatgaacttgtctcatgtcagagagaaaattattaaaatacatagacgttcaggatagcttacggaaatattacagtaataatttttacaagtagaaaatgtaacttttcaatagctgttgtggtgtttctttatttttttcccctctattgttcccttcaaggatgaattacaaaggctgctggggttgctaagagaccaagatcccctctcagaggagcagatgcaaggactgtgcattgaactgaatgatttcattgttgctctatcctcagtccaaccctctgccaaaagggaaggctttgtcactgtccctaatgtgacatgggcagatattggtgccctggaagacattagagaggagctcaccatggcaatattggtaggtatatcagctgccaaatattattggcatgtcatggattaaagaccagagataaagctccatgcatgtgtactaggttctgtggctaaactgacttgactataatcactgtgtctaacttgacttgaatgtagcacttctttcaagcccccaacaatggtttttcttttgtttgagatccgatttgtttatttttttaaattgatgtatcatagttgtaaatatttttgggatacatgtgatattttgatacatatattaaatgtgtattgatgaagtcagggtaattgggatattcatcacctctaatgtttatgttttctttgtgttgggaacattatactttttttcttctagctgttttgaaatatacttttttcttctagctgttttgaaatataatttccctaccgtgctatcaaataccagaacttattactcctatctaactattttttttacccgttaaccaacttctcttcattatactcatctccaccttcccttcccagcctctggtaaccatcaatttgct

SEQ ID NO: 7007 - DNA, 1119 bp, Homo sapiens
aagataattttcaatgatgaagataattaatggtttgtgtgtatgtgggggcttttatttctggtagatatccatttaatctactctaaaagtacccccataagttatttatcttatttcccctgtaatgttgtaaattcttaaaggcaaaatattttttaaaaattctatgtattcgtcacagcacttagcatgtttcctaacaaagcagatatttaccataatcctttctggaataagatggaacatgtaataatgacagcgtttgttgagtgactgaactatttgatcttatatagtatccattttgatacctttggcagacgtgaaggacttcaaataaatatagttggtgacttgtttttactattagatcaggaatcagaaattttttcccctgtcttttctacagaatacttcaaacattgtgcagaaaactgaggcttcctcaagcttttgatttctgtcacttagcacacctaactccaggctttgttggtgctgatctcatggcactgtgccgagaggcagcaatgtgtgcagtcaatagagtcttaatgaagctacaggaacagcagaagaaaaatcctgaaatggaagatttgccatctaaaggagtccaggaggaaaggctgggaactgagcccacttctgaaacacaggtgctttctctaaaggcaccttaaattgtccttttaatgttctttgtgttatcttacattgaagcaagggtcaatacaattgaggttcattactttctgttttattggcatttaatctatagaatacttatcatttatacccacgatgtttatcatttcaaaaatatgagttgttttatgtttagtttattttaataaattcattttacaataatgattatgaaattctggaatggggttggcagactgtggcctacccacccaccacgtgtttttgtaaattaaagttatattggaacacagccatgttcatttgtatacatgttgtctgtttctgctttcgttcttcatggcagaattcacacaggagtctgcagcagagaccgtggcccacaaagcctacggtgtttacagtctaaacctttacagaaaaaggttgtcaacccctatttcagca

SEQ ID NO: 7008 - DNA, 1179 bp, Homo sapiens
agcctccctgttgtcctgctcaccttgcctggatgtgccatgcatgcttgaccctctgtgctttcactaatactctttcttctacatagaattccattagcctatatatctgcttgttaaaattgtatttacccttcaagccttttctgaaatgttaccacctccatgaaccctcccttattcctcagttggaattcatgatgtcttttctcttattaccatggtgctttgtttatatctgttattatacttcacaaaatttgtctgatgccatttttttatttacacactcaatgtttctcaatagattgtgaactgctgaggacagagtttgtattttatttatcctcctcacaccttttacatatttgacatttaataaatgttggttttatatgtatgttgctgtcaaaatctgtaatactttatctttaaccatgaaatgattctgtaaccattattgccgtcagtgtcaagtgctttgttcactactctttctctgtctcttactagatctgaataatgtggctgctacagcccgggtcctagttattggagctactaatcgaccagactcgttagaccctgctttgagacgtgcgggaaggttcgaccgagaaatatgcctaggtatcccagatgaagcatccagggaaaggtatattcttatagaatgaagtttgtatgccactaagtcatcttaactgaatggtttgaaagtaagaggtgagaaataccaagtagccttttctttctctctctttctttttgtaccaattaaattgatttggaaaaggagaagcccacattaagaaaatcatttatgcctgggtgcagtggctcatgcctgtaatcccaacactttgggaggccgaggcaggaggatcacttgataccaggattttgagcctgggcaacatagtgtgaccctgtctctacaaaaaataaaatcagctgtgcacacacctgtagtcctagttactcaggaggctgaagcacaggaggattgcttgagcccaggagttcaaggctgcagtaagttatgattgtgtcactgtgctccaacctgggtgacagagggaggccccacctctgtaaaaaaagaggaagaaaacaatttactcatcagtaggataattgtttcaggttgttttttcagaagtagtaatggacttatgt

SEQ ID NO: 7009 - DNA, 1292 bp, Homo sapiens
cctgggctgagaggccagcttccccaacgaggtgccctagagccaatcacaaaacctgagtaagaagttactgctttgatggagtggtgggatggggagaagaggttccaggcatagaacagtatgtatctggctagagaatttaaaggtttttttttctggacataggtgttttttgttttgttttgtttttttttaactgagctaggttgtttttgttttgttttgtttttatttttttaactatagcctaacataggttttaagttgtacttcccccaactccccacccccagtcactcttttttagtgaaaaagtttggacatgaaagatcctaatatattctttcctttgggtatgaatgattgtcttttactcaaatgattgttcctttgtgaaccttagggacgcaagtctggacaaaccaggctctgtaggaacattcctgagaaaacattagtgacattcatttcttctttccacagtatgatcttagctttgataaatgactgaagctggagaagccgtggttgaagtcagcctacactacagtgcacagttgaggagccagagacttcttaaatcatccttagaaccgtgaccatagcagtatatattttcctcttggaacaaaaaactatttttgctgtatttttaccatataaagtatttaaaaaacatgaattgagtttctgtagatttctagttctcaactttagcctgaacgccaacacttgaaggtgtttttcatcctctgtatgttgaaggtggttatttgtatgtaggaacaggactgccatcccagctttgcatgccaaagaaataaagaacacactttaaagggcaaactgaagagatgagcgagcaaaggtgcccttcaggtctactgaaaagttagagtacaaaacaacactgttgatctggacaaaagaagaaaaattaccctttttgcttgtgttgtgacaacttcatttaatatggtttaaagatttatgagactgtcagctaaaagtcttttcacaagaatgtcaacagagaatggcatctcaaaatatatatatttctttgcacaatttgtgaaaccttataagccattttccccaggtacaatgtagttcctgctgatagaaaggaaatattttgtcaagagctttcatttaaaagctactacctccacaatcacccccaaacccagaaaatccccactggctcttgccagtctggttttcgtattgcagttattccaattgtatttgatctccctgataacgtattttcatgggtttgggta

SEQ ID NO: 7010 - DNA, 4219 bp, Homo sapiens
gagattctaacatgattattcacttgggtttcttcagtattcaaaatcatgaatttagatcataatatatggtctaagacatgatacagacattgttttaatgagtatgatgaaagtttcaagaatttgctttgattttttaatgttagtataattttgtaatgtcataatgctaattttgaaactttctaactggtaatttttttctctccttcccctcttccctcccccgcccgccccccatacatttcatcttgtcttcattcagaggaatgcagtagcatggatagttgatggtgaatttggagcagacgacttctgtttaacttaaaattagtcgtattttaatggcttgggatttggtgcaaacaaacatgattgatagctggacagacatgctcgtcatgaaaaaagaaccatttctgaagcccgattggggccaaacatttacaccttgcttcatagtaaccagttgagatgaagcacgtcgttagaacgttgttggacaccatgttgaattattcccccatcggttgtgaagaactgtgctacattcaggcttacccattgaactcagtatatatatttttttccttcctgtcttttgtctggcaggataccattcttgttgctcttctgtgtaatgaagtttaaatgcttgtttggaaaactttatttaacagtttagaaggcttgatagaaagagtgcattagtctgaagagtatacattggataggaaagaatttccttcttttgtttctccaaatctttccgccttatttagcttgagatctttgcagcttggttcatggattctagccttgcccgttgcgcagtatatactgatccagatgataaaccagtgaactatgtcaaaagcactctcaatattacatttgacaaaaagttttgtacttttcacatagcttgttgccccgtaaaagggttaacagcacaattttttaaaaataaattaagaagtatttataggattaaagtgacttcatttgtatacatttggaatctaaaccagcttaaaaacagtttcctcaatgacttagatacacagtataactgatgctcttctggaataccacatgagacatggtcagaaacagtgcttggaaggacattacacaagaaattcagagtaatgctttgaagatttccccccttttgttttattcctgaaggaacatcagtacccgatcttgaagaaattcaagattcaaaaagaattttaaatacaccaacatgagacatcagtagtcagttggttttcagtaaagcttgttccaagttgttctcaacttaggaagtaattttggtgtgatctagcaaaagagtaggaatcagcgatacaaccactttggaagtttatagtataattgaaattattagaagaattcagcaggttacagacatacttaaactgggattaaaacctcatagtcatttttcttaattgcccttaatattttgacatatagggatacataaatttaaagaatattttttctcagttttttcagatattgccatactgaacctcattctaaactggtgctgtggatagtctttccctctcccctcctgttttagtttaaggaaaggtttccttcatggaaaagcacttttaattttgagaatttcacatttaaaataagccaaaagcctgatgttcacattgtgcttttaaactccgtaacagctgaatacaacataacatagtctcccttgaaattccctccctttttcagtagaggataaatagggtgactccagctgttggaatgagaatggggatacccccaaaataagattctggtgaagaaaaagtcttgtactaagttcccctttaggtgtagccaagtctataatataattatgatcatgaatagactccagaatccacaaagagaagagggcttggatgtcaaaaattcttccattgtggggtaggtggtcggggatgggagaaagggaaaagtcagggaaggggagaagaaagaaaaacacatttggccttaaaatagcatgcattctcccagaagcccatagtaaagaaaatgacagatcgtggtcagcagactcttatcaaattggtatgtaaaagatttcttcaagctccattttgcagagaccaccacttagagaatcaaaaaattcctgttttgatacttctaagttaaaatatatgttacagtttatctggtacttcatttttcttaactaaaattactttttactttaagcttgaataaaaatcttcattggtaactgtatgtaattaagtggcaacttctctttacctcagtatagttaaaaaccattcatattttaagtgattcatgtataccctgaagccgttaatacaccccagtctctatggtaacatcactaaatgtgggcatagaaactccacagctgtttacaaatttggttacagtgtgctacggtgcatttgtaacactcagatttgtgcccattcaggggcaatttggcactcagattctactctacttcacctaaccacccctagatctgagttttcagagtgcttctgaagtacagtttaaaaacactttttaaaaagtggagtaaaagtgaggcacattttacaagaacataactcctattaaaacggagtaacaactatgcaaaggtttctatagcagctaggtgagtttgttttccgggtctgtcttaactggcagcttcctgtacatactggtacttatttgctgtaaacgtctgtttcatacatttgccatgcagtgactgtgctcgaaaggtgaaatcaatggtaaagaagcctaggattttatggtatgagaaactgatcgcaggattttctgatccatagctattaattgaaaacttctgatagtgctgtaggctctatagtaggcttaagagtgagtcttatactatgaagccagccacaagatactaacaaatgtataaattgaaaagtaccaatactttttgcacatagatcaaaatagagtggagaatttgggctccaaaaatcaggttagtaggctcatttccatgtgcttaaaaatgtttttgttgttatgcattgattaagggctagagcaaatataaaattaaatgtctttttcctccaaataattggttattaatggtaaaatgttggacttggggattactgagattagtatgtgggtagtaaagaattggagtgggagttagtggggagggatgacaaagcttcagctttggtttttgtatttttttagtcttcataacagctacatttctgttgctcttattggccagataaatgtgttatattaaaccaggtaagtattttaaacagagaacattttatttgcatatatccctacaaattggcccattttattgggtggggggataaaaaagggattccctaactttaaataatcagaatatcctgcaattgaaaggagaaaaaaatccaattttgtcagtattttcttagtctgaaaaaaacagcagtagtaatctggtgaatgttattattaggagtgttctgcctctacagtggcatattccatgacattaatagaaaacccttctttcccacccctccccatcttgacattttcttttttaggatgttggttcctgcaaacaagaactgaccctatcacctctgcctcacagtgggtaaatatatcatacatctcttgaaagggaaaatatccatgtcagtttctttcacagtagaagaatggctgcttttgaatggggaggaaagaagacatttttcttaatatcctttttgtcccatctctaaaatgtataaatattttgatttggttttactttaatttctcattcataatttcgcaactgtccttttgggttgccctccaacacattacttccatttcagaaaccatatctgatttaatataaactgctaacttaagaagaggtgaatttgcatttacacttagacactttctaaaaacagggtgaacttaattgaaatttttcagtgttgttaagctattgttatagtagctgccctatagttacaaaaataaaaactataaaaacccatcccctatctacttaatccagatagcctggatttaacaaaaccaatagtataaaaatgtgtgtgtgtgttctgtgtgtgtgtgagagagagagtacttgattcattaaaaagtcctggaaacagctgttctaggatcttgt

SEQ ID NO: 7011 - DNA, 2227 bp, Homo sapiens
ttcttttgttgcactgacagggtctgtacttttttttttctttttgagtcaggactatggagccgagtagttgatcttttaatatagccgtgtttacttgtattaacttacagttaacataggaaaaatacaagtaaggatgtgagaatttgcattttaatgggaaattttcaacccttaatctgaaaacagaagacagtcttaatataaatgtactgtgaagaatgctattgatgtttatggtttctgattacttttcaaattttgatgtttttttgccagttggcttttcttaaatgaaaacactgttccatttaaagtacatttatgttttattcagtaagagaatagaattttcatttgtttttctttaaatcctttactaattatataatttgaaagcaaaaagaagggcctatattaaatgctgaaagtgaaaagtgatgacattattagcagacactgcttaaaggagaccatttgtagcagttggcttaacctcaacttctaaaactacattgaaaatgtaaatacatagcttagttttttgtaatatatggtgacttcagatttttttgtacagtattttgaatgtgagatgattgtcaggactaactgtctttttaacaaaacattttcagtattttaaataaaattttgtaaagtaatgtgaattaaaaattttggaacaattagaattcattcactattgtatagaagatgctgttaaaacataggaagggtatttttcttgatccaaagtttgtgaatttggctttgctacctcaattgcaggtgtttgtttgcctttataaactgttgcaaatagaaaaaaaatagaataagtatatatttttggagtaacatcaatatttaaacatttttacacagatcggtgtttgaaaatttgccatttcaggctaatatttttatatatttttgactttttaaaagttcatcagtgtttttgctactgttaagcttatgcagtttatactgtattttttatgtatcctttatatttaccaaacctgactccctgtaaaggagtgctgtcttaaaaacaactgaaggggttaaagtcgtttcttttagtttaatagatgtgcataaggtagctttagcaattaaattctagtgaagttgatatagtctcatttttaattgtcctgtaatggaacagtagcaaattcactaaacttttgtgttcagagttaaattgttctcagtactttcaatgtaggggaatgtaataaacatagtgtgtatgtttgggttttaattacacattttatatatgagccatttagatatgcagtgttaattctatactgcatttgaagtgtatgtaacttagcttatgttaatgcagtcatgaagttggtttgctccagcatccggtagtctttaaacattcttttagtgaaattgtcattgttttatcagtgctaatgtgtgcaagcagtttttttattttgcttttctcctggcatcagaaagtggtggcgttttctgtactggattgcaccaaggaagcttttggggaggaaggaaggacattaaattctttccctggtaatgaaaagagccctttatcaatacagtgctgcaatttctggatatcagctacactttgtttttaagtttgtttttgacatgtttatttggcaaattttataatgaagttttaagttgaaaataaaatgtagcaacattttgatcactttggagccttttttttttccctttcttgcttgaaactgagatttttgggaccaagacaggagcccttagattcccacccctgcccagcctcctgttttcctaggatcatctgtttgggacccctggccaactgctgtttaaaactctcagaatgttggaactcaaaggggttagttgggaatcctaactcccagaaaatggtcatgtgtttagtatttgctgtttgagaaaatacagaaatgctaaaactattgtagatccagtcatactttcaaatgcatttgtatgaatcacagaagcatctgtgcatttgaaagacagtacgtgtgtgagagacacacgagacacacacatgtactgtgcctgctgaccgtgctttagtgcttgtttggatttccagttgactctaagcctgaattgtgagatgagatcagacagcttcacctctcaattcttcctgctgcgacgttacattgtgacattacattgcaaaatgtgggtg

SEQ ID NO: 7012 - DNA, 1652 bp, Homo sapiens
tgggcaacatagcgaggcctgtctccttaaaaaataaataaataaataataaataaataaataaataaaaaccttgtccttgactattgtgctgtctgctgcccctttgtagggatggggttggggtcagaataagcatgtgcatgaatggcggaaagctttggtggtgtttgtttgtttgtttgttttttgagaggtgggggagtcagcagtgaacctttctggttaaagaacaacgtacataatttctattatgagatttagaaggttaaatacttttttttttcaggcctaccaagttgatagaccaaaagtatatagtagaacagcacagtagaaaaaatttaaaagtgaatttcttatggtccaaaaggatggatagtcacagtccataacctttcataatatatgctggaattggaatctcttgtcatcttgctttgctctgaattttagaactagaagtgtgcatgtatgtcaaaagattatgcagagctattttctttgctaacaatgtaaacatttgcaccccatgaatgggactttataatctggaagtgagcctaaggttgcgtatactgaagtcatgttttaaaagttaaggttgacttaaacatatacaaggctgtattttaattgtaactagaaatcatttactatgcatacagaacctcatgtatcttatcatggaatttgtgaattaatgggccttgccgaattcaagggtaagggaaactggtaacaacttgttttaaatcaacatactataagctcctgcttgcttgactcaagttgtttgaaaatctgaattaaacaggatctcattgtcaggaaacatcttctaagcttgacatctacgtttaagaagggaacgtggaagagaaggtgagacatgaaactaaaacagctgggagggtaggatcagactgcacctgatttttggaccaaagtttcatataggaataaataaaaaggaggaccacttgtgagccaacctaggaaggacttgccagaaagtagcagctcctgctgcaaaatacagtgccttcaaaatgattctctgtgtgaattgcatgcaatttcatgtaaccataaagtgtaacctgtatgtgcatgacatgtgtctagaatgtgtaaagttaggattcagcaggaaggggcctggccctgtcactgtggtggatcagtggacctgctgaagtcactggactcatgtgacttaggtttgcagcatcagacccctgtgtttgcattaagtggccacatcgttgaaatcggatcaatctctccctcagctttctttcctactttgcagctttgctggttttaactgcttcattcttctgcttcttggtatccttttttcttttgaaataaaaacatgaaatacttaattcaaatgagatttgtatttattttaccagttgctcttaatttaccaaaggtatacgacatgaaaagagttgcattcttttgtcttggttgtgattctgaccttaaaatacgctcagttctaaaagcttgaggagcgttctatactggtccttctgcatttcagcctgtcaccaaggggagtgttttgcgatccgccatcctttccctgaatgctgctgctcctctatgacggaaagcttggtgacctcttcattgga

SEQ ID NO: 7013 - DNA, 1292 bp, Homo sapiens
ccccgataaagttgagttctgaatttcctctttcactgtattctcggcagctactggttggtttattctttttttttaatcttttttggtttattcttcttttgatctttgaagagaaggagaaaaaagatctgagtttggctctcccatcttaagtgcagcttttagttgttttatagtcatagacgctattgcactggacagcatgcatcctggatgtaaacaatgcggaaaaatcaatggagtgaccatcttggggtcagtggtgttgcataaagcaccagtggtgtgctgttctgtgtcagtttcctctgcgccacgtgctttcacagtttgaattaccagcatctctgtggtggcttcagtacattctccattgtgcttcaacctggaagcacattctgccgttcagaaagactgattccaatcatgtaatgggaccacacgagatccatgctccaattatatgaatagcagaaggtccatttgactcttgtagttcaagagctgtttctaagtaaacagactttccagagctcgatgaagtgaagaagcccttctttcaattcctgggcagaattcagtggttttcatatcatctgaacctgctgtgctgctgtttattctatcactgtcagccttgaaaggaaaaaaggaataatcttaccctcctgcccttcttattttatatcttccatcttatccatctatatccatgtagtcattccttccgagttccctggttttaatccaaaagactctgtttaacagcaatgtcttggcagaccaggtgccgcttccgtgccatttgagggctctgagtctttgcttcgtcttaggaagataaagataatttggcagaaagtcagagatggaaatagcagtttgggatgataaaagatgggtcctgttttgctgacattcttttactttggttcttggtgcgtgtcctttgggattcatttcttgctagcatgaataggacatgcttttcgttaggtgcttttcttttttggagaacatgaagtgtttctaacaaaactgaatgagctagaaagaattctattttgagacatctgtagttgatgcaaagtatttctgtaatcctcaatgacagtacttacatatttgcatagaattttttttttaatttttgaggaaacctctctggagtctgtatttataggagcatcctgaaagtccctattatgtagctggtgggagcgagagagggacagccacactcgtgctgtgagcagagcacaacttcaggcagagtgaatgccttctga

SEQ ID NO: 7014 - DNA, 1230 bp, Homo sapiens
tttttttttttaaagattaaaggcattttaaaaataaatgtttcatggccgggcatggtggctcacgcctgtaatcccagcactttgggaggctgaggtgggcagatcacctgaggtcaggagtttgagaccagcctggccaacatgatgaaaccccatctctactaaaaatacaaaaaaattggctgggcatagtggtgggcacctgtaatcccagctcttcgggaggctgagacagaagagtcgcttgaatccaggaggtggaggttgcagtgagctaagaccgcgccactgtactccagcctgggcgacagagcgagattccatctctaaataaataaatgtttttcaacgtgttttatgtgagaaataccagcttttcattattactaccagttgatctcaggtgtcacttggttggttctgctgaccgaggcactgggcattttaaatatggagtttccctccacccattgatcaagtctgaggtttgtccatccttggtggcaggctagcttaaccatggattcacaaaccccatttgattgtcgtaagtcataaggccaccccagtgccagtggttgggcatcacagtgagtctgaggtgatgaatttgagttagctgtaggctagttccgcaactcagcaatagcccatggatggttggtaaaagacgttgactttgccacttaaatttccaggagaagaatagcttatagtttatctgaggaaagtaattgggaaggcttagatattgagaagaaagccctgttaaaatctaggtagcatttcctttcttctttattactagagggatgggaggttcaggcctgagtcaggactttacaatttggtgtccttcccagaggtactttgggcttgatcattttaagtttcaattgcaaaaaaaaatttttgacggagtgttgctctgtcactcaggttggagtgcagtggtgcgatctcggctcactgcaacttcccccccctgggttcaaagggattttcctgcctcagcctcccaagtagctgggactacaggcgcgtgccaccatgcccgactaatttttgtatttttagtagagatggggtttcaccatgttgcccaggctggtcttgaactcctgagctcaggtgatctgcccgcctcggccttcaattgcagaagtttttgaagggagaatatttgatcctcacataaaatgtccttgtttctgaaagaaaacatgg

SEQ ID NO: 7015 - DNA, 3913 bp, Homo sapiens
tctccttcatataatggaaattatttttataaatagggattaaacaatatccctaagtttcaggtgttgtcttttcttagatggaaaaccacatgaacagatctttctctaggttacctctactcacctatcccagtgtcctcttgtttttgagcccacataatcagtgttttcattttgtatacaaaaggagaaaataaatatatagaaattagtatcatctttctaatattaaagatgtgtgcaatgaaagatgcaaagttaatcttcttattactgtgagtttgagcacaatccttaaagtttcttaggaatgaatcactcatttatcttactttatcattatatttattttcaatacttgttcttttccatccagcaatcaggcaggaactgagcaagtcaaatactgcatagaggaacagactaaggagagataggactttaatctggaggaaaaatatcctacaaacaacaactgttcacaacagcaaacccctacatttatgagctgtaagaagaaaatggagacaaacagaaggagggaaaaaccaacctactctgaaagccttcagacattatgactctggtgataagctctttccctctccgtttgctgcttttttctggcctttacaacagaatggaagagaatcatttaagagttcctgtaacagttatgcagaaaatactaaaacccatcaggcaagatcaccacgcattgaaatattttcatatcaagataaagtcgcacattttccacaatacattgctaaaataaagaggagaaaggcttaggaagtttttttgcagagagtgctggtaaagaattgagcaagtttgctattgtattgtaatgtttctctcaggtttgttcttcctatcatgtttgatattccatgaataattgagatcagccctatgtaagttaagatcataatatgtggaacaaatggaattgtaagtgctttcaaagggtaatatttataagaaagtgtccgaaaaatgtttcttcagcttgagaaattttagaatgataggaagtttctcgagttagccttcatgcaattttgtagattaaaacataaaatttgtccagaacttaaagatttagatgccttcctaaattgttacaatgctttaccaaatctatgacttctacataacacaaaccagtggtcaaatgtaaacactatattgtagatttactgtaggttttcaaccttttttagatttatgcatgtggacatttttataatgtaattacaatcaccacaaggttagcttttttaattgcagacagtaatgcatgtcacactaatatgtagtggccttttcaaggcctagtcccagggaaaacattttgtagagtataggggagtgggaggaaggggaggaataattttttatttaaagttgatttctgcactatctttttctcagttacctgcatgaataaataatgagaaatattttgtgactttaattggtaaatatgttacaaaaccaagtacttaatcttttacatcatgtcttcagctatttgtattttaaccagtaatttcaatggtctgaaacatgattctgagcttcacataatatcttaactgtggaactcaaaagtttgatcactgaatttggcagttattattacctaggtacccccgctgttacacaggtgtttagatacgtgttcctgaatgaagctgcttttgaattttgttatgttgaaatgcaagaaataacaatgatggcagcaattaaggtcacagaaatcattaggtaaaggaaaaccaatgaggagttctgcagttttcttttaataagtaaagtgagacttgggtggtgggaagaaggaaggtgggaagaaggaattagacactctgcctgccactctgcgtgtgtgtgctctcgcgcacgtgctgtctatatggaagccactcccttttctttcctttgaaactggtaaggttaaaataggggagaaatcctacatgttggaatgatagctttttggaaaatttaagaaactctccaggctctccatcttgatttatgcttgagttgttatgtgccatatttgctttgaactctgattatcagaagttttactaaaactttgaaataattcactttcatctgctttctagattttgtacatctcagtccataaagcaaagcttgttgatagtgtagttttctaaacgctgcaaatttgcagcctttaccactacaaagaagtttggatgagggattttttttttctttgtcaaaatagttcctgtttctgtagaaatttcatttttagattaaactgtgatggatgagctatcataattcaagtatacatttcttttttctatcagatattcattgtcatgcagtagtagtaaaaacatcaaagatgcagcaagcttattaagtattattttctaaaagaaataggaggcattttcatctttattattgtacttttggttatgcaaacactttgataatataaacagttatgtcccctataaatctggtcagcaacctcttttgattttgttgggtaagttaaatagtctgtagtaggtagagtactgggtacaagtggtccaaactaagataagagactaaaataaaatgctaaatcttaaaagaaactgggtttatgcactaaacgttttgtgccttggtctaatattaacatgatgtatgtgtaaactgacaaaaaaaaaaaaaaaaaaaaaccagtgttgaatcatgctatatttcccatcatcccagattgctaaatgttctttccaagaagtctgaatgaattattatatacatttgctatcatacatgacagttgtgtcattattagagatttcagtaattaaaatgggaaacagaagcctaagttatttaccttatcaaaaccacgttccttggaaccacattattatgatggtttttgtgctcttgtacgttggatgtcttaagctgagtacagtttaggggatcctttctaatgacaggaaggcactgctttcctcaacactgtgatctgacctgtgacaagtctgtactatccactatgtaaatggctcacaagtcaattgcaaacaaactgaatgtacaaatcttagtgctggtgctgaaatctcttcagaatagtcatcatgatttaaaagtttgtttaaaaatttgcaagcatcaagtgtcaatcaaaactgaagatgaaacactaatgaatgttgaattctcatgcttttaggtgtacttcctttttagaattttcagttttctgctatttttaccgtaactatttcgtttaaatttgtttcatttaagtttcctacacgctaacttcgtttgtgcgattgaaataaaattgcagtatatatatgttgcttgtttgtgacacttagataatcttctgaaataatttgttttaaagtaagttatattggatgtgaaaaacaccttttaaagtccaagactttactacttaaaagtttacatgtcacgtcactattctttacagatttcatagaagtcgtgaatactaagtaatgtatacaaaagaaatatgtgatgatgtgtctactttttgtttgaaataactgttgggtgttccctcttcttattttctctctgcccaccttgacacagtaacttcctcttatagtcaagatgatgattaagtgtttaatttttattccattttgttctgcaacacgttcaggtacttaaaactcattcatgcagttagaattatcctttatgtagtttgcatggtaaaggacattgtgtggtaaagggcattattgagtaatgaattttaagtatagcaaaatatgtatagtgtttatacatgatgctgatttcttaaaacctacatataagcagtagtactttttctctattataaagtattaat

SEQ ID NO: 7016 - DNA, 1327 bp, Homo sapiens
tatagtccaatgacatctttagtgacagtttttttcctagtgcaagatcatttattgcatttagttataatgtctctttgatatactttatgacagttcctcaatctttcataatactggcatttttgaagactgtaggacaattattttgcctgttatccttcactttggcttatctgatttttcctcaagattagattctagttatgcaggggttgttttagcaggaatattatcagagcaaagtcatgcccttttcatggcagcacaggaagagatacatgatactgtttcattgcattcttggtgatagtagttttgataaactcttgttgatatataaagtcatgctaagaatctattggttcttaaagcttaaaaaataatatttaggttttttaaaattaatgctgatgtttccttctgttttagatgtaatatattaataaaaatatggttgtctaacataggagttgattatgtctgtatattctcattaagatggaggatacctctttcccaagtggagggaatgctattggtgtgaactccgcctcatctaaaacagatacaggccgtggaaatggaccccttcctttagggggtagtggtttaatggaagaaatgagtgccctgctggccaggaggtaaggaatttcattataatggacatgcccagaattgagaggattttaattgtattccaaatacaactaactagatgcacttctttcctcgtagagaagtggtttttatactgaatcagataatatttttaaaaatcggatttgccttctttgtaggagaagaattgctgaaaagggatcaacaatagaaacagaacaaaaagaggacaaaggtgtaagttaataaagatagtctaccataccttaaaatatggaattcaggcacagctcattcaggaaatagtgtcagcatttatttaatttgggcttaattagtttgaacttatatttgctaatttttaactatgcatgtgaagtggcttgttttgactgttatttataaatttttaatggcagtcttagtaaagtgagttgaatatgtgaaattatgggaaaagcattgaagttcaaacctgtggagtttaattctgttccttaaatgagtgaatgacatttcactacttttttcatctcttagaatctcagttcccttgcattaatttaaaaggaaggaattcgcctaaattcatatgtttcccttaggagcttgatggttattggctgtgccccttcagagtgtaaccttcatgccctcctccctgattcagctgggcaaactctgctttgtctgtgctgtatat

SEQ ID NO: 7017 - DNA, 1208 bp, Homo sapiens
ctctcttccaaattttataagtatttattttgcttatttaccaaatccccatgaaaaaaaaaagtcttaattagatgatctgttgcatagttctattactaaagctctaacctaaagtaagtagttatatatacttggaccttacatttcagtatctttcaaaaactgatctagacttttacaactatgataaattggactcattaagtaaatacatgagtcagtttaatttagcatggcattctgcgtaccttcccacataaaataatatcactcagctctattgttgatggtcttacttaacatttctctctctcaggcattgtcttgggaccacttgcacctccacctcctccaccactcccaccagggcctgcacaggcttcagtagccctccctcctcccccagggccccctccacctcctccactcccatccaccgggcctccaccgccccctcctccccctcctctccctaatcaagtaccccctcctcctccaccacctcctgccccacccctccctgcatctggattctttttggcatccatgtcagaagacaatcgccctttaactggacttgcagctgcaattgccggagcaaaacttaggaaagtgtcacgggtaaatacctttctgaaaaatttttttaatatgtcttattcttcctaaatatctaaaatgttgaatttattgtattctaattttatgaaatgttatgaacttcattgatttaaaaaattgaaataatttaccctggcgcaatggctcatacctgtataatccctgcactttgggaggctggggtgggcggatcacctgaggtcaggagttcgagaccaggctggccaacatgttaaaaccctatctcactaaaaatacaaaacttagccagatgtgtgacacatgcctataatcccagctgctcgggaggctgaggcagaagaatcgcttgaacccgggaggtggaggttgcagtgagccgagatcatgccactgcgctctagcctgggtgacagagtaagactttgtctcaaaaaataaaataaataaaaattaaaaattgacataatttaaatttttatagtgaagttgtaagaatagtataaataatttctataaattcatcacctacattcacccattaacattttaccagtatttgcttttttattccttctttggatatgtttccttctttacacatg

SEQ ID NO: 7018 - DNA, 1568 bp, Homo sapiens
aactaaatttattcttctgtttatggtcctattcatgtgattttaatgtcctttttcttgtagactaaataaaaattaagactaatactagctttttcttgtaaaagaaattagtcaattaaatttattaatccacttattagataaaaggaaacttatttcatccccttctgaatctcaaaatgtatttacaagttaaaatattcttgggtgaaaatagttatttgcgtttgtgcctaattctctgatactaactgtagtctacatttatacattgtgtctgaatgctggttttgtggcttcactagctccctttttctctctccttttttatcctgtcttttgctgctgctttccaccttctgtccagctccatcttcagacagctccctgtataacgctccacttcctgagtattccagttgccagcctccttcagcacctcctccatcatacgctaaagtcatctcagctccagtgtcagatgccactcctgattatgctgtagtgactgctttgccacctacttccacaccccctacaccaccactgcgacactcagcgacacgttttgcaacatctttaggttcagccttccaccctgttcttccccattacgctacagttcctcgtcctctgaacaaaaactctcgaccttcttctcctgtgaacacaccctcttctcagcctccagctacgaagccctgtgcctggtctacttccaatttttcgcccctccctccatctcctccaataatgattagcagccccccaggcaaagctactggtccaaggcctgtcctccctgtttgtgtttcttctcctgtgccccaaatgcctccatcaccgacagcacccaatgggctggttgactctgtaacatatccagtgtctccaccgcctacctcagggccagcagctcctccgccgccgcctccactgccttccctcgcatcactctcacactgtggatctcaagcttctcctcctccaagcacccctattgcctcaactccctcatccaagcctagtgttctcccttctccctctgcagctgcccctgcctctgttgagactcctctaaactctgtgctgggagactcttctgcttctgagccaggcttgcaggcagcctctcagccggccgagactccatcccaacagggtaaggctttcattattgctactaacagctaatcacttgaaaatgttatatagcagtgactttaattgcctgaatggatgggtaggatggttttgatccttgaacatttatatgccataatgccatgctttttttttttttaattaaaaaaattaaagtagaaaaatgtttttcctgttggattaattgcatttggaggaatttccttattgaactaggttttgatatcttttatagtatcgcagttaaagatgttttctagtatttaagagcccctcataatacatttctttatttttttcttttttttttttgtttttttgagacagagtcttgctgtgttgcccaggctggagtagagtggcacgatctcagctcactgcaacctccacctcccgggttc

SEQ ID NO: 7019 - DNA, 1260 bp, Homo sapiens
tcctgcctcagcctcctgagtagctgggattacaggcatcaccaccacgcccttctaatttttgtatttttagtaaagacagggtttcaccatgttagccagactggtctcgaactcctgacctcagatgatccccctgccttggcctcccaaagggctgggattacaggcatgagccaccgcgcctggcctgaagctttgttgaggtatagaatgtgtgagaaaaaaatgtatagtccatgtgccaatgattctgataacacaaaatatgcttagcaacaattctataataaaatcatcattgtcatctggtcttaacttaaaaagtgttatagcattaataagctgtctttaatagttcacctgaaaataagaccaatgaagccaatggaaaagtaaatgtattttataaaagattctaattgaactattcctaactagattctcctttgcagaaattgtaggatattatattttctaggtaatatttagatgcttattcttgctcaggaagtagattatggggcttctaggtggagaggctggcggtagaaaggctgttttggaggctgttgtaatctaggaaagaaagaatgcattaatgtagtggcacagtggaacagagtggaggaggtgttagtagagatgtttgggtggtagaattgacagggctggagactgacatagggatgttggcagaggagtcatctagggcactccagtttctagctcgggccagacagtatggttttggtatccttcatctgggaaagggaatgggggggagaaaaataggttgtattttgaggtatgtatgatatctaagtagaaacacataataggcagctgtttatgtgagtttgttgctcaggagagaagtatggactgtaaatacctatttgccttttttcttttttcttttttctttttttttgagacaggctagagtgcagtggtgcgatctcagctcactggaacctccacctcccgggctcaagtgatttttgagcctcagcctcctgagtaggtgtgcgccatcatgcccgggtaatttttgtattttttagttgagacagcgtctcaccatgttggctgagcaggtgtcgaactcctggcctcaagtgattcggtctcccaaagtgctgggattataggcgtgagccaccacgcctggcccctgtttggcactttttaacaggtattagttgaaatggtgaatttggaatctgtgtttaaaccttggtgctgtgtgtgtgtgtg

SEQ ID NO: 7020 - DNA, 1477 bp, Homo sapiens
aatatcggttattaattttcaagttatttctagctgtccatcctatatcacaaacatccagctttttgaagttgagaggtggatcataaatctccatcccagacgccctctgacctcagccctcccagctgaccgctgaccctgctctctttgcccacacagagctcagggcgactgtgaccctgaagcaccaatgaccgagggcacccgctgctgccgccaggagatgtacattgacctgcaggggatgaagtgggccgagaactgggtgctggagcccccgggcttcctggcttatgagtgtgtgggcacctgccggcagcccccggaggccctggccttcaagtggccgtttctggggcctcgacagtgcatcgcctcggagactgactcgctgcccatgatcgtcagcatcaaggagggaggcaggaccaggccccaggtggtcagcctgcccaacatgagggtgcagaagtgcagctgtgcctcggatggtgcgctcgtgccaaggaggctccagccataggcgcctagtgtagccatcgagggacttgacttgtgtgtgtttctgaagtgttcgagggtaccaggagagctggcgatgactgaactgctgatggacaaatgctctgtgctctctagtgagccctgaatttgcttcctctgacaagttacctcacctaatttttgcttctcaggaatgagaatctttggccactggagagcccttgctcagttttctctattcttattattcactgcactatattctaagcacttacatgtggagatactgtaacctgagggcagaaagcccaatgtgtcattgtttacttgtcctgtcactggatctgggctaaagtcctccaccaccactctggacctaagacctggggttaagtgtgggttgtgcatccccaatccagataataaagactttgtaaaacatgaataaaacacattttattctataattttgtaattttctattttattttaattaattaattatttttgagacagagtctcactctgtcacccaggcgggagtgcagtggcccaatctcggctcactgcagcctctgccttccaggttcaagcgattctcatgcctcagcatcttgagtaactgggattacaggcatgtaccaccacgccaagctaattttttgtatttttattattattattattgagacagctctgtcgcccaggctggagtacagatggcgctatgttggctcactgcaagctctgcctcccgggttcacaccattctcctgcctcagcctcccgagtagctgggactacaggtgcctgccaccatgcctggctaattttttgtattttttagtagagacagggtttcactgtgttaaccaggatggtctcaacctcctgacctcgtgatccgcctgcctcggcctcccaaagtgctgggattacaggcgtgagccactgcacctggcctaatttt

SEQ ID NO: 7021 - DNA, 1099 bp, Homo sapiens
gattggcccttagagccctggcgttgcctgagccattctggttcctgtcagttgtttggttgcagcaaggaacaagactctaggtccacttaccagcagctgggggaactgagcctcttgcagagaacgagagccccacctctactctaggaaatgagctttttaatttaactggtcaggcctcaacccacattaggggttcatgaccattgtatagacagctgtagccagctgttcacagcccagacagacttgccctatctagacagccccctcctcccagctcagggactcgtctggctgtgagcttccaggaggtctcaggggtgtgacctccctccctccttccctccccactccctacctcctccctccaccccaggctataaagctgcccaggcttggctctcagcacatccagctgcctgagaccctcctgcagccttctcaagggacagccccactctgcctcttgctcctccagggcagcaccatgcagcccctgtggctctgctgggcactctgggtgttgcccctggccagccccggggccgccctgaccggggagcagctcctgggcagcctgctgcggcagctgcagctcaaagaggtgcccaccctggacagggccgacatggaggagctggtcatccccacccacgtgagggcccagtacgtggccctgctgcagcgcagccacggggaccgctcccgcggaaagaggttcagccagagcttccgaggtgaggccctccctccctgctgcccctggtcccatggggcaggtcagatgtgcccactccggtggtgtcaaagggctcctggccttgcagaggtctgtgggaggctgagtgagggccacggtctaaggggcagtgaggtggggccgggcctgtgaggatggcggggcctcagcatgcagcggtgcatgcagtcaggactccgggggtctgttttcgtactgccactctggtctgagttctacttggagcatattgctttaaaatcatctcacaaccatttgctcacatggaactggggtataactatgtcttgcccatcttccagcattgtgaacatcaaaatgagtcattgtaaa

SEQ ID NO: 7022 - DNA, 1164 bp, Homo sapiens
cagccttctaggaacccaggcagcaagatgggctggcaggcaggcttggactgggggtggcgcccacctcttgggcacagctggctggtacaggatgctgacccttggagctagttctagtcatcagaaagcagacctaaggaaaggcccttcagtgcctatggcctggggcttagtgagtgtctccacaggcattcatggctctggacgcattggctgatggtggggtgaagatgggtttgccacggcgcctggcaatccaactcggggcccaggctttgctggtcagtatctttcccccgcatgttcaggaccagggtgtagaatgggggttcttgtgcatcactgaactgaggtgggagttggttgggaagctggggtagcagttgggcaggagcagtgggtatgggaagcctgttccaacgcacaccagcaactttctcctaatgtgcccttccccatagggagctgccaagatgctgctggactcggagcagcatccatgccagcttaaggacaatgtctgctcccctgggggagccaccatccacgccctgcactttctagagagtgggggcttccgctctctgctcatcaatgcagttgaggcctcctgtatccgaacacggtgagtccatcccgcggacttctgtcccagacccttcagtcctggttggtccctgggctgggttgagcaccatttgcggaacctgctgtcttgggtcccatttagcagtgttggagtctgtgctctgttaataaccacaacttagtagattttgtttacctaagagtttgcaagccttacttcacttaattctcactgcatttcagataaccaggattaactttgacttgtagatgggaagttgaggctcagagataattttcccaaggtcaaacagttaaaaagtgatggagacaggattctaatttgaatctatgactccaaagcctgtcactcttcccgtgtgatcacagataccacttggggctctgatcaaatgagataaataagcaaaccctaacttaggtaactaatacttcttagaagtactagttgggaagtactagttgggaagcgtttgtcttggggctctaatttttggtggtgtcacatcaacaagcttgagggttgtgtggatagtggagactcaaagctct

SEQ ID NO: 7023 - DNA, 1256 bp, Homo sapiens
ctccctgatccccgtttaaggctcagtgtgcagcgtttgcatctacatctacccgggctgggtctccttgctgtcacacatgttctatttctaccctcaaaacaatggaggactttggaagggaaactgaggccaaaacgcacaaactaattcatccaaggccttgcagtgtgactgccatgtcaacagggtcagggtgtcctgctgggatttgaacccacgccccctgaccagtctaggctgcacctttggccccttaatctaatgggtaaacaatctcctaatcctagtagatgggctacttctgggcagcaggctaatcccatccacagttcattcatgcaatccacatctactgagcacctatccatcatcagccacctcagagctggggatacaaagcccgggtcccacccttgaggagctcagtgtttagttaacaggatgatagtggacaggatacgaagtgtggctgggcccaggccatgctaatgtggatttccatcagcttcccactgagcagctgatttcagaatttccttcttttggggtcagaggcccttccacgttgactgaacggatgcagccctgccaccgactgagcagtgggcctggagaaggccctggcacagggacgcacaggtataatcctgggtataatcccttcagatctgcctctactcttgcctcattgcaggagggctgagccacagccttgcttgcaaagcaagtggcattcttgccaccctaaaggacactggccccagttaacgtgacctggctttgaaagaccatcagtgaaataagactgggatggcctggcacagtggctcatgcctgtaatctcagcactttgggaggccgaggcgggtggatcacttgaagtcaggtgtttgaaaccagcctggccaacatggtgaaatcctgtatctactaaaaatacaaaaaattagctgggcgtggtggcaggcacctgtaatcccagctacttgggaggctgagacaggagcatcgcttgaacccaggaggcggaggttgcagtgagccaagatcatgccattgcactccaggctgaacaacaagagtgaaactccatctcaaaaacaaacaaacaaacaaacacaaattagctgggcatagtggtgcgtgcctgtaatcccagctactcgggaggctgaggcaggagaatcacttgaatccaggaggcagaggttgcagtgagccgagaacacaccagtgcactccagcctaggtga

SEQ ID NO: 7024 - DNA, 1165 bp, Homo sapiens
aacagttgcaagtctattgaacagcatttgagtttgttgagttatataagggagaggtctgacaattagttttaattactcaattagaatagaaagcattaagattatggaattagtagattcagaggcatgggattctcattaagcttttaggagtgcctgctctttctgtgggaatagtgtggggataggctggctatattttactgtttagatgtttactagaaaaatcggaaaagaaagcaatattaaaaatctgtttgggaatgctatacttctgttactgttctgaatgcttgtttctaaatgtatagatgaaaaattagttattatgtgtgttgagaatacttatggaataacatgtggatggatgatgattaaaattcagttgcaaggtatggcaaattaaatgaaaatttctcaagaaatgtagttgacagttaaagagtctttattcagaggaaggagcctgttttaaatattttcttatttttttccctcaggttattgataaggaaactatagatttattggcgttcacctctgttgcagaactggagttgctgggtttggagaagctcaaatgtgaactgatggcccttggactgaaatgtgggggcactctgcaggagcgggcagcaagactcttctctgtcagaggactggcaaaggagcaaattgacccggctttatttgccaagcctttgaaagggaagaaaaaatgagtatcatcagagctgattcctatttgtttatagtgtctaccatttacaacctgcataatgtggactcttgaccagtattcctgttgatattaaaagctaactttttagtaacccaattctaactatcccctttttccttgtcagggctgtagaattaatgtctgaaaccatctgggccttaaattttctttgtctggttttctatagtgtatttaataaatatagggctattcacattttttggtttgatcttggtgtcatttaggtaatgaatctatccaagaaatctatccttttgacccaggttatcaaatttgtagacataaggttatttataatggtcccttcttacccttttaatgtctttaggagctgtgttgataatttccttttcattatgatactggtaatttctgttctcactttcctaatcaggttgg

SEQ ID NO: 7025 - DNA, 1329 bp, Homo sapiens
gaaacatttcattctcaaaaaaaaaaaaaaaaatttctcttcttcctgttattggtagttctgaacgttagatattttttttccatggggtcaaaaggtacctaagtatatgattgcgagtggaaaaataggggacagaaatcaggtattggcagtttttccattttcatttgtgtgtgaatttttaatataaatgcggagacgtaaagcattaatgcaagttaaaatgtttcagtgaacaagtttcagcggttcaactttataataattataaataaacctgttaaatttttctggacaatgccagcatttggatttttttaaaacaagtaaatttcttattgatggcaactaaatggtgtttgtagcatttttatcatacagtagattccatccattcactatacttttctaactgagttgtcctacatgcaagtacatgtttttaatgttgtctgtcttctgtgctgttcctgtaagtttgctattaaaatacattaaactatacctgcttttggtctttattatagccttgccctacaattatattccaaataatttcagtattaagtcctttaatagtcactttatatctgagacgtgagacttattgagagagaaggaaagtatagacttggtggcaaaaggaacttggctttatttctaatttttagaagcttgccactacccagtggtcttaactctttggatgtgttgtcttctgaaccaataattcgaaaagctaatcaacaggatcacctggaaatagtggaatctgtaagtagattgaactttcatgaatgtttaataacaaatgagagtgtgtaacagtctttagctcaaaaattaatgcattcaagatctggctattttaagatgctctattagttaaccctgaatttattcaagcactaatagttaattcttagccctgttttatttagtgttggtacaattaatgtgaaatgaggataattaaaccttctaagacttttaacacatcccattagttgtaacgtttgagtgtttgaaactgccctagaagtgatacgaaatgttaataactatgccaagaatagacgcatgtcagtaagatacgacactgggcttgcattcttactgctcttaaacatttagccataacttaatcttttgactataggtgactataaaattctttaatgggagaattaattactttaagaggctgattttgttagcatgcatcctagttttcagtatgatcttttgcatgtacttctacagggaagtacgggtaacacttggaactttctcaatataagttactaaaagccaattgtagttgaa

SEQ ID NO: 7026 - DNA, 1329 bp, Homo sapiens; identical to SEQ ID NO: 7025

SEQ ID NO: 7027 - DNA, 1639 bp, Homo sapiens
tgggcacggtggctcacgcctgtaatcccagcactttgggaggccgaggcaggtgggtcacaaggtcaggagattgagacaatcctggccaacatggtgaaagtccatgtctactaaaaatacaaaaattacctggatgtagtggtgcacgcctgtaatcccagctacttgggaagctgaggcaggagaatcgcttgcacccaggaggtggaggttgcaatgagctgagatcacgccgctgcactccatcctgggtgacagagcaagactctgtctccagaaaaaaaagaaaggatagattttaattgcctgatgcaagtgtggttttcctgaatctgttcattgacttgtctctgttcttacagaaaacatcggttgtgaagagaaagccaaaaagaatgccaacaagcctttgctggatgagattgtgcctgtgtaccgacgggactgtcatgaggaggtgtatgctggcagccatcaatatccagggagaggagtctatctcctcaagtttgacaactcctactctttgtggcggtcaaaatcagtctactacagagtctattatactagataaaaatgttgttacaaagtctggagtctagggttgggcagaagatgacatttaatttggaaatttctttttacttttgtggagcattagagtcacagtttaccttattgatattggtctgatggtttgtgaactcttgctgggaatcaaaatttccttgagactctttagcattcatactttggggttaaaggagattcctcagactcatccagcccttgggtgctgaccagcagagtcactagtggatgctgaagttacatgagctacatgttaaatatttaaagtctccaaaataaaacaccccaacgttgaccttacccggctgatggttagccccttgctgcctgctccatgtgtcttatgagagcccgtagttacagtgtcctctaatttgaaatccataagttaacaagtctatatcaggtgcagctggctttgattaaaggccatttttaaaacttaaaaactcaacacctcacagattataatagaaaaagaaatggcctcagtttgatctcgttcagaatgacccagattgtttctgctttgggtgcagctgtttagttcagagttatattacagagaattattttctgagataatcttaaactagaatgttcaaaactaattgataattgaagtatcaagatacgtagaacacctcagagatttttcttcaggaacttccacaaactttgaatccttgtatctttatttggtattcatactactagtagcaaaatacaggttttttgttttgttttgttttgttttggcttcatagagtatctcaaattgaaacttttctgcacaaagaataaaattaaggattttataaactcaaattggcacctactgaattaaaatacataaaatcatttaaatataattcagcatatgggaagtaacattgcactaatatggaaatcactgccagagacagtctattttcttttaatttgttactacttagtcacaaaccccacattattccagtttggaattacttattaaggagaattggaaatacatatgcccatgcttaaattttatagctttaat

SEQ ID NO: 7028 - DNA, 1534 bp, Homo sapiens
ccttccctaagatttatcatagctgtttcctaactaaaattcaggtcttcttttaaaaatttttttcttaattttttgaaataaagtagttaaccatgtttcttctttctttagttgctttcagaataatgtagaaatccatgttgcacatattcagagtggcctgagccagatgggaaacttacatgcctttgcagcaaataacaccaacagagactgagtaaagatttcattattccaactgcacgggacattgtttttgagaagttcttttcctttatataggcttccaacaccaaataacctaactgctggaaaacaagggaaatttaaatctccaaataaggcattttaatagactgtactgcttcttaaaccagcattgctgaccagcattatatttatttttcttttattattcagatgcagtagcattgcttatgttacatatgtttatattcacaaatatttttaaactgaaatatctgaacataatataatttcgtggaagaatacattgaccattttttttaatgtgcatgaattcaccgcaacacatgcagacaactgctgcaatggagagtatgaagaaacctggtctttttattcatgtcggtggcagtgtggaaattccatccagaaaattacaactccacttgatttagttgatcaccatctcagtcttcaaaagataacatcatgaggtgtgggaagtcctagttttaaggaaaccactgaaatatagatgggaaatgtggactttacaagtatatgttatatatacttgcaatgtgacatggttctgtagatcattttataataataaatattttaatttatcataacatataaaagaaacctttgttgtttgttgaaagaaaatgaaggaacagggggaaaaaaggtgcaaaatgctaaatttctaaaaatggatttggcatgtcttcccatcagttcaggtcaaaagtgcattgttgtgagatttattaaaaaaaaaatgataacacactattttcatatttttttgtttatttgcacaacttttaaaccagattactggttaaaatccaacagtacacaatttataaagtaaaaagattttataaggaaaacaaatataataaccagtgctgtgaaatgcagaagaaaggcttgttttggttgtttttcttttttaggaaaacgctgcctaaaatgttaatcttgtaaaaagtatgtatttggaattttcttcgttttaatagaatattataaactcaaaatataaatttttttcaaatttggagtttaagatatagctgtagaggtggttttaattcctttagatgtctcataaaatgagactttttatatgttaatgtataataaaactgaaacaagattattttccatttgaaatttttgtatagtttaaaaaggcttccgtattctttgttggtattgtgccactgcagaactttagtgcagagtttatatttagctaaactgttatgttaattaagaaatgcataaatcttctattcttaatatttgt

SEQ ID NO: 7029 - DNA, 1308 bp, Homo sapiens
tctgaagtatctgctgaaactgaaattcaattttaagacctccctgtggtaattgggagaggtagccgagtcacacccggtggctctggtatgaattcacccgaagcgcttctgcaccaactcacctggccgctaagttgctgatgggtagtacctgtactaaaccacctcagaaaggattttacagaaacgtgttaaaggttttctctaacttctcaagtcccttgttttgtgttgtgtctgtggggaggggttgttttggggttgtttttgttttttcttgccaggtagataaaactgacatagagaaaaggctggagagagattctgttgcatagactagtcctatggaaaaaaccaagcttcgttagaatgtctgccttactggtttccccagggaaggaaaaatacacttccacccttttttctaagtgttcgtctttagttttgattttggaaagatgttaagcatttatttttagttaaaaataaaaactaatttcatactatttagattttcttttttatcttgcacttattgtcccctttttagttttttttgtttgcctcttgtggtgaggggtgtgggaagaccaaaggaaggaacgctaacaatttctcatacttagaaacaaaaagagctttccttctccaggaatactgaacatgggagctcttgaaatatgtagtattaaaagttgcatttgaaattcttgactttcttatgggcacttttgtcttccaaattaaaactctaccacaaatatacttacccaagggctaatagtaatactcgattaaaaatgcagatgccttctctatttgtgtattgcgtgtctggtctcattctgactacagatatggttaatcttcacagtgcaaggtcccaagagactttggggggattgtttctacccttaatctgtgaaaccccagaacgtgccaggcagcaaatagcattgcttaatgggaatgccccacctaagggtgggccaagcaccaggcataggagacactttttttttttttcggcttatcagatgcattgtggtgatgaactcatcctgctctctggaggactgcctttcatacaccacattgccttgtacaactgctctgcatttgagaatcatacttaaatgtttacgtttcaattgcctgaaagcagggccagtgtcttatgtcacctctgaccttttacggaaggggacaagtgaggtagtagctcacacctgtaatcccagtgctttgggaggccgaggtgggaggatcatttgaggccaggagttcaagaccagcacctttgac

SEQ ID NO: 7030 - DNA, 1196 bp, Homo sapiens
tggctggcagcgcatgggactggttgcttggtactttgggaatttagagaaggctatataaacttagtcttgcaactggcccttgtgtgaggaagtgtaagagaaaagagaaggaatttgtccatcagtttcatgtcccattgctccaaagtttgcttctacagctgcccagcacttccaggttgggcatgagtgggcactagacaggttcccaggcagggaccagcaaccccagggtgggtcagcccatgcagacgctgcagtggcaactagaataagaatctggagcagccaagagaacttcagggcaggcacaggaagagtctgacccatgtgcagcatcaggcacactcatcctggccactgttttccacacctttttgattaacactcagctttttttgctggtggcactctagcctgtgtcctttgtctgcagtccagccccacagacgcagataccttgcttgagttgttgatttgggtctcttagcaatgtgcttttttcctgaaggatgaagaggcagtgaagaagctgacagtaaatcctggcaccaagtccaagctccccaagccagttcaggacctcatcaagatgatctttgatgtggaaagtatgaagaaagccatggtggagtatgaggttattgcgctttatcattttatctgtgagcatttgctgtggatgattatttgctgagctagtgaagagctgtctgcctgttcttgtttctgtttcaaaaacaatacattggctgtcagcttcttgtacctgtccttcaatcttaaattgtgtgagtgttggggcctggagtggttgcacttttgcagagggttgtttgatttgcagtgaagcatgtgttgtgttggagagagttgttcctggtccctagtcccctttgtactttttttctgagacagagtctcaccatgttgttgcccaagctggtctccaactgctgagctcaagtgatccacccacctcagtctccccaaatgctaggaatataggtgtgagccatcgtgcccggcccaccctttgtatttttccccttcttcatgctgtggcaaggtgtattagccatgcttcctttgtggcccaaccaaaccaaccaactggagttaccatgggaagtgcaagatagcccacttagagtaaaagaaaattgctgtgacgcttgattcgtaagataaaa

SEQ ID NO: 7031 - DNA, 1217 bp, Homo sapiens
ttttctcctagaatcagttagctcagctccgtgtgattgtgctggccactgctttgagggactatcatggacatgtctcattttaaaatggggttaattcataagaattgcagtttgtttgggagaataacagaaggaattgggggttcatgtgaccttacccctcttcccatccgactccagcctcctggtccctcgtccgcagatgcagccttcctagcctgaccttggcgcggacctggggtaacccgcagctgcctggctcacgccgcgaggctggcctggccatggagtggcattttgtggcttgctccctgcccagtcctttctgtgctgagggacatctgtaggtactcaggtggcagcttgctgtcccgtcctgttttctcgcgagtgtattttcataggcttttcccaggagctcgctgcttggctcacctgctcctccacctccccttactggggagcagcaccagagctggccttgctgaatgattctctcctttcatcccagataagccattatccaacatgaagatcctgactctcgggaagctgtcccggaacaaggatgaagtgaaggccatgattgagaaactcggggggaagttgacggggacggccaacaaggcttccctgtgcatcagcaccaaaagtgagttgaatctgaatttgtgcaacagggacaatgcttctgtatcttatgattgtgatgacgagtaagtgaggaagagtcgaacacagcgctgaaaaactggatcttaacatcatcatcgctgtggttctttatgaagggaaaccagtatttgctctcagtgttgctgctttgtactgtagattcacatgcattgcgtgttctcaactaaagacggtaagctactataggttgagtctccctagtcccgaagcccaaacaaattgcctcaaaattcaacactttttgagtgacaacatgatgctcaaaggaaatgttcattggagcatttcagatttcagagttttggattagatgctcagtcagtaaatatgaagcaagtattttaaggtctgaaaggtttctggtctcaagcatctcggataagggaagctgctcaacctgtattctcatcacttcgcactgctctgtaagatgtgcatagatatctgccaaaacagaagttcaaggttcaagtatgtttggaaaaggtagggtaaaacaaagctaaacaggtttctgt

SEQ ID NO: 7032 - DNA, 1162 bp, Homo sapiens
agcaagaccctgtctcaaaaaaaaaaaaaaaaaaagtgctgcattggaagcccacgcaggtgtgcaaggctctagctctgcccagcacaccataccatgtgtttttatgcctgccccaggtcagcagaaacatcttaaggggaatgttagcaattcttcacatgtccaggcaggtaggtaggttgccagccatttggaatttaaggaaccctgagtcttgagggtgggtaacacacaatccttgatgacctgagagagctaaacctctcaaaagctcatgagtcttcaagttggcgggcaggccttggcttggaccctcagctcctcactggctggagcacaggctgcccgtatcatgttcactatccttgcttgtcgctcccttggtaccacatatggtttttcctgcagggccaggtgcgcctgtccaagaagatggtggacccggagaagccacagctaggcatgattgaccgctggtaccatccaggctgctttgtcaagaacagggaggagctgggtttccggcccgagtacagtgcgagtcagctcaagggcttcagcctccttgctacagaggataaagaagccctgaagaagcagctcccaggagtcaagagtgaagggtgggtggagcactgcggggttgccctgggggttcagtgaggggttcaagggaggcccaaaggccctacaggttccataccactcctctgtttcccttcgctgactgtcagtaagccagggagatgcaaactgaggaatggtgacagcagagatgtgggggcaaaggacagggtagggaaagacagccaggggttcccatggcctctgctgagagccctctcccctgtgagacctgcttcctggtggtctattccccttccaacatctgagctccatggacaggctaactacactttcccaccacaaccctttagatacttaaaagaccaccttccttccctgggtatttgttgtgcctgggttgatcactattcggaacaatgctgggagaatggtgaccatttttagttaggggatgggcagtggataattttcctggcttagagttgagaatgataagggttttgcatggtgttaaaatttagaatgggaaggaccatcagtgactgtcttgaatccatggacacctcttggt

SEQ ID NO: 7033 - DNA, 1237 bp, Homo sapiens
cccagctactcgggaggctgaggtgggaggatcgctgggctcaggagttccagactgcagtgagccatgatggcggcactgcactccagcgcggtgagactcagtctcaaaaataaaagggggaggggttgggggtaaaattagttgtgaaatcaagtaagacttcctgggacagaacaatcaaaggggtggcgccgggtcctccaaagagctactagctcagcccaagccccgcctcggcccccagggcagcggcccgcagagctccacccggcaggcgcccgggaaactccgccccccggccggcagggggcgcgcgcgccgccggccccgccccgtggacgcgggttccgtgggcgttcccgcggccaggcatcagcaatctatcagggaacggcggtggccggtgcggcgtgttcggtggcggctctggccgctcaggcgcctgcggctgggtgagcgcacgcgaggcggcgaggcggcagcgtgtttctaggtcgtggcgtcgggcttccggagctttggcggcagctaggggaggatggcggagtcttcggataagctctatcgagtcgagtacgccaagagcgggcgcgcctcttgcaagaaatgcagcgagagcatccccaaggactcgctccggatggccatcatggtgcaggtgcgggccgctgtgcgggcggcggggcggggacgcggcgccccgggttaactgtgtccgggaaggctgggggagggcgggcccagggagcgagcgggcccgggccctcggagcggcacttggggcctatggggccgcggccgcccctcctcccgagcggcccggccgacccttccggaaggttttgctgatgttgcaggaaaagcccgggaaataaagtctgcagctggtgttgcctttcgctttgtgaaaacgaggagcctcttctcttctcctttctgggtggcggtgttttattactgccgttcgcctcaggggttgggggggaattgtacatggtctctttaagctaatctgattttgacctatcttgttctggagggtttttgttctacatggatggtggcgactgacatgtgggttttttttttttttgttaaacctatttttggcagtcatttcaacacgtcatttaaacgctcactctcattttttattttaattaggcagaactatgcagaaaggtgtcatttctgtacagtacattcactttgagcctaatttgtgctttaaagt

SEQ ID NO: 7034 - DNA, 1161 bp, Homo sapiens
cagtaacattttacccctactcccaaaggtagcttaaatagacagattacacaaatgtaagtgataagaataagattagacagattttgctttcacagtagagtctcattatagtcctaaaatagctcatgggcttctccgcatccagaagggagaattggtccctggagtggctcactaagctcttaatcagcaaacgcagtgagtatcaacctgattgttgccaggaaatccttatgaattaaaacaatgcatattttactacagtacagagtttaaatgaatacataaatgtagaagtactgaatgtatatatttaaaaggagcctcttgtattcaacaaaagatggatgcatatataagagagatgatttaatttaaagaaatatgttgtttcttgtctgtaatgtaatgtaaagggtggaaaggcctcaagctcacatttgtagagagagagcgagagaaatcagagttccctttattgccctgtcctcaaactggtcataggctctagtcacctggggagctgtagaaaacacttgcagagccaggttttgctggtttggggcatgccctgggcaccagagctttaacatttgaagccacttcagcagcagcagcaaaaggcgaactcatctctacccaagatgtttcttttcctagtggtggaatttgaacacttctcactttttattgtattttatcttccgcagataaatgtagaaatacacgattctgtcacctctgatcccttccatctgaaaggttacaaggagtgttgtagcttctgaaggtgcagaaaacaatttctaaaaatgcttttattcctgggctaatcctgtccctccctaagtcacagcgaggtgtctgtcccagggctggagatgcttcccaaggaggagtctgttttgttgagagtgggcgtgggcttcttcacataagcctggggaaggaagaaaaaacggctttcattaccaaataatgtaaaacctcaaaagcaagggcttcaacagccttaaccaaatattattccccatagccagtggaaaatggatgtgacaaccccagtgcgcaggccagagtgagtgagcccagcacggcgctccgactggcttcctctctcaggtgctggattgtggggttagtggcatttccagctgg

SEQ ID NO: 7035 - DNA, 1124 bp, Homo sapiens
aaaattataaacttactcctgtatgtgctccactttcatggttgcctgtaatggtataatatctaacaaagtctaacagaattctaaaattaacctttgattttgtaacatttttaaatttaataatttagttcagggtccacaaatgttttctgtaaaggttcatttagtaaatattttaggctttgattagcttccatcacagcttctcatctctgctattgtagtgtaaaagcagccatagtcaatacttaaatgaatgagattggctgtgttctagtaaaactgttaatctacatgaaagtaggtagcaagctgtatttgttcttcccgcagtaatttatagtcccctaatttaccatgcctgacatttaaaccaagtaagtttggctacatccaagatggctcactaaccagcaataaaaattaatgacatttttccttttttctccttatttaagtaaactaaaagattcagagaagaagaacttggaactactctcagaaatcgaacagctgataaaggacactgaagagcttagatctgaaaagggtatgggagtgtgtgtttgcctcactcaggacttactgttatgttataaatatattttattacagaagaatcaattcattgcataggtgggagaattgttgacataagcaattctggcactcatttatgaatatacgtgtgtatatatgatgcatgtgcatacacacacatttggaagactgacctctgagtcattttgttttacttaatatgcattgtttaatgatttcatagtaacagaaaaagacactttgccataaatttgacgttttttttcagtgcagtggactacttcatgaataacatttttgtgattggaaaaaaattttattttataatgtactttataatattctcaaatgctatgatatgaggttatcactctgacagtggcaatgtgtgttaacatccagaacttggtaagggtacttgaacaagtatttcctagcactttttatgtgcctagaatgtataaaaattgggggggggggggtgggattcactttcagggtagttgaggaaacaatgtatgaaatagctgaagattaatttagtattaatggagcaattc

SEQ ID NO: 7036 - DNA, 1202 bp, Homo sapiens
acctcttcccagttgttgacaggtagtatactatggtagaccttttcaaagaaattatttaagactatctttgaatttcctaccacttatttctttaggaagctttaaaataacatatattgcactgaagcttttttgttttacttttgtactttgtctttatatattctagggtcagcgatgaaaaggatgcacgagggtatcttcaggccttagcttctaaaatgactgaagaattggaggcattaagaaattccagcttgggtacacgagcaacagtaagcttctatgattttgcatggaggcttatcatattagaaaaaagagatttaaaaaacactataataaatccaattacttatatcagtttgtttagactttgagcctactaaagagttttttatgagaaaactattagtttgggtcttttccagtttagaaaaacataacacacagctggttaactataataatttaaatgttaaaaataggatggaactaaaaacacagtcattatttcataggatatgccctggaaaatgcgtcgttttgcgaaactggatatgtcagctagactggagttgcagtcggctctggatgcagaaataagagccaaacaggccatccaagaagagttgaataaagttaaagcatctaatatcataacagaatggtaagattgaatcatatagtcccactagaataatttctaagtttgtcataattatttggagagaagttacatgtttagtttccattgcttgcttttagaaaaatgatggccaaatatgttacaaagatttgaaaataactagatgcttttaagccttgtagatagtgatgaggttttaatatagccttgttttcctctggcttgtccataaagtagaattaatagtattaaataatattccattatttaattttcctcataaaatttagttgactctcaaattttattaaacctaaaattctctcatgtttaggaatattatatttgtataataatacaacatatggtgagaacaaaatataatcatttgaaaattgtggcctctaccataggtcttttataaatgaaaattctattgatggcaaatttcataatgatataatatcttttaagtataattattgtttttcatgtttctttatgtatttagaaaaagtgtatcccacagtctctgaagcagttagctaat

SEQ ID NO: 7037 - DNA, 1746 bp, Homo sapiens
tcctggtgttcgccaacaagcaggtaggcgcccgggccagcctggggaatgtgaggagccagtgtgggttccgcctggtggtaggggttactggaggctggtggggcccctttctctgtcctgtggacagcccttcccaccaacccttccttcccccaggacctccccaacgccatgaatgcggccgagatcacagacaagctggggctgcactcactacgccacaggaactggtacattcaggccacctgcgccaccagcggcgacgggctctatgaaggactggactggctgtccaatcagctccggaaccagaagtgaacgcgacccccctccctctcactcctcttgccctctgctttactctcatgtggcaaacgtgcggctcgtggtgtgagtgccagaagctgcctccgtggtttggtcaccgtgtgcatcgcaccgtgctgtaaatgtggcagacgcagcctgcggccaggctttttatttaatgtaaatagtttttgtttccaatgaggcagtttctggtactcctatgcaatattactcagctttttttattgtaaaaagaaaaatcaactcactgttcagtgctgagaggggatgtaggcccatgggcacctggcctccaggagtcgctgtgttgggagagccggccacgcccttggctttagagctgtgttgaaatccattttggtggttggtttttaacccaaactcagtgcattttttaaaatagttaagaatccaagtcgagaacacttgaacacacagaagggagaccccgcctagcatagatttgcagttacggcctggatgccagtcgccagcccagctgttcccctcgggaacatgaggtggtggtggcgcagcagactgcgatcaattctgcatggtcacagtagagatccccgcaactcgcttgtccttgggtcaccctgcattccatagccatgtgcttgtccctgtgctcccacggttcccaggggccaggctgggagcccacagccaccccactatgccgcaggccgccctacccaccttcaggcagcctatgggacgcagggccccatctgtccctcggtcgccgtgtggccagagtgggtccgtcgtccccaacactcgtgctcgctcagacactttggcaggatgtctggggcctcaccagcaggagcgcgtgcaagccgggcaggcggtccacctagacccacagcccctcgggagcaccccacctctgtgtgtgatgtagctttctctccctcagcctgcaagggtccgatttgccatcgaaaaagacaacctctacttttttcttttgtattttgataaacactgaagctggagctgttaaatttatcttggggaaacctcagaactggtctatttggtgtcgtggaacctcttactgctttcaatacacgattagtaatcaactgttttgtatacttgttttcagttttcatttcgacaaacaagcactgtaattatagctattagaataaaatctcttaactatttcaccggctctccagtgcttccacacaggcatgctgcccccaggagatggtgggtgcatcagccagctttactctaggaagtacaggtgactgcctagggccgccacctcagtccacaccctccccatgttccctcctgagtgtgcaggcacttctctgtgtctgtgtgagaggctcttccagcatggttgcccacagtgaccttgatctcgtttgcagtcctgtcggg

SEQ ID NO: 7038 - DNA, 1319 bp, Homo sapiens
ctcccggctcaagtgattctcctgcttcagcctcctgagtagctggaattacaggtgtgcaccaccacacccggctaatttttgtatttgagtagagaccgggtttcaccatgttggacaggctagtctcgaactcccgacctcaagcgatccgcccgcctcggcctcccaacttgctgggattacaggcgagagccactccgcccggccccgttttaaccatttttaaacttccagttcagaggcgttcccgcgcccggcagggtaggcgcagtgcgcaggcgcccaaagccgacgtggaggtgatgcgcgggagcacagatccggggcagtgcgctgcgcagaggcgcgcggcgaagccgagtgggcgcgggagtgacgtcacggcgcgcgacgcggaggcggggtcgggcctgggtccgacggtagtgggtagcgggtctcgggttgcgggttgcaggttgcaagccgcaggccccaggcaactgccttcccggcgccatgttcggctccagtcgtggaggcgtgcgcggcgggcaggaccagttcaactgggaggacgtgaagactgacaagcagcgggagaactacctgggtgggtgcgcgcggtgggcgggctccgggctccgggctccgggatcccgggcgggcgctggactcacagcgtctacgtccgcaggcaactcgctgatggcgccggtaggccgctggcagaagggccgcgacctcacctggtacgccaagggccgggcgccatgcgcgggcccgagccgcgaggaggaactggcagccgtgcgggaggcggagcgcgaggcgctgctggccgccctgtgagtgtccgcggacggcagcggtcggtgcctgggacggcgctgccggggcagggtggggccggggccggggactgggggtcgggctgggcgggagcggggctgcggggactcgcgcgggcgggaccctgaggacgaaggctggagtggtgaggacctgtggtgggaggaggtccgtccgtcctgacgcctgccccggccctctcgcagtggctacaagaacgtgaagaagcagcccacgggcctgagcaaggaggtaactccccggggtggggggcgcgtggagggccgtgggtgtggggccgactcgagcgctccctgtgctctcgcacctgcaggacttcgcggaggtctgcaagcgggaaggaggcgaccccgaggagaagggcgtggaccggctgctggggctggggagcgcaaggtgcgggcgggtttccaggggagggcagcactgggctcgattgctcgggtgaggcggacccctgccgt

SEQ ID NO: 7039 - DNA, 1116 bp, Homo sapiens
gttagtacagaccccacagattaagggctcagtcccataagactgcccccacttcagatgccagtcacaacttccaggggctgcccatacttctgttccctcagcgcctctgcagatgtgagcattcgctagcacagcccatggaactcagaagagcactttacttactgtcattggtttattgtgaaggataccactcaggaagagccaaatggaagagacacatgggcaaagcctggggaagggctcagagctttcccaccctccctgggtgcaccttcccagcacctcagtgtgctcaccaacctggaaactccctgagccccaagagctgtttaggtgtctttgtggaggttccattacatggttatgattgattaaatcattggtcattggtgatggggctcaacctcagacccctttccccttcctgaggtcagaggctggggctgagtgttcccgccctctactgacaggattggtctttctggtggctggccttatgctgggctctcaggtccccacctcagccactgcagtggcatcaactcaggtgtgatggaaaggggcatcttatgatagcacaagatgcttctatcagtcaggaaattcccagggttctgtgagctctgcgccaggaactgggcacaaaacccaaatctgagtcttgtatcacagtcacccaaaggaagtactatcctcagctcttgctagcaggtcaggagcctgttgtgtaggaactgtgtgcaggcctccagaggtggatagatctgaaatcggagtggtcagggttgggacagctgccctaattcacatccttcatttggagattgaaaggaaaaacagactggatgcattggctcacctctgtaatcccagcactttgagaggctcaggcgggaggattgcttgaggccatcagttcaagaccaacccgggaaacatagcaagactcccatctctacaaataaaaaacaaaaaaatgagccagccatggtggcacacgcctgtaatcccagcagcttgggaggatctgaggcgggaggatcatttgagcccaggagatcaaggctgcagtgagccatgatcgcaccactgcactgcagcctggggcca

SEQ ID NO: 7040 - DNA, 1636 bp, Homo sapiens
ctctctgtctttccctctcccctcccatgcagtgatggcgccaacccgtggcagtcccagagctggaggcaggaggatggatcctcatctccatgggaagtgtcagcgtgtggctgccagggaagcgtggcaggcgcctggccttgggtccatctacatagttgcgtgtttcaacaatgtccatttatccttcaccccgaggcgtgttttgggggctgcaaacacctcccggtagaggctggacctgaggacccttcccacctgtgcccgtcccttcctgaagtcctagccacagcccatcctccatgagtcccggcagctctgggtcatgcccttccctggtcacccatctgcccctcacctcgtcatccagggacccagaccctgcaccttccatgtgggcccacagatccttggcaggtacctgaggtgcaccattgagtgtcggatttggggttagcatccagaaagaagaatgcgcatgacgctctgtgaaggctggaactcaggtcttcagggagagaaaggaagactggattgcaccttgatgcctcctgaggaggcggcccccctcttgaggtgggcgtgggcccggcccagccttatccaagtcgctctgtccacctcccccttcctggcccccaccccactcctgtgcctcccaggagccctccctgtgctccacctgcctccgcagaaggaagcctctttctctgtttccctgggtgagggggctggcaggtggctaaccccatttagcatctccaggccctgccatcgtgtctcatcttgctgttatctctagctctttccctcctcccatttcctttagtagttgaattttgcaaagcttgtagcagtagctcagttgcctgcagcatccttgtgtgtagataaattagtcgacagaaactcagcactggggacaggattgcaaagtcggggacatagatgcagacagttgttgagatttggggatagccgggcttgtgagcggtgcccatttccagatgaagcctttcagcccttctgagtccccggcccttggtgcgatgtctgtgagtttgacctgcccagcgtgtgggctggctcaatgctgaataaagtgggtttgtgtcagctcgtttgcttcgtctccgtgtgtccacctggcctcttccccctgccctggccaccctccagtgtcaaaggaaacttcctcgtgacacgtgctaaagcatggtgaggaggactttgattgggaccattgagatgggtgtgggaccctttccttggggcctggggggagatggggctccaccccgacgtagcagggcaggggttggaggagcgaggagcagtatagggtccatgggtgggaatgactgtgaggagacatcagggctgagggggctctggctaaacccacctcacagagtccttgctgcaggcaggcagggcgatcagacattggctgcaaacggtcagagaggaacccagtcaggtaccattgagggtggtcagatattatggttaaccaaattagggttcttgctaaaactggatttcataagaaagggcaaagagggccctaggagaagattccagagcctggccagagtttggccaagtagagaatctttgtcagcacgccaac

SEQ ID NO: 7041 - DNA, 1093 bp, Homo sapiens
ataaaatgaaaaacctctccaagtcctggtggaagaagtactgctgtttcgtatgatgctggcaagacacccagaaaggctattttcagatgaaatcgatattagaagctatattagctgaaacaactccttttactgcgtagaacctatatcgagagtgtgtgtatatgtattataggaggagctctcaattttatgtattctttctgcctttaattttcttgtttgtttgagcttagggatgagatacttatgcaagatatttttgaagtaaattaaacatttttcacatctctggaaatttagagttctagacctctggttaatttatatctaatatgaagaagacacctctaatctggatgttaagaatgaagttctgctacattataatgtacagaagagcaaaagggaggaacactatggttaaccctctcttgattaagggctacttaatgcacagtgcattatgtacacaggtcaaccatggtaacaatagttcttagctttgaaactccatgcaaaccatgccttttttttaaggagcaaaaatctgagaaaaaaagtgagagacctctgcctacaaaacctcaaaccagtcacttttgtcaattgctaatacccagttacttatgatttaaaaacaaccaacagaaaacatcccactgactgtatggcactctgtagtcaaaaaaggaaacttccttattgggacttttctttcttagtccagttgtgttgacacatatgaacacagacaaagtgctatgcggaggaaagcaagtgttggtcagtagtttcatgttttagggagtggttcctgtggagatcagaaagtgacatttgctttcggtactgtaatacgtgcaccaaactgcctcaatcctaggtaacgagggcaacagggagcacctgtctggattgtttttaaacctccatactcaagctgtctcttcggcagggaggtgaatactcttgaaaggccaacagcaagtgtttgtgggacacaacacagataattttttcttaagtcggccaagatgtacttctctgtgtgcacacccatgcacactcatgcacacagatacatagg

SEQ ID NO: 7042 - DNA, 1710 bp, Homo sapiens
gcagggtcgggcttgcggtgggtgacccagagccaccaaagtcacatccacaactaatgagggaaatctgtaaagccagttagatagaagaattttatttttctgtgggttttgtgttgtcttttttatgttaaaaagaaatccagtttgtgtttttctatagaaaaagtaaaagatcaggttatactttaggttaggggttctatttattcctgttagtaaataaaattaacaaatttctttgtttaacaaaagattaatctttaaaccactaaaatacatagactgattgattattcaacacattggaattgatgtcggtcatagtttcctgaagcatttagttacaacctgaaggaataaaatgatttgtggaaatgcttaaaatagacctaactgaatacagtctcatcttgccgcgcctggcttacctatctgtggaaagctaggcttcccaggctgggctctgcctgtctggtgcctggaggtgtgggagggaagatgagttatttaactggtaagcgatttgaaacactatttttatattaaagtaaatggcatggagtatagtgcaaattcatttttaagatagaacacaaaacttgaaagaagttttatgcgtgtgacagtgtatggggctgcagttggtctccctggaggggacttccacacctcctgcctttaggccatgggtggaaagtgctcagtgaagtacacctgtgtggcccagttctgaaagctttatacagttgaattttaagtggggttgataacaccttggactgttagtgttaaaaatctagtgggttgacctttaaatgcaacagtttttaaaatatattgctgcattttatagaatagtaaaggtacgattatacttgagattttcctccatttttatttcttcgtgaacatagagtttggggccgaaaatgtttttaaagtatgtgtttgagttaaatataaagttggttcacttcaaagctaaaaaattgttaaacttgcagcttggtattgcagagaagattttataagaattttgctttagagaatgccactttggctgaactacaagtgtaggccaccattataatttataaatacagcatacttcaaaactgtttgttatctcttgttaccatgtatgtataaatggaccttttataaccttgttctctgcttgacagactcaagagaaactacccaggtattacacaagccaaaatgggagcaaggccttctctccagactatcgtaacctggtgccttaccaagttgtgcttttctgttttcaagtgtaaatgatgttgagcagaatgttgtacttgaaaatgctataagtgagatggtatgaaataaattctgacttatgaatataatggctcttgccttttctatctgagaattttgttggaggtgtttagccacatcttgaagcagcactagttgggaagcatcgtggcttaccctgagaggtgttttgggaatgcatctccaaccaatttgaagtgcttattcattcagcatggggttttctgaattctggagccacagtctgacaataagcacccgccgactacatgttcctcacagactgtgtgctgatgtcccagtgtgttggagggagcactgttcttggagccaaaagtctgggctcagagaagcactagtgtgagatgaagctgagacagccagcgatctgagccttgg

SEQ ID NO: 7043 - DNA, 1382 bp, Homo sapiens
ggttatttatgaagataattccctaaatctttgatattcttataaggtttttgttttaaagcatcttaatcttttaagatactgacaccaaatgcctttaaatggcaacagatgcttacagttcagtattcttttcataagcttaggtagagcctattatcatcttgttctaaataactttccagattccatagctataagatcattccatcctacagcataagactcgttttccttatatgccgttttgtttgtgaaagaatatcaagtcaaaaatgagtgtcagcactactactgattccatgtataatgaaagtagaactttgctagttcctgaaaatttttaacttatttgtatttcagttcagcagcatctttatgtagattgtgatatttaagaattatctgggctgggcgagggtctctttttctctttcagtgatcatctaggcagttattatttaatagtttaatagctcaagtacattccaatagacgaagtgcacacaacacaatatgtgtgtacagtagtagtaaagtttcttttgagtagtcaaagactcactttttttattgcctttttttttttttttaaagaatacatactgtggattcagtcccttgtcacacttgaccttttggcatacacccactgtggacttttgcctcttctgtaatggctggcaatgacatttcaaacttacaatctggaattgcacttggtacattggcattgcttgttccactgggatggggaccagtgtgaagatgcctgttagatagactgcccacccctactttctctttttctttatagcacttaacaataacaaagtcttgatgatgtacagtattcaaactttaggttgaaatacgttactctttgattcctagccagtagatcttatctacactttaatgggagagaatggtggtgtgtgggtaggcacaaatttatgtaaatagtgctccttctctttagtatgtttgctttgggggtagaaaaatggttttaacaaacactggtttccatcaaatgaatgatgtcttctccatcctgtggagacaagaatctgctagaaggatatgtgctaagttccttataagagataatggtgctctgcctatgccagcttggcacccgaagatgtgtgagtggacgtgaggctgagtattaccttagtatttttctctgggtctttggaaaaccatagtcaatttttagaacatattgctttcattccccataaactcttcacacatgataactgtttaagctttgaaaacacatactgaagtattgtgagcttaaaaaaactttttaaatatttgcatagttttgaggtgaatttgtttccttacagatctctcctaatcattga

SEQ ID NO: 7044 - DNA, 1201 bp, Homo sapiens
caggattgaagaagaaccaagcagatacttagctgaaggggttgggcagaggacagagtgcaggtaggcaacagcatggaacccaggttttctagtcccagcacaagaaccttgacagagggtgggtaggatgttactaaggtgccaggtaggcttagaccttttttttttttttttttttccagtccccattgactgatgtggtaagttaaagtcagaattaagagaactccacaggattgaaaaagctcttcttctgagttttgcagaaggaataattttcttttttggcttactagactgactgctgtctggcaaggctagtttttattgtccttaaagctgaaagacacagagcctgcttcttcagatagcaaccggttcttagcatttgattctgggatgtaaaggatgagttcgaagtaggactaatgttgtaaaggaaaaaatgtgcttaatatatcatcaagatgattttctgcttagggtggtagcttttacatagcattttgttgttattgttagatgtatttgactctgttttcctttcttttaggagatagtgttttaggtgctggtgcctgtggtggtgttcctatcattttttctagaaacagtggactggtgtctattacttcaagggaaaatgtgtctatattggcagaagacttggaagggtctttagcatcttcagttgctggaccaaacagtgaggtaatgtgattcgataagaatttgaagtttttatgttatttattttttagagatagtgtctcacgctgtcacccaggctagagtgcagtggcacagtcgtagttcattgcagccccaaactcctggcctcaagcaatcctcctgcctcagacttcccagtaggtgcctggctaattttttgttttttggtttggtttggtttttgagacagagtctcactctgttgcccaggctagagtgcagtggcataatcatagctcactgcagcctcacctcaacctcccgggatcaagcagtcctcccctcttaacttcctaaatagctgggactacagacatgcgccatctcacctggctaattttttattttttgtagagacaggatctccttatgttgcctaggctggtctcaaactcctgggctcaagaatcctcccgcctcggcctcccaaagtgctgggattactggcgtggagccaccatgccca

SEQ ID NO: 7045 - DNA, 1123 bp, Homo sapiens
ttttataatacttttggaatttcattaataaggctaaaatttgaggaatataactaattttcagccttaagacatttaagtttggaagtccttgctattcaacagaataacaagaaaacttcagaatgtatcactctcctgaaaagaagatattaataagcccttttatttatggttatagttttatttatagtctcaaaattcctaaagcaatgctacaaccattgaatttgccatattttgtatcagtgctgttaatttgctgttgcctcaagaaaaagtgctttttctccatggatgaggctagaccctaagaagtaattaagtcaatgtaaatcaaatggaagttttcccatgaactaagcatttattagttccctgattagactggaagaagaaaccactatttcatgaaaagcatggaatattatattttattgttcataattaatgaataaaattgatatgaatgaatatagtgttctttgaattagtaaacagtacatctgtgacaatcatttttaacaagctctacttgtgttctttataaagtgtgattttcagaaagcaaacaacacaattacaaggttgaatctgaggaaaataatccttgtgccatagaagtatttacgaaattgcatttcattgttatgttttattttctgatacatgatgttcaattttatctttaggtaatattttatatcatagattaaaatttatagtgaactttatctgtgtctgtcactttttttttttttatgacccaggaaccaaagatgcagtctgtcatttcttataaaacttctcactacattgtttcttagtagaatttggctgtggagattcaggaataaagaaaagactaacattacacatatccaaaaacatgttgtaattaaaagttccattcattcctccttaccaagtttgttgaatgtcatcacttgtttgctacttacaaatattgtttaattgtttcactgcagtaaataagtatctcctacctacatcagggacaaggaactgtgctgtgaagttgatagatgagtaagccacagtttctgccctcaaggagcttctagttttgaaggagtgggaaggcaggggaaaattaataaca

SEQ ID NO: 7046 - DNA, 1224 bp, Homo sapiens
ccccacgccgtatccagcacgctgtcctcccgccccatctttgtgccggccatcgtgtggtcgcgtctgcgcgctccgcccggtctgccggcgtgagaaagagctcgtgtcgttcccaagttcagaccagaggggacggcgaagcgcgaaaaagttccctgcgcccagtacgcaggcgcagccgtgctcctgggcttcccgggcctcgtcccagctggcgcgcccggcgctcctccgccagcgggcagttgggggcgctgcagggagggcacccgagcgggttgggggcgctcggaagggtggcttgcaaggtccgggtagctgcagtccccggagtggggcggagaggcgcggcaccgcgcggacgaggatggggcgggggcgggcgcagcccgagggtgcaggcacgataaggcgggtgacagccagcggggaggggcgggcgccaccgcgtccacgccctttgctcggggccgggccgggagggtcctcgggctttgcgcgcgcctggccggcgggctgaggcgtacgggtcgcacgcagcgccatgcgaggcccccctgcctggccgctgcggctgctcgagccaccgagccctgccgagccaggtcggctcctgccggtagcctgcgtgtgggccgcggccagccgcgttcccgggtccctatcgccgttcactggcctgaggccggcgcggctatggggcgcggggcccgcgctgctctggggcgttggagccgcgcgccgctggaggagcggctgccggggcgggggtccgggcgcctcgcggggcgtcctgggcctcgcgcggctcctggggctgtgggctcgcggccccggcagctgcaggtgcggggcttttgccgggccaggcgctcctcggctcccgcgcgcccggttcccgggcggtcccgcagccgctgcctgggcaggggacgaggcctggcggcgcgggccggcggcgcctcccggggacaaggggcggctgcgccccgcagcggccggactcccggaggcccggaagctcctggggctggcgtaccctgagcgccggaggctggcaggtagggtcctccccggccacttccctccgccgggcctctccttctccacacgcggggtcccggggcgccgagagggacacggccgggccgcagagcgcgtgtcaccgccgcctctcctgggccactcctaaccccggaggagggaggggatcgctcacct

SEQ ID NO: 7047 - DNA, 1468 bp, Homo sapiens
cacttactgcagtgcacctgccgacggctcctccagcgagctcgtgggcgtgtacaccgggcagatgagcaacgtcctgagcgtgcagttcatggcctgtaaccttcttctggtgactggaattacacaagaaaatcaggaacattaattttttaactttgttggaacggactggggtaacagtggaaagcctccagttgcaatccttcaatgagctgagattgaatcattgactgtgaaagagccccctcctcccctctctcctgggccctcattccgggcaggtcccccttcactcagccccccagtgtcgaaggccaaggttggggaggggaacaggagagaggcaatgatgagtgatcaagaattagagtgccctggaggtcactcacaagtcctcatggagactctgccgtgacctcgcgcatgcgagcaccttcctgtctctcattttcaccatctgactggggctaggtttggttagagggcggctgtagagcaccctcaggagaagtggcgccgcaggggtcacgcatggtccagccctcaggtgggagggaagtccttgttggcagagggatgtggggcgggaatgaggaaaggggagggcatgatcctggcaaatagtctttccttttccgtaattacagagaaccaggattttttttaattattgttattataattataattattattattattgacatgaggaaacctagcactggcagagggcaccttctctgcttttaatctttcaggtttgactcctggcactggttttgatacttggaattttgaggttcagggaattcagagaatttggtagcacagtgtattgggagaaagggaaatttcgggtgacagattgatcaccctggctgacatgtttctggaagtgggtgggtgggtttgattgagaacactttgggctcctgcagtgatggtgggaaagaaaaattctttccaaagctgcacttctcttaataattctctcccctcaaaagaaagattatgataaagaataatttggagtaataagtaacaagatagaattagaaaaatgttgaatttctgaatgaccattcagaggtgtggctttttccacgtctttttctcctgcaatgaactgctcccacgtcctgcactgcaataccagtctaatgaacactttgtgaaacaaatcgtaagtatgtacgcacgcatatcaaactatgctctgaggataaagcaagttctaatttgtggaaaaaggattaaatatttctgttttctgaaaagagttattttgtattttgttttctattaaaatgtatttagtttcaaaaaaaaaagtgttggcatctcatttcatctctgaggacaggcgggtgagtgttctgtcctgggatggtgtgtctctctcacctctcatcagggcaataacccgtcggttacctaggccacactgtccccaacgaaggtgcat

SEQ ID NO: 7048 - DNA, 1191 bp, Homo sapiens
gaactgtagccagtatcactctatgtctgggccccttataggtgttgctctggagatctcgaacctcccttcgttgctcccaggtgtaaaaacacagcattggaagaagatagagaagtttacagctcagttcagctctcttggtacatattgcttagaacagctgtacctgcagaaaatgaaaaggactttaatgcaaactagtttccggtctgaaggagccatccaaagtttgaggtgcgatgctgcctttattattggttccggcagaaaaagcttgaatcagagaacgacggcttcctgggatggccaagttgggatggtgagtggactcacataccctgtagcacactggcacttgattgtgtcaaatctcacaattttaatatcctatctgtgtccagatgatgtgggatacctggccagtgtcctgctgagaactttacccatgggcaaagcccaggaagtctcaatagatgaagaggcatacatcacactggaaaaaatatccaaagccttccttcatagccctctctttccagagatgcagtcccttcattctgctttcttaacgtgcgtaaccacaagttgctccagcattctgtgttctggtgcccagcgtgactcaggtcttgtcagtcagcagcttccctggctttttgaaaaggaccacatggttgtgggtcattgggaaaacagatttgcaaaagctggacccgaaggtatagaacctagaggagaaattgcccagaacttactgtccctggtcaagagtgacttccctatccagctggagggagagcagttggaaagcatcctggggcttttggaagtgatttctgccttacagctggacagcctcttgccaccctatcatgtgcattattttcttgtgttactgtccatggccgtcaccaaactaggatgctcttgctcctcctcactggctctcaagttcttgacgacttgctaccaacttcttggttacttgcaaaaggggaaaagtgctcgctctgtgttcaagatcatgtatggtagtgatatttttgaggttgtactgacctcattgttcagagctagtagtaggttccttattgagatggatgatcccgcttggctggaattcctccaagtgatagggacgttcttagaggagctaatgcagatgctcatccaaatgaagctgagctt

SEQ ID NO: 7049 - DNA, 1246 bp, Homo sapiens
ggcttgatctctgcccccaattgttctcacagaggtttgcctttttcctcaggtgaccttatatccagctgtgaaaagtctgctgcaggagggcatttacctcatcctggacctctgcatcgagcctgacgtccagttcctgcgggcctcgctgcagccgggaatgagagacatctttaaggagctctataatgactatctcaagtaccacaaggccaaacatgaaggagagaaaagatatacggcctaaggctatgggacagaagtgccgccagtgacactgtccagaggctttggctgcatggtctgaaagagctggagaatgaaagacttaagatgttctaattcgtagtattggtatacatagaaaatcctttggggtttatgtagtatattttgatgtattttacatcgtgtttttcttactattttttaatacatagttttatgcagtaagtattgcaatagaatcctgaaaattgaccctgggatgagattaattcaatagaaaaattgctgactcttgggacctttctgtgtttggttctcgtcttggctcagtggtttggtgttccctcgtctgcactggaaactacataaaacttggctttttactttgggtacatgggcgtataattcagccctgtttaaatatacttgcctttcaaattcttcaagtaacatgggaagtattcttgaaatgtcacattttctgccttccctctaagtatgctttctgaagaagtcagggaaagttagagtctgtggcctgaggtgtctgctctgggtggcgatagtgggcacctcaggcaggtcggtgacgtttagcacaggtgccagggctcctgcctgctcctcctgtgttagctctgtgaagttcatttaggaatttttttttcctatgcagtttaagaaataatcctaattgttttttcttattacctaagcaatatatttttattatagcaacctcagaaaagaaaaataaaaggataatttaaaaaactcattcatagtctcagttacccagataacctcggttgtcaccttggagtatcttgttgtagtccctttactatgtgtatgtatatagatgtgcatataaatatatatagtagctaaattggatcataaatgcatttttttaaagttaccttttttcctgtgtaatattttaagtaactctgggtcagtgaaaacattcgacatatattttttttggctgcatagtagtccattgagtaga

SEQ ID NO: 7050 - DNA, 1222 bp, Homo sapiens
cttcagttcctggatggtgtgaggggtcttccatgcagaagtcttcagacactcctgaagtgtgtgattcttagtttgtttttttttgttttgttttgttttgttttgttttttttaaagaattcctggtggcaatatagacaggtacggagaccaggtagaaaaagtgggggaaatgaacaattaattacacatggattggtgatttgggattctattctttctgtcaacgaaccataaaatttaatgctaccccttaggatgctttagtgatttgtcggttgaggaagaggtgtgtaaatgcaatagcttttgaaattgcagtggaagactcattaacttcgtgtggtggacccagggttaaagagaagccttaagatggtttctgaaggaggtaaatagagccctgctgtcacgaatgcctgatgtataggaaaatcgtgtagtcttctttcttccccaattgtttccatggatttagacactagaagtgtctctaaatttatttcattctcataccaaaaaaaaaatgtggtttgtttggcttgtaaagtatggacataaaaaaagatagcgggccatgcacagaaaggcagaatttaaaagctagctatagtttttttagagataagtggacctatattttttctcttgcctcatactgttcaagtcagggcttttattccatatttagccagtttctgcacatcctgacgtttttcatagggtactaggctgcagtattgggctttagggatcgtctgaggggagtccaactaggatttctgctgcttcagcagcccagcccaggcttgtcattgtgtgccctgcctgttaagtaactcatcacagaactgttattctccacttggcaaaacccagagagccagctcacctcagattgcaggtttagtaaactaagcaggagggagtgctgaagaccaatctcaggcactgccgcacaactcgggactcaacacccaggctcaggacatgtatgttaaagcagtttattcaaaatattgtttaaaattatgtttcatttacatttgtgtccataccctttccccccatattttgctctttccccctaaattgatgatttgcacttcaagcgtgcctttcctttgagcttcttaaatgctttaaaattttaaccatgttaagtctcccctgggctttggtacgttggcagtggatggagccgcagaagagaggaagg

SEQ ID NO: 7051 - DNA, 1160 bp, Homo sapiens
ttagccatgccactcacatgtaacagtggggcacttccatgctggttgttaaatatgctctgccttgagaccccctgagtgccctccggttcctagctgccctggtctttccttgggatctctttcccatgttcagcaatcaaagggttgaatcctgacacttgaggggcctcttggacccacttctgtgcctgtgccatagtgaacatgctgattgtcacccctgcaaatgtgccacttggatagaaggaggcctagccccacttccatgatgggaacaatcccttttccctctgagtaagtcttgattcactgttactgttgagagttctggttccaccattgtaatcttgtggccttgcctctagactgccttatgggtgaggtgtttttaaggaggagggatgtcttggtacttccatatgcaaacccccctgaatgggtctgggataggctgggcctggcggggaactctcctctatggagaattacattgaattcattgatgtgtgctcaccagtgatcactcctgtccttagagtggaacttgaccttgttctcttaacagtgtgaagattcctttaccttggccctgtgcttgatcttcatgatgaacccagtatggagttggcaggaaagctgtcttcagattacctgcccagtccagaaagcctctcccacctttctctattgtaaaccatggaaataaaaggggctcaagacactaatccatcttccctgatgggcccccacctttctagggttccctgctctaagcaggtggcactgtgctcctgcctggctcttgcctcctgcagcacagggtgaaacactggcatttttgcacttagtcatgtctactagtatgggccccagaagcatggggtgttttatatggattaggtttcttagcatgctgaaatgtagatgacagtgattcatcagggccggatttggagataaacaaaaactgtcacatagagtctcactcataggcttacatttaaaaagctttcccaggctatgggagttatatgagccccttgtctcactgaggcgggctgtcacaaagaagcagttaagggctggctgcctgggggctgggaaatgggccgatccctcatggctcagcctgcccttgctggctgcttgccctggtc

SEQ ID NO: 7052 - DNA, 1239 bp, Homo sapiens
tggaacatatgcagtacaacacaagtgtgtttgcatacatgtacaaacacacatgtgtatttacctacatttcaaggtgaaccctccccagaaggctctgctcaatgagactctgaaagtgttcaaaagcatggtctgagaaagcatccctccttcagggcatgtacccaagtagtctttctcttgctggctgaaatcatcagggattgtttccaagttttaacttctgattttcactcttttaaatcccagagccgatacttgaacagaagtaagtttgctgttacacctctcactttgattagcttgttgcgttaaattaattgtcagattgcctgaaaccaaagcttcttaaaatgaacactggttcactcgggaaatttttgcaagatcaaaaatggaagactgtgtcactgatgaaagggagagatagccagaatacaaaatctagagctttggacctgaaatctggctgcaagatggttttttcctgtcttacctaagaagtggcccccaggattcacataccagtagcctctttttgttattcttttttttttttttaaacatatccccttgttaaagatcctcttgattgcaagcaaaagcagcctactgtgcaggctggcttaagcagaaaagggaatttattgtggggacatggtggggaggtgtctcattactgagaggaagaaggctggctggcctcagaaggcatgagaactgggacctgggtccagcccagtccatggtggccacagctggatctcagctctgctcctccaggccaggtggctgctttctcctctctctgcagtgggattttctctgcccaggactcatgtgtctacctgtgggtctaatctcctagcataggctgagcctgcacctccttgagaaaacagattagcttagcttagtctgagtgttcactccaggcgcaccctgagagggagtgcagcctgcacatggggtgggtagttcttaaagggagcctgcctccagaggcgccgggggagggggggggcctgcatttagagtgtgtgcgtggagcatgtagcttgttcctgttttcatggagtcgcagagatcagaaagcatttatgcctgtttctgacagagatgcacacagctggtctgaatgggcaggattggggtgagggcagtggaggagggatctggccacacaggcagtctgctgtgagggccacttcaagccactcttcccttgctgagctg

SEQ ID NO: 7053 - DNA, 2070 bp, Homo sapiens
tgatcacattattgattatgtttcttaaactttccgcgaaactaatatacctcagtattccatcatggtctgaaagtcaaacttcggcaaggcacggacgactgtgcagacacagcagcggcaagaagcgagaactgccctccccctcctctcggtgcagcccagccgggcccccttccccaggccggagcgcccctcttccttccagctttcacttctgccggctccgcaactgagtgacacccagcgacaaccgactggggagtggtagaagcaactgaacggatgcgtgcgagctgaggacagggcgggaggagggggcacacatgccccaggggagcgaggagaactcttgaaatctccattttcaatcccttcgaaatcacgtatggtttccacaaagccgagtcgtgtcacgtggcaggtttacgtcaatagtccctctctctgctcctccattcgcaagtgtcttcctgggccagactcccctccacctcatgtacttgctatattgaggatgaagttttctatggtgggacactaaatataaagctatatagagaaagaatgtacggtcagttccctatggtttctgtagatcatcgtcatcttgtatattccccacaaagccgttcgcagcttccgggagaaggggccagagcccggtggggccagtttctcacagagggaggaggtggcctttgtcccctggagcccgatcagccagttggtgctactgctgtggccagctggggggcttcctccagaccaccggcctcggccccggcatccctgttgggcgtcagcctgagagtccctactgtgcgtcagaatccaccttgcgtgctgtgcgtatctgtgaacctggagcggttacttattttgacagatatcactttgggtctttttacattaaatttcttttctctaaggaatataagacataccccatagctctgtgtgagccagcaataccgctgccccctggcgacagggcagaccaatgatgccaggcagctgtcacacgctagtattggcttcattgtgatctgagccctgcacgctgggccttcagaattaatggccagcagtgtcagggatgagcccgtcagccagggcacaggcctggctcacagtcctgcacacctgctggcctggggagctccagccaggcagcgagtcctgccccgcccgcagctccctcccacaccccgcctggccaagatgactgcttcagggggctttggggaaagaattaggaagggtcagaaccaaacaatacctgctcatttacactgaggattcagggcgggagacaggagccttggggtcctgttaaaccacagacagttatgaactgaaagtcataacggggagaggtgcctggcttctacctgggtgctcaggaatgttcctcgtcacccctgccactctgtggtcggtgccctgcttcctcctccactcctggccgccttctccagcgccgcacacacagatgctcagtctcagagaggctggcacggcctggcagtctgagaaaagcgtcagttaggcacacctgcaggcccctcggtgggacagcggcggccttggagttaggagccaccctgggaggttgtgccggtgccatgctcctccctgtgtcttgtatgaaaggggccactgtgtgtcttcctccccggcgggagccccacatgtgtgcactgtaggacagcggccccgaggtggaagcctggctggagggctgccctataggtcttctcttcccgcctcccctgccatgcaaccagatgtgttgtgagtgggcagcgtgcccccacgctggagtaactccgcacgcttctgtctttcacggtgggcgctcggggggagcctgaggaaaacccccttaggtacctgtgcgaggctgtggagtgcaggccagagcagggtgtgcgtagcccccagcacccaggttcttctgtcagaccctgtgacctgcgagctgctactactgtaaggagggaaatggatgaatctggctcgttttaaaatcacgttttctgacgaatcctttgccccttcaccttt

SEQ ID NO: 7054 - DNA, 1353 bp, Homo sapiens
gtgactgtgaaggaaggcccccgtggtagaatgagctggagcacgctctaagagagatgcctgcttcctaaagatctacagcaatctgggacgtggttcaagttcaagacttgaaggaagcaaagacgccctgcatggttacaatggctcaggtgtcaggggaggccggagggttttccagcatttgcctcatgccagcacctttgaaccggtctcttagaagaagacacacatcctgggtgtacagtggtgaaatggggagtgggtgcccattctgaaaaacgaggcattcctgctcattccctctgcttagctggtgggcaggggagagagggaaatgccaaaaacttggagtgaaggatgatgctattttttatttttaaatatatcttcaggttattttcttactgttgcttcagatctaatgtaaaaggcagatgtcccctcctctccacccccgacgctgaccccggcctcagtcacggctctttgcatgatcacagttctgtgttctggcctgtggcagggccgggaagggccgctggcttccgaacagacgtggttgctctccacgaggcgcatggggagcccgcgggccctaagctttgtcgcagatgtcatcattggcagaattacttgtcttgaaaaataagtagcattgctgaaacacacaaccgaattctctacgatggccatttgctcattgtctttcctctgtgtgtagtgagtgaccctggcagtgtttgcctgctcagagtggcccctcagaacaacagggctggccttggaaaaaccccaaaacaggactgtggtgacaactctggtcaggtgtgatttgacatgagggccggaggcggttgctgacggcaggactggagaggctgcgtgcccggcactggcagcgaggctcgtgtgtcccccaggcagatctgggcactttcccaacccaggtttatgcgtctccagggaagcctcggtgccagagtggtgggcagatctgaccatccccacagaccagaaacaaggaatttctgggattacccagtcccccttcaacccagttgatgtaaccacctcattttttacaaatacagaatctattctactcaggctatgggcctcgtcctcactcagttattgcgagtgttgctgtccgcatgctccgggccccacgtggctcctgtgctctagatcatggtgactcccccgccctgtggttggaatcgatgccacggattgcaggccaaatttcagatcgtgtttccaaacacccttgctgtgccctttaatgggattgaaagcacttttaccacatggagaaatatatttttaatttgtgatgcttttctacaa

SEQ ID NO: 7055 - DNA, 1163 bp, Homo sapiens
ataatttgaaaattatattgcaagtattttgaaggcaatgagctttatttaaaattctgaaatacttttacactctaaaagatgaactgttcctagaactgattggaaatgaacttgttacttgatctggggcatgaactacagatgtccaccctcgatacatgaaagacaaaattggtctatagttttctccatgttcaggattaaaaatttaagcaaaatccacacacacacatatttcttaaattctgagggaatgctatgttagacacttaagaccatatgtgtgtgtgtgtatatatatatacgtatatacatgtatatatatacacatatatatataaaatgatcttaagaaacttaaatacttaccgtggttgaattttcgttggaagtgaatttttatcttaaaaatctctttttttggtccacaaagccagttactctatttggtgttacacacaaatgcctcttttcaccaataaacgtgtcttctattcaaggtactatgaaaccgtgtcagatgtattaaactctgtgaagaagatggaagagagcctgaaaaggctgaaacaagccagaaaaaccactcccgccaaccccgtcggtcccagtggtggcatgagcgacgacgacaaaatcaggctgcagttggccctagatgttgagtacttgggagagcaggtaacccatcagccgccggcagctccagcgagcctgaaaccaaattctgagagccgggcagttacttggtggctcgcgtgatcccagagatgctgtcgcagtggctagggaattgcttcctgtgttaagactaggagtcggggctcccaaattactttgcccctaggcagtatgagacggcaatatgagaattcccgttttgaagtctggtggcgtgctctctggtgctgttgccatctgcttgtttccccagtgcccatgctcacggagctcactacagtgagactttttggtccagtgcctgatacttaattggtgcgaaccccaggcttttgaaatgcttgctggtttagcttaaaataactgaaagcattacccctctatggtgcatgagaaatcctttgagcataacttctctgcttccctgcttggcctttgtagctttcctataaaacacaaattttagaatcatggcacgt

SEQ ID NO: 7056 - DNA, 2808 bp, Homo sapiens
gcactgagataaattgaggtcagggaacctctgagacagaagtaggctcttttatctgggtcgttttaaatgagatgctgtttttagattatacgtaactgaaaaaaagaggctcgtcttacttccatgtttttgtcccttctacaggtcagctcaagtaatgtcgtcttgaagacgggatttgattttctggacaattggtaaaatgtattagaaaaatacaatgaagaaccctaaaatgttttccaaagtggtgtggtggaggaggataaaaagggccaccttttcctatgtattttactggtttcttgacactcttttcttaatcatttggaaactggtcaatattgccagatttttttcttttttggtagaaccagatatatatgctattttcagtgatttgataacagaagttttccatttggaatttttaaggtctgttaataattcaggagatcttgtaaataaaacttctgttcccagctccacccaactttccccctcctcaaaggatgtgtttcaaccatgtcacaaaaatcatataagtgatttccatctccttctccattattccccctcccccctccgctttttaccgtatgggttccttttggtgggtgattgagggtgatgttatcagccatgacatcagcatgctggctgtgaccccggaaagactggcccccagcgacgttctcagccagcgctcgcagctgtccggggcttctctggcagaagccatgtctctcacatcatgtgccagcctccaccctcacgccatttccagggaacagactgcgggtatgtagcagtgtagtctttaacctgctctgatacatattcagagtatggattgttgtttaaaaagagttgcatgtttaaagagttttgtactagcttttcattattttgtatctagattatcaacaatggggctaccactttccttggttttatatccatttcctcttggaagttcttgttgcttatgtgacctgttggttgttccccggactgggcacctacaggagtcagggcagacggcagatgtggctggaggtcagggctcttctgcttagttgtgttagagtcttccagcatgggactgatgggagcagtgggcattctttatcccaagggctagccaggttgcgtcatgacggaccttccccagccctgaccaccaccagaagtggaagagtggagtttgcggtcaactcagcagtgcccatggagacctgcgtggtgtcagagcagcagtatctcttggagctggtgcagacaccaaggctgcccagtggtacaacgtggtccacctcccctagggaagctgctgcactcagaggctgtcctgcccagtggcccctgagccgtgtgagcctgcaggaggcgtctgagcagagcctcaagcccggtatggcgccatctccatgttgccatcactgcgttctcacctgaagccttaatctttgcgacacctgccagtgagcgctcggtttcaataccaaagtgtgtcttcttcttttttttttttttttaaatgcctgtttcataggaccttctgaaatgatttccagaatattttatctggctccaaaataaagcacatagcaactcacctcaacccctcatcatctccaggaaagtttctgccaaagctgtggcatagccaacttttgatttggttcttgccaattgttttatgtccctaaacctcatttggatccttggggtatagttttatctttctgcttcagtgatttactgtaacttttcaaatattggttctttctgtaccatttaagtatagttgatatatgtgaggcaaaaaaaggtttcagcatggtggtgagggaaaaaggagcttagaaatcccagttggcacagcctgggcaagcgccagctcccctcagggctaacggcactgttcacacagggatcctcagaatcagcggccacctgcctccaccttctgcctggagggcatggggctgttgtagaacctatggtagcaaatgtatatgtatgagtttgtattctgtagtgttggtgtagcacagaagaaagacctgtgtcctagagagtaggccaaggtgatctgcctcttctattgggagaaattctaatttctttcccactttctcaacaagcccaatattccctccaagttcttcttggtgctgagggctgtaggaattattgaaagcttctgcctcacttagtatcgtctggggcccagcacccagcaataactctaataatgtttcttaatggtatagcctcctgagattaaatgtaaaatcaaaaattaggaaatcttggagggagtcctcaagttgtattgctttgctgtgcttttggaagaagggacgacctggaggacacaggctcctgtgtgggtcttcatcctgcctgaccggcagatcttcctctacaccttgggcaaagtctatgcgaagatggtttcttagctctccatttgccatgattttcctcccattcatcatgagggagtttctcaaaccaggagtttatatttattttttagaaaatacacacttttcaggagaaacctgagcatgattttggattctccacctccccccagtctctgcacctgggattcagctcaaggattcagtgtcttcatttttacaaaagttcccccaagaaatcagcaaccagcctctgtttcatctgggagcccctcccttggccccctgggtttgggggtgctgccctactgggaacagcgggggtctgtcacccgtctgagccgcacccccctgtgtggatttcaggaag

SEQ ID NO: 7057 - DNA, 1276 bp, Homo sapiens
ttacagataagcacagtaatcaattcagtgctgtagtaatgatgagaccatggggtgacttgaggggaggcccgtgcgagggcctctgtgtggggcacacatccaatcctgcagtcaagatgatgatggctacctttaggaagttgtcagtgttcggatatttcagctgttgcaaatttttgaatggctgttttttttttttaatttaaaatttttattactataaaaatgttccagctgcaagagctggagggccaccatacgtcattcactgtggcacatctgtcatagagctttgccttcctgttaccctggatcgggctcttgttttccattgacctgcaccccactattattagccatgttgtcctgcttgcttccctttgggaagaataggcttagcagagctgactttgatctgataggcaaatctttgtcttctgtgttggtttttgcttgctattcctagtatgtggcaagaatagcatgactttgcatggtattcctagcacatggaacctgagatagctaacagtaggccctgagtaaataattgtggaatgaatggctgacatccatacagtgaacagtgggaataaaggagaaggagcatatttattttccaggggcgtctggaaggaatccaaaggtggtgtttgaactgagacttaagggatcaaaggaatttcttggggaccgaggcaatgggtgagtgtttcagacagaggggatagcatttgcaaatgcactgcatttgggaaagcatcttgtatgtagggaattattaaatgattctgatttctagggtatgaagtgaagctgggtgtggtggctcacgcctgtaaccccagcactttgggaggttgaagcaggaggattgcttgaacccaggagcttgagaccagcctgggcaataaagtgagacccccatctcaacaaaaaaattttaaaattagcctggtgtgatcgtgcactcctatagcctcaggtacttgaaaggctgaggtgggagtttgagcccaggagtttgaggctgtagtgagctaggcttgcaccactgtactctagcatgggtgacagagtgagaccctgtctttatgaaaagaaaaaaaaaaaagaggaaggagatgaggctgaacagtaagcaggaaaatgattaatattttctgcagagccatttagatgttaccttttttttttttttttgtattgtgagttgctaccctttagtgggtcctgaaattaattggcaagtcaagattagcacttttttttt

SEQ ID NO: 7058 - DNA, 1143 bp, Homo sapiens
caatatcatggaatcttcagattaagtctattctcttattgctgttcccacatatacatgaatcacataagttttttgcttgattctgtataaaggacagaaatcaaaaatgtataatgaaaggtgaactattatttaaagcagtgattcttaactaggggtgcacattagaatccccccagaactgtttcaaagtatgatgtctatgttgtactatgaagattctcaatcaggacctgggctcagacatttaaattttgaaaaaaatctccccatgtgcttctgatggacattgctgattaaaactcactgattacaaaatgactacaattagccacttaattgggcagtcctgaatttgaaaagtgactaggtgggatgccacaaatactctgtacctgttgatactagtgcaactgggtttccttacctaattgaatggcaatgtctttgactatcagatccatggaaaactctgcatattttgtttgctttgtgaagcatacctgaggtggtggcagcttcaagattccaaccagaatactgcccctgatgacttgatcagatatgctaaggaatgggatttctatagaatgtttgcgattgctgctttaggtaaggagatgccatgctttccattcttagttaactattcttacttaactaatctggttaaaactaagacatgtagtcttaattgttggtaagaagagctagttaatatgggacttaagatgaaattttcagctctaccactactaacctacgaggtgagtgtgtttgaatcacctgctttttaaaaatttgttaccacgtatatggtatggaagtagttatgcttatcggattagaaagtttcataaaatatttcgaagcacaatattgttgataaaattcttttatttttattattatatattttttaagacagggtctcactctgttgcctaggctggagtgcagtggcacagtcacagctcactgcagccctgaactcctgggctcaagcaatcctcctgcctcggcccccccaggtagctggaaccacaggtatgcaccaccacaccatgcaccacctccagctaatttttgtatttttttgttgagatggggggtctttccgtgttgcccaggctggtcttg

SEQ ID NO: 7059 - DNA, 1208 bp, Homo sapiens
tgcaaagtgatatttttaccattttagtatgggtctaagcaaggggtgtgtgtgcatgtgtgtgtgtgttgtatgttttaatgtattcatacactaatcatgggcctttttcttagtattcttacattcccgtgcatgtgactttccagttatgtaacttgctgttagaaaactttagattcccttggttcctgaagtacacagaagtggtgttcattttcagagtagaaactgatgtgcctttcagaatggctgacaaattttgggggtaagaaagtatgttacatgtccttagagagagagaaagaattgatttatgaaatagtacttttaaatttttcttcagatttggtatcattaccgtaattggtagacagtaaaacctgtcacttgaaaatgagcatctgtcacgttaccattaataacgttaacgtacgctaggcctaagactccctgcagtgacccatcttgtttgaatgaattgtctttgtgtgtagataataaacctgctgaagaagttgtcccggccagcattcttctgcattccaacattgccagccttgtcaaagaccaggtgattctgaaagtggactccggagactcggaagtggtcgatgggcttatgctccagcacatcactctcctcatgtgctcagcttataggaaccagctgctcaacatttttgtgcgcccatccttagtagcagtagcattgcagatgacaccagggttcaggaaaggtaattttcaggaatgcaatcttgacttttagaagaggtctggccattccattccatttagggagccacatttgaagccttgtaatgttcagcctcacgccggtgaagagcaggcctatcactgagaaaaagttagctttgttccccaaatacttgttcatctgcttcgaattttggaattgggaggacctggaaataatctaaacctttccttctataaatatggaaaatgaggcctagaaagttgcataattactgagagaaggatctggcatttgagtacagttctccacttcctggtctgcggcactgttttggctgtgccagctccctgatccagcaaaggcaggtgggcagatgagcagtcagcagtcgatgagtactcccgagatgcatggtcttgttctaattgtatcaggagtataaaaatgagtacagtacacgtcatgttcacaggagcctgtagtc

SEQ ID NO: 7060 - DNA, 1173 bp, Homo sapiens
atatcgtgtctgaagaggtgcatatacctaaaacaaccacaaacacctcgccctgtgagggtgacggaatcaattacttaatcacggaaagcagatgtgatgtgagcgtgaacatactggactggagttcagaaaacatgacggggttcaactcctggccctggccctgtggctctggccatgctgtcacctcttggagcatctaccgcttcccttgtggagggggctggcgtccccatgggtactggccagcctgtgaagctctgcacaagtctccagcttctcccctggacagtcgcccaaggaacagctgtatgaggaagggcaaaatcagcatcatttcatgagctgcttctcttttttcatcttaggttgtaagacaccaataggaaaaccagccactgcaaaactttaataatcaacaaatagttatggaaaattcggtcacgtaattactctcatcgaaggactcattacaacaaacagggaagtaaaggaagagacacatcctctcatactccctgagactctgagaacagtggacgcagagggaagagatgatcattggaagcaatcagtttactcttccccaccacagtggttaaaaggcgtttgtatctgacactatgtgtgtgttttaaaataaacttttggaaacatgtttggaaaagcaaagctcagctcatttcactaacacttttcagcttactatatgtattaaacttttatgttgacttttgaattaaagtatgacaacactgaaagctctggatattaaaagaaaatgaaaagggcatatctacgttacttgtagcttgctttaattaaagttgcctcaaacaagtacaaatttgaaagagatatttaataaattagctagcttactttaaatgttggccaccctagggccttaattaacaaaaatgaattagtcaagtatgtgcaacaaaaagatgctgtgtgatgcaccataaatatgtgtaagaattcaagagaagagaaatttagagtaagtaggtaacaccagaaaccttggcaagtagccacctctggaagtgacatgtaagctgagaactggattgagcaggagccagcccctagagtggcagggttggagtgacggaggaagggacagtggagtgcagtgtgccaggagaaaatagtgatcaggac

SEQ ID NO: 7061 - DNA, 1108 bp, Homo sapiens
gtaaaataagtaaatttcttttggaatatttttagtaacaaatagccactataattctgtaggccaaattttatattgagtttagctgttttctcaaaatttagcagagtggttaaaattctgtgctgataagtaactgatacatataacataaacataacaaagttgcctagttgatgtaacagtggaaagttatctggaaatagtattttgaactttaagccaagtttaaaacattataataaaaggaataccatttgtgcattttaagtaatcttttttaaaaaaaatattttccatgttatagggaaaggacaaagagacttttatcagtttgctttttgtcttgtggctgtacatgctgttggcatagccctaacacagttgttcacaagttttcttttttcttgttgcaattttccttcactttgttgtaatacaggtgcacaaatcttaagtgcacagctgggtaaacttttacagtgttcacctgtgtaactaccacccggatcaagttagagaacacttccattgccacagaaggcttcctataggtgtctgttcccagttgatacccatgaccctcaccacctccagaggtccccactgttttcaccccatcgtcgcagattattttttaattttataatgtagtatctttgttcctatgtatagcaggagttcattttcattgctcttgcatttgtatgaatatactagaatttattcatccattctaatgttaatggacatttgaattatttccagtttggggctgttaagcataatgctgctaagaacattcttatcttttctgttgggtatatatacaggaatggaattgctgagtcacggggtatatttctgtttagctttagtaaattctgccagtttacactcctaccagcaatgtatgagagttttagttgttcaccattcataacactgttagcagcccttttcgttttagactggttggctgttcacaaattttgatattccttaaagcattaaaacattttaataaatacttataaataggtattaaaatgtatattatgttcaatatatagttatattttcatagaggatcatttctctaaatgaa

SEQ ID NO: 7062 - DNA, 2207 bp, Homo sapiens
gttaaagattgctgctttttttttgacattgtcaataacgaaacctaattgtaaaacagtcaccatttactaccaataacttttagttaatgttttacaaggaaaaagacacaagaagagtttaaatttttttgttttgttttgtttttttgagacagtcttgctctgttacccaggctggaggggagtggtgcattcttggctcactgcaacctccgcctcccaggttcaagcaatcctcccacctcagcctcccaactagctgggactgcaggcacacaccaccatgcctgactaatttttgtatgtttagtagagacggggttttgccatgttgcctaggctggggtttaagttaaattttttaaaaaactaaagtgactggcactaagtgaacttgagattatcctcagcttcaagttcctaagataagggctttcttaagctttcaggtgtatgtatcctctagatgtagacaataatgtcccatttctaagtcttttccttttgcttctccttaaattgattgtacttccaaatttgctgttatgtttttttcctaatactgtgatctatctgatctgcagacaagaaccttgtctctgttgaagagcatcaaggggagattatgtacacattgaaactgaagtgtggtgttactgacggaatgtgcagtaactcctcagatatctgttaaggcatttcccagatgtgatgccagccttcttacctgtactgaaagatgcttagcttagaaaaaaacaaaacagatgcaaaatcagataattttattttgtttcatgggttttcttatttactttttaaacaaggaaggaatattagaaaatcacacaaggcctcacatacatgttatttaaagaatgaattgggacggatgtcttagacttcactttcctaggctttttagcaaaacctaaagggtggtatccatattttgcgtgaattatgggtgtaagaccttgcccacttaggttttctatctctgtccttgatcttctttgccaaaatgtgagtatacagaaattttctgtatatttcaacttaagacatttttagcatctgtatagtttgtattcaatttgagaccttttctatgggaagctcagtaatttttattaaaagattgccattgctattcatgtaaaacatggaaaaaaattgtgtagtgaagccaacagtggacttaggatgggattgaatgttcagtatagtgatctcacttaggagaatttgcaggagaaagtgatagtttattgttttttcctcgcccatattcagttttgttctacttcctccccttccttccagatgataacatcacatctctacagtaagtgcctctgccagcccaacccaggagcgcaagttgtctttgccatctggtctatagtacagtgcgcggcgttaggccacaactcaaaagcattatcttttttagggttagtagaaattgttttatgttgatgggaggtttgtttgattgtcaaaatgtacagccacagccttttaatttgggagcccctgttgtcattcaaatgtgtacctctacagttgtaaaaagtattagattctactatctgtgggttgtgcttgccagacaggtcttaaattgtatattttttggaaaagtttatatactctcttaggaatcattgtgaaaagatcaagaaatcaggatggccatttatttaatatccattcatttcatgttagtgggactattaacttgtcaccaagcaggactctatttcaaacaaaatttaaaactgtttgtggcctatatgtgtttaatcctggttaaagataaagcttcataatgctgtttttattcaacacattaaccagctgtaaaacacagacctttatcaagagtaggcaaagattttcaggattcatatacagatagactataaagtcatgtaatttgaaaagcagtgtttcattatgaaagagctctcaagttgcttgtaaagctaatctaattaaaaagatgtataaatgttgttgaaacattatggtggttatttccagctgtcttttttgtttttcaatcctttatcatacattggctttccgaatgatccctttcatcagataaagcttttctggcttagtctaggacatttgttataactttttgtaaatgataatgaaggaaagagaacagtaaacataggagttcaaca

SEQ ID NO: 7063 - DNA, 1202 bp, Homo sapiens
tatataaatttaccaacactcataaaaatcttactcagaaatcttcagaggtttgctaaggatacaatttgattcttacacatttaatgctcaccagctgcttaggcccacaccatttatccaccctgatttgctactgctctttgaaatacaaccagtgtttcagccagactgttttcctgcttctgctccccttctcctcctcccagcacatctgtgaattctttgactggtttaccactcccacactcctccccagcaatgcagatcttctacaccctttaggatctaagctaagtctgcttcccagatatcctcccgaactctgaatgtcctttgatctctcttttctcaaaaaccttttataccttttattcccaaattatcttctctagaaatctgtaagggcaggggaaggaaaggttttatactattctgtcttcggcagaggacttttattattgcttgttacgtacagtattagtcatatcttgctaacactcagtgaactgccctcagctgatcctctgccctgtacctcacctctgctttaccacctttccatccgatttctaaaactgtagtgggactttttaaaaagtgtgtgagagttttaatcctgttgtggtaaactcgcctttctttgcttgctatactgtttctagtccctattttccagataaaaatagcccaggtcagcatggcttgcactatttttaactccaggtactaggagaaaggtttgctctaaaggtgaaatgaagttttatgacgttgcttaggccaaaagtcagttgatgaggttatgaactgcaatagaactttacacatccatgaatctaatggagagggcctgcatatcttatgtccctcacccctaccaatggtgtgtgaatccttcaaaacaaaacagcataatagacataatgttgaaagtgacttctttatataccctttttataagacctagaagaaaaaagcttgtagctagaaagcagatgcaaagttcaacattgataccacgttgatgtgcagagtaaaattttcaagagcaaaattttaagcttctaaaattatcatggatttgatttggttttcgaactgtaatttactcaaaatgtcaattacgtggaaggaggtttaagagttgtatttaacaaaagagggcatgagttaattaagttgagaaatatttcttttat

SEQ ID NO: 7064 - DNA, 1100 bp, Homo sapiens
gtgtgtgtgtgtttttgttttgttttgtttttttaccagccctcctctgatgcacaggataagcagtttggtacttggagactgagagtcacacctgtcgattaccttctgggagtggctgacttaactggagaattgatgcggatgtgtattaacagtgtggggaatggggacattgataccccctttgaagtgagccagtttttacgtcaggtttatgatgggttttcattcattggcaacactggaccttacgaggtttctaagaagctgtataccttgaaacaaagtttggccaaagtggagaatgcttgttatgccttgaaagtcagagggtcagaaattccaaaacatatgttggcagatgtgttttcagttaaaacagaaatgatagatcaagaagagggcatttcttagaatctaacgttactcagttactaattcttttgagaactcctaagagaccaatttgtaagacttatttagtatttcatttaactttattgtggcttttacatagaaacatattcagttgtacttgttttaaattgtatacaagctgtacataaaattagccaaatgaatcatttcttatatcttattcatgaaagtttgcatacagatgtttgcatatatgcctttttgaatttttgctggttaacctttatcatttatctttgtaatgtgaacatgcttcagagtgtaccttttgccataacctattttaatttactttttctgaagtttggagtgataatttttagtggaagcaatttgtaatttaagttggtagttatattatatatagaaaagattttttagttaaacttctggacatgagcgtcctgtttaaatttcttgttaatatcgtgccaagcctcaaaaataggcttattccatggaacaagaattaaaaatgaataagctatcaatatataatttaagtacaagtttaggctgggcgtggtggctcacgcctgtaatcccagcactttgggaggccgaggtaggcagatcacgaggtcaagagatcaagaccagcctgaccaacgtggcgaaacctcgtctctactagaaatacaaaaattagctggatatgg

SEQ ID NO: 7065 - DNA, 1185 bp, Homo sapiens
cactgcactccagcctgggtaacagagcaagactccatctcaaaaaaagaaagaaagaaaaaagaaagtacaagtttataaagtattatagtgaaaaattcgcattctggctgattttaagccatttaaaatttatataaaacaaccttccataaaaatttgacaggtgcccagatgttgctttctccatttattttttgtttttttttaatcacagtaggtctgatagagaattggagctaaattataatatttttgttggtaaagttgagttatatacttgtacatacaatggaaatgcttttagtagtgattatttagcaatttttgtttttgttatattaggcatgtttggaggctttcctattctagcatttaaatttaaattttattaaaattaaataatttaaatctagcatttaaatttaaataatttaagtctagcatttacttttaaataattataatgaagttttgaaatactaagttaatccagacctttagttgtcccatggtgttaataaagttgccaaagaagatgtattatgaacaattcagcaataagacaattgtcaacacagttgagaataacaatggtaatcgttagtaatatttagaattggaatttgcctactgaaatagttatagatgattacttgtgatgtgaaactgaattgagcatgacaaccagacatttccagttggttttgtaagttttgagaatctagatactgggttttattttttgaaagattagctctgtttgtaagggctgattccttgaaaatgtaattttccagaaaaacacctaaagaaaataaaacatggacatgcctagtaaattctgtttttttgtttgttcgtgttagtgatggtgggttttttggttttgcaactcacctgtagtcaactcactacaggtgagttggtgccattgctactgatatatctccacagttcatgtcatactaatactgtgggtgttacgccaactctgagtctcacttttaaaaatacttactatgatggcatcatgtgtggtaacagttttcatctttaatagaaaaagaaactggttctaggtcacatggtaagttactgacaaaattctgaaagaatattgggttctttcataaataatttccagcatgtattacatcagtgaatttttttatttttttagac

SEQ ID NO: 7066 - DNA, 1518 bp, Homo sapiens
tatataaaggctatcttagcaccccatgggagcagagtgggatgaaagaacagggtgtgtggagtgttcattcccatccctttgtcatcagcaggaatcaggatcagaaaagtcccctcactaaagaaagtcaccccttctcccctcaaaaagtacataagtaaaaataagaatcaaagattctcgtagcccagcttaggaggaatgaatgtatcgatcagtctccatgactcagtttatttctgctctgaccaggaaaaacaagacaaggccgttctccaagcagaagtgcagcacctgagacaggacaacatgagactgcaggaggagtcccagaccgcgacagctcagctgcggaaattcacagaatggtttttcaccaccatcgacaaaaaatcttagccaatccgcacctcatcaagggaccactgggaaatgccccttgtccctttgaagtcacaaacatgtggtttttctgtgtgctttcaaccaatcgtagatgtttttgctgttccattctgtgtagcaccattcaccacagcaggatagggagcctcgactctttctcggtaaccacggcagagagcagcgccgatgtgaagatgaatgaatgtaactcctggtgtgaagatgaatgtaaaccctggcgacagttgagacctttttcttttagactctgctaaaacagtgctctggcttgggcttacctcaagagggaagatagttgagttttatttcctgtatatcaggtgacctggtagagatgtaaagcaatttaccatagtttgggctttagtattgtaaaataaacatgagaacaaataatcagacatatactttaatgttaaaggtgctctatttttttggatgtacagtagttttatttccacagccacattaccatagcaataagaaaggaggcatagtacatagttggaaaagctttgtggggggattaaaaaaaaaaaaaagcactgttgtgtttaacactagttcagatgcagttaccttagagacttatttatttgcaggaacaaatggtgcctgaatattaacagtgttctgattaaaaacaaaaaaaagatacatatgccttgtaaatggctcaccgagtggtcagtagtcacttcaactcttagttcacttttgtatagttgctctgctggaaagaaatgagagtgaatctgcttactcactagaacttccctgtgtgctgtgagccagcggaaccacttgtacaatgccagatttgtttatctttgtacagaagctttgatgaagtgtcttgtatttaacacccttatttaagcttatttaaccttaaattgttaattttataaaatttggtttggcctgcactacgatgagggatggaggtagctgcaggctcagaagagactgagcttgcacagatcagaccgagaagcagggtgagagattctaacgactggatgctgctagtaacacattgtttgtattgctttaccatttttaactgttagatttgagatgaacata

SEQ ID NO: 7067 - DNA, 1271 bp, Homo sapiens
agccaggctaccttaatagttaatgctggtacacagctgaaaggcatggttcttggcttagaggaacttgaagtcagtgagttggtaaacagcaattagagataaggaaaattactctgttggatatagatggagtgctgtgggatcacaacattctttgcttagatgcaattagggtgggagacatcctaggaaagtttcttagatgagttaatacctgattgtatggtgtgaattttatctagctatgtagagaaggaagatggtgttccagggaggagtgttacgaacagtgctgtggatcatgaaactttgtgggcagaagcagaggggaaagacagatacgaaatttatcatagaatgtgttcaacttgaagcatattaattgctaatggctacttcctatctcttaattcaggtgaaggaaatactcatgaccagccagatgtcttaaggaatgcttttgaaaagaacagaggcgtacaacattattacgacaacagagaagcaagttggctttgaagaaactgtattctgaggatgttgtttgctttgggctaagaaaagaaaaaatacaactacagacaaagcctttatatctgcaagtattatggcgtggtcggtagcaatgtaattagatttacatcagtcttcctggtgagacttggaggctcttcctcggtagacatgagtgacccaaggcagtcacaagaagagaagcacaagctaggcagagcctcttcaaagttcaaggatccccctagaatcatgcagtcagatgattattttgctcggaaatttaaagccattaatggcaacatgggacccactacttctttaaatgcctcgaattccaatgagactggcggtggtggtccggctaatggtaccccagctgtgcccaagatgggtgtgagagcaagggtgtctgaatggcctcctaaaaaggactgttccaaggagctaacatgcaaggcactgtgggaaagccggtctcagaccagttatgaaagcatcacttctgtcctgcagaatgggcagagtgaccagagtgaaggtcagcaagatgaacagctcgatctggacttcgtggaggccaagtacacaatcggagacatctttgtccattccccccaaagaggacttcaccccataagacagaggagcaatagtgatgtcactatcagtgacattgatgccgaagatgtcttagaccaaaatgcagtcaaccccaacaccggggctgccctgcacagggagtatggaagtac

SEQ ID NO: 7068 - DNA, 1922 bp, Homo sapiens
tcatttgttaatgtttcttttagtaacattcagaatatcaaagagaaaaataagtgaataaacaaaaaataaaaagaatatcaaagagaaaaattgtttgttacaggaaaactaatctttcttccattttcttcctcagaaatgaacgtgagggaattccagcaaatctgatccaacagttggacgtttgtgtggaaattcctcaacagggcattatccgctccctgaatgtccatgtgagtggagccctgctgatctgggagtacaccaggcagcagctgctctcgcacggagataccaagccatgatgtgccttccttagtgaactgctgctgctgttcagacttttttaaaaaaaactatttggactaaagaaacagattctgaaatttattgtgataatttgtatttcttttttcttgcaatttaatgccaaaagtttgccatgtgccttaaacatattactatatattttcccctttaataaacactttttgttaaattgtattcttcctttaataaaatattttaagcaattgtggaaataaaacaatggattttttaagagagaatttatttcctagaaacgccttttgtcagaagtgtggactatgataaagcagagttaaagcagcgatcatctgtgaacactcatacccttgagtcatatggagaccagggaggttgaggcaaaggttccgaatgaagaggggtcatcagcctctgtgccgctttccgtctctgtactcccctcgggaacacatttggcaggatgcagagccagcatccctgtgaggctcagaatgctcaggtagtaggctttaatttatttttaaagccatgaactaggccataatcattcacagtaagtttatggccaggtgctatggctcacgccccccacactttgggaggccaaggcgggtggatcacctgagctcaggaatttgagaccagcctggccaacatggtgaaaccctgtctctactaaaaatacaaaaattagctgggtgtggtgacatgcacctgtaatcccagctacttgggaggctgaggcaggagaattgcttgaacctgggaggctgaggcaggagaattgcttgaacctgggaggcagaggctgcagtgagccgagattgcgccagtgcactccagcctgaatgagagaatgagactccatctcaaaaaaaaaaaaaaaaaaaagtttatatgaagtttttcatatcacctttgcacacagagatcaaatagtggttagaaatagtctatattctgacaactatgaacatggacctaaaggagttgaattactcctgtatatctttatcgcaacagaatggaacctgtaagtgttgattgtttctgttctttcaatttttttcctctggcatttattacttaattatttatgagtaactatttatcactacccagcaatgaatttcaattatatctgggtccttttaaataatatttaaatttgagcccattacctgtaaatattttcttctgcagttttctttagaaatgactgttttgtagaagggttgcaaagagagtacacaaagttttcatacacccttcacccacatgcctctaatgtgatcttaataaccatggtaaccttcatcaaagctgagaaagtaaccattgataatggctctcttcactagactataggctttattcaaatctcccattttccactctgttttccactctgttttctgccccaggagccaacccaggataccacattgtgtgttcccttagtctcctcatatctctgacagatcttcagtctttccttgtctttccatgacctggacacttgaagagtactggccaagtattctgtgaatgtcccataatttgggcttgtctggtgttttctcattagactgagtttgtgggttttaagg

SEQ ID NO: 7069 - DNA, 1169 bp, Homo sapiens
tgctgtttgtaagatacatcattattttatgtacttccaaggaaaaaaatgttaccaaactatgatactctggattctaagatgtgtctcaatttcagatatgctaaaacgtgaaaaaacgtgtatctcatgtttccatgaagtatcataatatgttggttaataaagctgattttgaaaacttaaagttactactacaaatgggaattgtgtctgaatccaactaaagttttttacttaatgctttgttaagtctcattctaaattatctcattctaaattatttcacattcttaaaaatacatatacatgtatacataaatatatagagattcagatttatttatatgtgggattgttttctttttccttcccaggtactaatttggtcgaagcagataaccaagcggagtggaccgacgttcagaagaagattatcccgtggaacagtcgtgtttccgacttagacctggagctcctgtttcaggatcgtgctgccagacttggaaagtcaattagtagactcatcgttgtggcctcgctcatcgacaaaccgaccaatttaggaggtaaagttggagttttctgggagctttgcctgaaagcttttggtcttcaacattttttaattaatccactgccacgggagcttcaaaggaatgtatgcgacatgatgagcttagcattgtgctgggaacaatcttaatgatcccaggtgttctgtgcaggactgtgcaggacctgtgaggtatttggggcttcagtgctcgttgttggcagccttcagtgtatcagcgacaaacagtttcagcacctcagtgtctctgcagaacagtggcttcctctagtggaggtgggtggaaagtaatttattattaaagttcttaaaacaagcccgcacatgtacccgtgaacctaaaataaaagtttaaaaaaaagtttgtatttgtaaaaatattttatagtgctctatctttgtgtattagtccttttgcataatttataatagtgcagtctttaatcatttaagaacagtgtttaaaaataacatacagctcacttctgtttttctacttatttttttataggtcacagttttagaaatcatcaataatgtagaattctgttcagtaaaacatatcctgttacagcccactcttgatgtagga

SEQ ID NO: 7070 - DNA, 1197 bp, Homo sapiens
ccaggcgccatggctcatgcctgtaatcctagcactttgggaggctgaggcgggtggatcacctgaggtcaggagctcgaggccagcctggccaacatggtgaaaccccatctctactaaaaatacagaagttagctgggtgtggtggcgggcgcctgtagtcccagctactcgggaggctgaggcaggagaattgctagaacccgggaggcggaggttgcagtgagctgagatcacgccattgcactccagcctgggcaacagagtaagactccatctcaaaaaagaaaacaaacaaacaaaaaacatgtaagttaaaagcaactaagttcagtgtttgaagtgttttatttaaaaatttttttatttttcttaatcactcagcccaaaatgtcaatgtttgaaatattttaaggtgccattctttttctcatcctcctaactgctttttgggggaagaaaaagcccctgtgcctaatttaagccacttacatttcaagttgtcattgattttttcattaatcacaaattcaatagataatttaatgttgactccctcccttctcctttccaggatgaattagtgtccaagtccaaaaaacgctactatgtgaattctctacagcacagagtgaaaaaccgagtgtggcagactctgctggtacttttccctagacttgaccaggtatcatatttttattatatttgtacctttgaagcatatgatttcatgactgaactattttgcagaaactatcatatactattttaaaattgaaaaagataatgtttaaaatttattctgcagttcttaaaattgaagttattcaaaagtttttattaacagagagaataccaaggcaattaggtattgtagaaataagttagaagtgggtttacatggccccatttaatatttttttcccttcggtgttttaatgtgacattttaactgtttaaagtctgatttgccatttgattagaaaatgcaaatacttaactcctaattttctgtagctacgttattttggagtgttacactgttttggattatctgtactgtagaaaccaggcaaattgtatcatttgggatgggaatattgtttcacatggtggatttccttgcccttaacttcatgaatagtgtgaccatacaaaccagctaaggaaaggccaggtatcttacaacaaagtatc

SEQ ID NO: 7071 - DNA, 1169 bp, Homo sapiens
tgctagaagacctttgatgtgctcttccttctgtctagaaagttctcgtgtcccttcatctttcctcttgagtcgtcacactcagcccaattgtcatttcttcagggaaacttcctcttactctctggatgagggcatgtcttcctagtgtagactccactagcaccatgtacttctcattcgtagccctcactataattgcatttttctatgtattctttgataatgcttttctcctgtactctaaattccatgagcacaggaaacactgggtctgcagcacccaggtaattgcatggcatgtagcaggcacacaaatttcttttttgttcctgttgaaatagatatgtataataatgagccatgctctagggtgttctgctgtagttcatctcggttgtatttctctcataatttaatattaataaggcataatcatttagtgggtttttttgaagcatcatccttgaaggattttgttaatgctttgcaaaccttaactgttgttatttaagcaggagaaaactgctttatgcctgattggtttgaagccaagcttgtttctctgatggtcttgctggctgtggatgtggaaggaatgaagactcagtataggtaattgtttctgtaattgaaaagaaagcctatttgaaaaatcctgatgagaattatgatgtgtattcagatttttgaatgattgaacttagttgaccacaaggtgtcaaggaaggtactagaacattaacagtatactgaagaaatgtttaaagttaataacaaataggaataggggcatattagtgcttttaaattggtaaattaaatgttaaacttaacaatttaatgttaattagatggccaggcacagtagctcatgcctgtaatcccagcactttgggaggccaaggcaggcagatcacctgaggtcaggagtttgaggccagactggccaacatggtgaaaccctgtctctactaaaaatacaaaaatcagccgggcgtggtggtgcacgtctgtagtctcaactactagagaggctaaggcgggaagatcacttgaactgggtggcggaggttgcagtgagccacgattgcaccattgcactccagcctggaccacaaagtgagacttcatctgaaaaacatttaatgttaaattagagaagatta

SEQ ID NO: 7072 - DNA, 1273 bp, Homo sapiens
tgggcagaccaacctccaatcaggaatcgatgaagctggtgtagatactacattaacttttaacgaaggcctcgtttctcctaaaaataagagaccaggtgggttctatctaggcagggttggtggcaggaacccaagggaagctgagctgcaccaagccgggctgggatccccctctctgcggccgcgcgcccggctccgtcggcgcacgcgcacgtaggggccggccggtcctgtgcgcacgcatcgcacacgccggcgccttcctttgggagcccgggccggtggcgcgggcgctcggcaaatggagtgggtgctcgcggaagcgctgctctcgcagagccgggacccccgggccctgcttggggcgctgtgccaaggggaggcatccgcggagcgcgtggagacgctgcgcttccttctgcagcggctcgaggacgaggaggcgcgcggcagcgggggcgcaggcgcgctcccggaggcggcgcgcgaggtggctgcagggtacctcgtgccactgctgcggagcctgcgcggacgccccgcgggcggcccggaccccagtctgcagcctcgccaccgccggcgcgtgctgagggcggcgggcgcggccctgcgctcgtgcgtccgcctggccgggcgtccgcagctggcggccgcgctggctgaggaggcgctgcgcgatctgctcgccgggtggcgcgcgcctggcgccgaggctgccgtggaagtgctagcagccgtcgggccatgtttgcggccccgcgaggacgggccgctactggagcgcgtggcggggaccgccgtcgccctggcgctgggcgggggcggggacggggatgaggccgggcctgccgaggacgcggcggcgctggtggccgggcgactgctgccagtgctggtccaatgtggcggggcggcgctgcgggccgtgtggggcgggctggccgcgcctggggcgtccctggggtccggccgcgtagaggagaagctgctggtcctgagcgccctggccgagaagctgttgcccgagcccggcggcgaccgcgcccgcggcgcgcgcgaggcgggcccggacgcccggcgctgctggcgcttctggaggacggtgcaggcggggctgggccaggcggacgccctgacgcgcaagcgagcgcgctacctgctgcagagggcggtggaggtgtcggcggagctgggggccgactgcacctgcgggccccaggaaggaaacggtacctgcctctttgccccccagcctagtgctacctac

SEQ ID NO: 7073 - DNA, 1068 bp, Homo sapiens
ctcaaaatatttttagaagtctttttgtaaactaatttcttttgatcactattttgcatcagtaaaatgatttttttaaaaccaataaatcatcaattattagaaatagttgtctcacagtgatactggtttttcttttgtgctgttatgatttaacattgacaggaacactattttaaatccttacgttcaggtgtttgtaacttggccttataattaggctgaattatggcttcaaggtctacaatttatgtgtatggttcacagcctagcttctatttacatttgaaaatacagatttttaccaactttggattcttttttagttatatgtttgtctttcctttttaaattgttcaaaactattttttaatggtcaagttactaacacttgaaaatcagatactgcaccaaatacagtgtttttccgtagtgtttttaatgagtgcacctattactactgtgcgagaattcatgttttaccagtcattgttatattacaaacagacttgcatgattaaccagttgttacacttactttttcaagttggagtatatatgactcagtgcagactggtctctcttatgtgaatgcacacatgcagaaatgcagagtcaattttacatgcccataaagacatttgtaaagaattcagctcttatggtctgttgtataaatgtgtatctaggcactttggaatttgacctcacagatgttacaacttgatcagtcgtttgacctaatttgtggtagctatctgtatgttttgcaatcttaatacagacatgctttccaaaaagattaatacagaaccatcctgccgttttggataagtctatccagctgtggaaagggcaacctgtggtttctctgtactggtgtttaatgggggaagaatatgaacagctttaaagagctgtgtattgtggttactactattaaaaaataagatctgcacgagtctgactggcctttgggtggcctttgtggacggctcgtagctggaaagtgttgatctgggttttctggcattcttttaagttaaaaagttaacatcgggacatggg

SEQ ID NO: 7074 - DNA, 1089 bp, Homo sapiens
ctccgcctcctcctccggcgtcgcgggctcctcggacatggccgcggcggtggcggtggcggccgcgtcccggcggcagtcgtgctacctgtgtgacctgccccgcatgccctgggccatgatctgggacttcaccgaacccgtctgccgcggctgcgtcaactacgagggcgccgaccgcgtcgagttcgtcatcgagacggcgcggcagctcaagcgggcgcacggctgcttcccggagggtcgctccccacccggcgccgcggcctcggccgccgccaagccgccgccgctctccgccaaggacatccttttgcagcagcagcagcagcttggccacggcggccccgaggcggccccgcgcgcgccgcaggccttggagcgctacccgttggcggccgcggccgagaggcccccgcgcctcggctctgacttcggcagcagccgcccggcagcgagcctggcccagccgccgacgccgcagccgccgcccgtgaacggcatcctggtgcccaacggcttctccaagctagaggagccgcccgagctgaatcgccagagcccgaacccgcggcgcggccacgcggtgccgcccaccctggtgccgctcatgaacggctcggccacgccgctgcccaccgcgctcggcctcggcggccgcgctgccgcctccttagccgcggtgtccggaaccgcggccgccagcctgggctccgcgcagcccaccgatctgggcgcccacaagcggccggcatccgtgtcgagcagcgctgccgtggagcacgagcagcgtgaggcggcagccaaggagaaacaaccgccgccgcctgcgcaccggggcccggccgacagcctgtccaccgcggccggggccgccgagctgagcgcggaaggtgcgggcaagagccgcgggtctggagagcaggactgggtcaacaggcccaagaccgtgcgcgacacgctgctggcgctgcaccagcacggccactcggggcccttcgagagcaagtttaagaaggagccggccctgactgcaggcaggttgttgggtttcgaggccaacggggccaacgggtctaaagcaggtag

SEQ ID NO: 7075 - DNA, 3266 bp, Homo sapiens
aatgtcaacataataaaatctcagttaaaaatattttaaaaattcttggtagttgagcagctctgggggaataagggcaaatatgcttgttatgaactacactgaaatctaccaaagttaatgtttactttgtgtagatccatttgtctattttatttatttttcccagtgaaaagtgtattttgatagagaacttttcattctataaatacactatgagttactaaaatatcatggattttgtttattcctgaaacatagttacatagttaaactgtacatatgacatggcttatgttaaaaatacccagtgctcagttttgaaagataggcaaaaaaaaaaaagtataggagaaactgaagaatgtacacttttttagagggcacattttgctgtaaatctggaaatttgatagacttgactgtgtttgtgaaaactgagcattaaaggttttgattgatcctttctttccatttaatctctgagacgtaaatatgtgaggtgtgctgctgtgctgggttaacagcttccttccctttctgtgtagcagtcttgaaatgttctgtttaaatcagtaggcttaatgtgttctgggtatttatctccttgtattttaaatatatgtagttgcaaatagcaccaggaattagatttctgtacacccctaatctagccttgtgagcttcgctagttaatgtgtgctcactttccctccatttgttacgtgagagaatgcgtctgctgatcactgaagtgtcccttttagcttctgattcattgggttctgttgggcatctttaaatccaccttaacctgaggaatgtatgtgggcaaccaggccctgcatttttttatattctgaattttgcatgcttgcctgacttagtatttctgaattgatgttttttttaatggtataactatcttgattttcactgaaattatatggttctgtcactactctgtaaattaatccgaaacttttaaggtaactgggatgatctgcttgtaaaaatgcttgttgccttttgctttatcttcagtgtacctccttaatcctgcttcaacttgattatcttgtgaaacgatgagagtaagttgcaaccttgtgactgaaaacttgaaaagagtggagcaggtgggacctcttattctcaaatagtgacatattctccgtagtcacagtttcagaactgagtaaggatccttggtacttggtggcatctgttgaactgaggagcatttctcattgtaaagattgcctttgttctgtctaaaagtctggagaaatcccaaagacttttcctatgtactaggcattttattttgattgacttacaaactcttcttaatcattatcaatctcggtttttttgtggtgcagtggaaggagaaataggtctagtttctgcctctgattagccgcacagccttgaacaaatcacatttcatctttgaacttacctctactgttagactaggcgactcacatttgaggacttttctcgggtatcttgagggtttgtgatcctgaacccttaaacagtgcttttttgttacacaggagggcttttttggggggatgaccagtacagacatgccagttagttttactagtgggatcccaaatccaaagcagtgtagtggtgattggtcagtgactaaccaggcagctaagaagtcttaggcagcagcccagacatgtatagaggggcagttagagggagaacaggggtgggaaagggagcaaggggcagatagctcagcaaggaaagaatgggctcagaaaaaggagggctggctggaggagtgaggggcagcttaagtttggggagggtagaaacgccgtttccttgggaactggagtgcagtatgagctgggtgtcacttggctctgaacatactggctttgctgtaatgcttgaaaaggcgttggtatcttcattttacagttcattaacccaagtacgttttcttatttaaatgacaactttggtgctttaaaatgaggtaccactttttaaagctagctgtgtcgagttaaagaaaaaatcagcagttttttctcccagaaatgtaattgccaaacactattcatccccatcttaagttttacaaggtgatgtaatcagcttgttgtagtgatgctggccaaatggtgctcagcaggtgagaacaaaaaaaccccagatctcagtgaactaatacacagcttgagcgtttccatgtgctaatgttgcacacttactaaaaaactttggaaatggaaaataatgtattagtgcaacagttgatgtgcttctttgggcaaagatatagttttgttccacaatttgtacttaaaagcgaaagaacattgaaaacatagacttactggctgtagcaatgctggcctgttaactgataactagaacttaggttcacgtttatgtaaagtgtgtaaaacctagtagagcttgcatagtcggcactcagtaaatgtttggttccttttgccccttggtaagtttattttaccatcctcccacctgccattctgactttattaaatcaacatgtggaccagagtgttaatgagatgttattgcagaagagattgagaaaattggtatatcatgcagataacatacaaaatctttttgtaacgtaaaaaatgcagttttattattgcttgtgcctcaactgtttaagtgaatattaaagggcttggagaaaactttggcttggcgtatgtttggagaagtgaactctgctgaatttattgagtctaaagctgtgggttttttgttgttaacgtctttgaggatgtctagggccgcaggcttccctgccagaagaatgcacatttgcttcagattccaggtgaagaaaatccctgtggtagtgtcagcgcctgagggcttccaggtggtggtgggcccagcgtcaggagatagcagtcacctgggaggcccgttacaacaggttcgtgagaggagcccagtggtggtggtgctgacgtgcgaaacatgaaggcttgttagagaaaccagctgtgttaaggtgacagaatgtgtacgttagcactgtaaaaagcagctaattggtagcagaacgtgctagctgagaatacgttgtattctacatcactgataatgatctgaagtgtacaagtcatcagtatcagatctatgagagtttttgtagttttgctctaacataaatttctctttgccacctccaaagttattatattaatagtaaaagtaatgctttggagagggtg

SEQ ID NO: 7076 - DNA, 1025 bp, Homo sapiens
ggctatcctgtaacattcttttgaaatggaaccactacgcacaatggattgtggcaacctgaaaagaaagtacagtttaattcaaacaagtcacaggctgcctgtgttagacaagatgaagcattcgcagtctgggaccctgcatctctgtctgccacaaacaaggctgtcagctagtcttctgagtacgtgcacgccagtaacgcgtacgcctcgttacagcatggtcggcggatatgaaaaaaagtccgtggtcacgtgcaaattcccgactccagtgcgtacacccagcggcgcaggggaaacgccggcttcgcccactgcgcaggcgcaggagccgcgctctgggcctctgctcaggctctgccgcggacgacctcgaggcccttagttgactgggaccggaagtggcgtgtgctcggcctttctgtgttcctggcccgcggccgtcgggtgtgagctgcgccgaccgctctgagggttcgtggcccaccgctccttcgcggtccctgccgccaccgtccacgctcagcgttgtagagaagatggtgggtcggaacagcgccatcgccgccggtgtatgcggggcccttttcattgggtactgcatctacttcgaccgcaaaagacgaagtgaccccaacttcaagaacaggcttcgagaacgtgagtgggtcctctctcccctggccaggcttgctgccttcggccgccgcccttcacaggaggggtcattgcctcccaccagcctgtgggccgcgcagggcgaccgcgtggtgcggccctcaataggcgatggcgctggctgcgccgctccgggggctctagtgccccgtaggaattccattttggaggaaggatttttcccgttttgttttccccagacactttagccgtgcaaatgcactcttgatttctgttgcaatctcgggtgtgtgtggcctggggaggaggttgtctctttttttgtcgttcatctttttaaacctctactcttaactaaaaagtcgtgcatttttgtcgca

SEQ ID NO: 7077 - DNA, 1135 bp, Homo sapiens
acagagcaaaactccgtctcaaaaaaaaaaaaaaaaagccacgtgtgggggcatgcgcctgtggtcccagttacttgggaggctgaggtgggaggattgcctgagcctgggaggttgaggctgcagtgagctgtgattacgctgctacactccagcctgggtgacagagcaagaccctgtctcaaagaaaaaaaaaaagagcttaactttttctaaatcttgagttaaatcattttttttctaaagatactagtcagtttctagatagcgctgctctaaaaattttgatatatttgtgagtagtaaatctaggaaaattcagaagacattgggaaatatttctagtcgggagggtagggctgtgctttgtcaaatactagacctaactggcatgactcttactgcttattttattttttgccttaaaaagggaaagcgctctagcgagtgctgatttagaagaagaaattcaccagaaacaagggcagaaaaggaaaaattctcaacctggtgttaaagtagcagatagaaaaatacttgatgacacagaagacacagttgtcagtcaaagaaagaaaattcaaatcaaccaagaagaagagagattaaagaatgagagaactgtgtttgttgggaatttgcctgttacatgtaataagaaggtgagtttgtatatggtaaaagttcagagaagttaataactttgttcttcctgtgttgaataagcattcaatagtaagtcatggatataacttcattgtaaattattacataaatcatcctaatatgaatggattccagtatccaccccctccttttcattcctgtagtccctgccaattcaggcttttgcagattatatttgaatattgcagtgacctcctgcctggtttctttctttcagccttgtctcctgttatatgccactagaaagtaagctccatatgtttaaagatgtctttcctttttcttttctttttcaggacaggttctcactgtcacctaggctggagtgtagtggcatgatcattgctcactgcagcctcaaactcctggactcaagtgatcttactgcctcagcctcctgagtagctgggactacaggcgcacgccaccgtgcctggctaatttttgt

SEQ ID NO: 7078 - DNA, 1137 bp, Homo sapiens
acttaagtgcacttttttatgaagaaaaagtacaatgaactgcttttcctcaagcaataattgtttccaacttgtctgggaattgtgtgtctggtaactggaaggccttccactgtggcaaatggaggcttttcactgcctgtagagacaatacagtaagcatagttaaggggtgggtcagaacatgttaagataacttactgtatatgtattcccttgtattttgttaaagctggaacatttgatatttttccatttatttatgaaaaaatatgaacctattttcatttgtacaaggtaattgttttttaaagcaagtcaccttagggtggctttaattgtataagtcaagcacatgtaataaattcaaaacctgcagttaacaggatattagacatcaatcctggtaaccaaatattaaagattctctttaaaaaagactgaacatgtttacaggtttgaattaggctaaaaggtcttgcagtggcttttcatggcccttcaaattggaatggaactactgtactttgccatttttctataaatcagtatttttttttaattttgatatacattgtgtgaaaaaagaaaatggctaataaactgtattaaatcttaaacaatgtataaagattgtacttagccagttcaaagtgtatatttattcataatgaattataacagttatatttttgtgttttcttgtaaatgtttcttttcccttaaatacagataattcatttgtattgcttattttattatgagctacaacaaaaggacttcaggaacaagtaatgtattagtatggttcaagattgttgataggaactgtctcaaaaggatggtggttattttaaatataaatagctaatgggggtggtaggcctataaaattaaatgccttgtataaaatccaaaatgaatgcaaaattgttttcacttgtattgactttatgttgtatgattccaatctctgttctgtttggcacttgtatttaattcttcacctttgtaagacatttgtatattgtggatgtgttcattcaagctatttaatatctggcactgttaatacacagtactttattgtacagactgttttactgttttaattgtagttctgtgtactttttttgg

SEQ ID NO: 7079 - DNA, 1101 bp, Homo sapiens
tgagccgacatcacgccacttacacttttagcttggatgacaaagtgagactcaaaaaaaaaaaaagaagaatattaacttggaggtagcacaatctgggattatatcctgactccactattttctcagatatattatgataaaaatattatacttatataaacttggagaagcttttttcttttttatttcagctttattaaggtacagtttacataaaagtgatgacttttatgtttaaaatgtgatgggttttgacaaaagtatacagtgttacaaccatcaccgtgatcgtaatagaacatttccatcattggaagagcctcttagcctctttgaaacccagtttctttgcatgttacatagagataaaagccagcaacctcgggtggctgtatacacaggacctaatatatacagtccctggcacatagaagacattgctagtgttcttatcatactcatcatttttttttctgttattttctagcttctgaaagttctgctgaagacagtgagcaggaagatgagagaggtgctcaagacatggataataatggcaaagaggaatctaagattgatcatttgaccaacaacagaaatgatcttatttcaaaggaggaacagaacagttcatctttgctagaagaaaacaaagttcatgcagatttggtaatatccaaaccagtgtcaaaatctccagaaagattaaggaaagatatagaagtattatccgaagatactgattatgaagaagatgaagtcacaaaaaagagaaaggatgtcaagaaggacacaacagataaatcttcaaaaccacaaataaaacgtggtaaaagaaggtattgcaatacagaagagtgtctaaaaactggatcacctggcaaaaaggaagagaaggccaagaacaaagaatcactttgcatggaaaacagtagcaacagctcttcagatgaagatgaagaagaaacaaaagcaaagatgacaccaactaagaaatacaatggtttggaggaaaaaagaaaatctctacggacaactggtttctattcaggattttcagaagtggcagaaaaaaggattaaacttttaaataactct

SEQ ID NO: 7080 - DNA, 2168 bp, Homo sapiens
aataagatcagaaaatcattagtaggttcaaagcctttattattgctattatgtataagcctagaaatggtcacttcccaacaaaaaatacatcccttgttatacttaggacaagttgtaaaccccctttgttttgacagtagaattgttccagtgaatcatttatttccggtgaaccccagacacgataagcagtgtggtctttaaattttattagttggttgtcaccatcgcactaatagacaatctccattttccacagaataaaactgtaatgactttaggtcattttccagctcgatttctctgcccggcttctaaaattagaacgaaggtggggaaggatgtgattaagacagatccgataaagcatgctacacatactcttcccccaccccgtccccaggcagtagcttacccttaaaatcaaacaaacagacccatggtctccatttagaatcaaactgttgctatctagagacagtttaatgtcataatacgaggactaagcttgactttgactttgtattttgctgggcaacttactttgggactttcataggacaacagaaggtctgacacaggaactttgagaagacgtgacagcaatcccttcaccttttgaattgtcatggagcctatcaaaagacaagaaaagtccattcgttctctcaaatgacagttacctgtaaaactagctcatgtgatgagaccacagtatcattgcaatgatagctgtatctgtcttttttttttttttttttttgagactgacttacttacttacttaagtaagtcttgctctgtcgcccaggctggagtgcaatggtgtaatctcggctcactgcaacctccgcttcccgggttcaaacaattctcctgcctcagcctcctgagtagctggtgcccatcaccacacccagctaacttttgtatttttagtagagacggggtttcaccatgttggccaggctggtcttgaactcctgacctcgtgatccgcccgccctggccccccaaagtgctgggattacaagcatgagcccagcgcctggctgtatctttcattttacccaagtcactttacccaagtaagtaattaggggaaagcctgagtcttgtaccacctgttcatttggggaactgtgggaaacggagccaacggacctaagtgccctttgacagtgagtttcataccatttcagtagtgtatttctttcttaatctgaataaaccagaatgatactctcagcacagaagaataaagggagcgagtcattaacgttttctttttaaacctttatgatgacttccttatgaattactgaacgaacactggaatgggactcaggtatcctgaggacatctctcaactctggccttagttccccctctgtaaaattagggtgccaactaaatgatctacaaggtcccttccagcgccgccattctgtaattacatcatgtgtaactgtattaaacatacacaagtgactgccaggcatgggaatgtaacttccgagtaaatgctttggtttgttcagaatacactatgaacttctttccaaagacgggttgtggtaaatagtggatattttgattataagaaatagagtttccttgaagctttagctggagatacagcaatagtgtggtgttcctacaaatatcacagtgtattcaaacatatttttctatcaaaaatcatttttgtaaaagctgtgtgtttttatccaacttgtgataataaatgttctttattttagaataaaaactggcctttttgtatgtattgaatacagttaatagaatttataattttaattaacaatttgctctttcatgtgtgaatatgtgatagtctagtcctttcaaaagattgagacggactggctttcattgtttgaaggctggtgagagaaggggttacctgctgcacaccagtggggagtgacatactcctaacacatgccagaaacaaaaagtttggtcataaaacagttctaataagaaatctgcctggcctgctcacacctgtaaccccagcactttgggaggcagagggatcagagcccaggaatttgagaccagcctgggcaacatgaggataccccatctctacaaaaaataaaaaattagccaagcatagcgatgtacgcctctagtcc

SEQ ID NO: 7081 - DNA, 1142 bp, Homo sapiens
atgttatattattaccaataatgtgacatagtttttacatttctattgcatttctacttctagagaagcagttctctagacagcatagcattacatcttgaaactcttttgaaatgaagacatctctagtgacagaagcacctctcatttgttgggtgcttgatcagcttagacattatgagccattagttaggaggtggagtgctcaaagttaggtaggttttctatgagggaatgaaagagtgaaggtggagatgagaaatgcttctgagtgtttgggtcttagtgaggcaccaaggagaagactcccagacactcaaggaggctgaagtctcctgggtaagagtgggagggccagccatggagaatggcctcaaaggggtagtagagaaggagagaaaaaaaaacatccagcacttttctagcgttgcctggagcccacaatcatgaattctctggattcaccgtttctttcagtacttggaggaagagtaccgcaaaggagccagagaagatgaccccatgcctcccgtgcagccctatcactatggctcccactattccaatagcggcactgtgcttcacttcctggtcaggatgcctcctttcactaaaatgtttttagcctatcaaggtaagaatttaataactgcctaaaaagtcatgttgggtcatcagaaacaacaacaacaacaacaacaacttaggactgacattttaagaactattaagactaatcaaactacaggaaaaagaattctatttattccttgcccaaagtgctcctcaaaaaagctgtagtaagccaaatcatcttgctaatgtctcaaattttagcttcaaattaaatgtctaagtttataaaaatgcaattcactttttaaaaattaagatataattcacaaaccataaaatttacccttttaaagtttatgcagttcactttttaaagacattctacctaatacttatttcaaatccagtaagttacctttggagcctatgtacattattgcagtttattataaaggcaagtacattattgaggtttattataactagttaataaaagacgcacaccggcaacttcactgtggtagctttgtagttaataatcttctacatcagcattttaagtgaca

SEQ ID NO: 7082 - DNA, 1797 bp, Homo sapiens
gaccttttcccaatactagccccccagtggtgaacagaacctcccaaatttgagttgcacccttccctgtggccttatgagctcagcctcgctttgaggtacccaccgtcctgtcagctccttgacctatgagccggggcctgactaggaaaagttgggagttaaggaggaaattagcattccttaatgttttgttttggtgctctgaatttcttctttattatagtcctatagttttactcctcagttcctcaccatcatcatcttgtctaagacccccattataatattcatgcgctgctttttcatcaaaacctaccctgtcctagagatctatgggcatttggtggatgataatgagcagcccctcccagatagaatgtcaatatttgagcagtaggatattggcatttgttagttaaaggcttaaatcaaaagaatgtccaatggtaggaatttcaaggtgtaggtcagatatttgagaataggggatttttttgatgtgccttaaattataccaaagattactaattattcctctttgcccaaaatacttgcatccaaggttctagtctctgttgctgtgctggtctttagccccactgcttgcactgatgtccctccttttcacggagacctatctgaggtacaggatggggctggcaccagatgatgtcccaccacagtccctcacctccggcctccacatgacagaaccaatttacactcaaccatgacctcacccctccttggtttctccctcgatctgtggccctttttggatgtattcttatctaacaacacaatccggaaagactgaattgaatatttatactaatggttcatatcctttattgctcaatgatctaattaaagggatcattgccacatttcatgtttatatttctacaatttgtttagaaaacatctcctgaccatatcagtagctcgtgttatctttttatcaactgcttcccagagtcctaaaacaatagaaattttggattgaaaagttcagcataaggagtttgagtcagtaaaggatgggataaaggagtcgagatgattcaatgaaaagtatcacaaaaaagagattgatcaacaagagaaataaaaaagcccaagaggaagtggtaggggaaggaatttaagaacagcaataagtaaaactcttaagtaactccaaaaagaaaatggtacattttgccaaagaccacttatacttgagaacatggaagaatttgcctgatactctctttggggaaaagagtctctcctcttttcctcaaaccccagtacactcagcctctctgccccaccttctcctgactttgtcctcacttgcttctgcagtacattggaacctgaattgaaagaaagtcttccttgaataattggagtttgtcttgagaggcaaatatagccccaagaatcacaagattcgaggaccatgtaggtcttttacgtagcccaaatccataaattagtctcactttttgtatttatcgtttcatattaaaccctctatatcaaatgttcatcatgattttgtatgatttttataactattttattcattttattagatttattctaaaattttttaatggtaaattcttaaactgtggaaaccactgaaggtgcttattaactgttctcccagatttgtacaagtattggatgattccttgagtttacagctgtacaaatagtgtggaaaataaactttttttaaaaaagaaaatcttcctctatcttttctgaatgaagagatttaatgttgggaggctgattcat

SEQ ID NO: 7083 - DNA, 1118 bp, Homo sapiens
cactacttttgatacatagaaaatttattttaggctaggggcggtggctcacgcctgtaatcccagcactttgggaggccaaggcgggtggatcacgaggtcaggagtttgagaccagcctggccaacatgctgaaacctcatctctactaaaaatacaaaaattggccaggcgtggtggcacacacgtgtaatcccagctactggggaggctgaggcaggagaatcacttgaaccctggaggcagaggttgcagtgaaccgagattgcaccattgcactccagctctgggcgacagagcaagactccatctcggaaaaaaaaaaagaaaattttgttttaaaattgatctattcttaggtgacaatgctattttattatagtcagtaatgtttgaagagctttaaaaaaaagcctgcagtaaaaaaaaatttttgctgcagatattgatgaatgttcagaacaaccctcagtgtgtgggagccacacaatctgcaataatcacccaggaaccttccgctgcgagtgtgtggagggctaccagttttcagatgagggaacgtgtgtgggtaagttctccaggtaacttttcgaaacagtattcacatggtgtgcattagctcttatgcaaaagttctggtcccaggtaaaatgagtctggtcaagttggaaggtgctgggaagagcaatttataaagatgaatcagacttagcctctgccctccaactatctggagagtcacaagtgtaatgagtaagcaacattattgcctacactagtaataccatcgcctcacctgttgccagcttttgcattacatttgcctcttataaacttcttttaatcattttcattatgcttttaataactataagctattagacatgtttcttccagtaattagtagccttggggttcacattgagggagcaccttataggtacttttggatcattacctatcttagattgaattctactttagttacacctaaaattccaactggggtcattctatttatggattttaattttaccaaccacgagcagcagcataatttcttagccttatagaagtaagttgcggctattaattaggttaattatgctcttgctgaa

SEQ ID NO: 7084 - DNA, 1230 bp, Homo sapiens
gagctcccagccatcagtcaactcattagcctacaaaagacactcttatcacttcagaaattccaaaggctgtaggagctcttgtttcagaatgtgaggacagagaccaaacatgtattttcaattgtatcataccatgtcatggaaagagatagtggagagcatgaatgacttcagtcctaaagccactgtcagtcctatgagccaccttagctcataaggtagagcatgtaaccagcaattaggatgagcaagttgaattttaagtcctgatagtgtccctggagcacacttctggaatggctgggactgagcttgtgctagtattgtgcccatttggacacagtctcaccagacagccctagactgcctcagccacatgacgcccagacatgacggccagtgcccttccactctccagtcctagctgcaggtgatggcttgcagaccaacacagatcctcagggctccctctgcttgggtagtggtggctgttggtgggttgctggcctgtttctaagaagcctgtccttcctcctaggagtagtaactctgggcagcagggtgtctgggtgtttgagattgggagtccagccaccaccaatggcgtggtgcctgcagacgtgatcctcggaactgaagatggggcagagtatgatgatgaggatgaagattatgacctggcgaccactcgtctgggcctggaggatgtgggcaccacgcccttctcctacaaggctctgagaaggggaggtgctgacacatacagtgtgcccagcgtcctctccccgcgccgggcagctaccgaaaggccccttggacctcccacagagagaaccaggtctttccagttggcagtggagacttttcaccagcagcaccctcaggtcatagatgtggatgaagttgaggaaacaggagttggtaagaccatttaagttgcagttggtaacgatcttggatgtgtgggcttccagacaggcgtactgctggggagatgtcagttgtgagcattacatggtggtttgtaaagataagagcttgggaaagtagaggctgaactctcacagccgtggagccttggtgttatatgcccagtggcttcagagatgctcagtgatcttttgggattaggaccatggttttggagactgttgagtgtgtcttctttcaagtttcctagtattccgttctgtctgttttaaagagaaaacgtccgttagaattgtt

SEQ ID NO: 7085 - DNA, 1151 bp, Homo sapiens
ctgccatcgcctaatcttcagtgaattgggaaggcaaataaaaagagggaagcacctgaaattgcaaccatagcagagatccaccccaggattccaagttttgcttacctcagcatgggcatggtctgcaaacaggaagggtagttgctattgggattcccttcccttttcctcagcctgctgtgctcagccatactccactacccgatgactatcatgtttcccctttcagcctgtggctctgagacggtgaggccagcaggggtgagaggagccaaaagggctgacatagtgcctgccaagcctgtcttctctctgcttgtcctctcaggacccccatcctgttcctgggaaaggggagcttcttagaaagtgaaaggttatcttatgtaatcttttgtaagattaaagacttagcattaacaactttacaacttttttccctctgggatgaaatgataaaaaatatatgcttgcctttttactccttgttagtaacagtgaaagtctttagaaaactttttaagagagctctgaaaagagtccttgttttagggacagaagtactgaagaaaagctgggagaatacatgctttctcagtgatcggggagcagagaaatcctggtcagataggataaaagattgtcgctgagaaaaaagaagaaagctgcccaatgcgctgagccagcagatgtaaagaacgtaagctggaagcaagccaacaaacaagaaggacttcttgaagtcaaaagctgtcctttgggtcactcagattctgagctccacctcttccttaaaactgttcttttccagttaccccactgcatctcctattagttgctttcccctttaaacccatattctgctagagctgtcccaccctctcacctgccagaaatgacttagagctgagggagtcctcactaccgatatggtgaagacaagaccccctttctactacatagaggaacataattataatgaaaacgacttacgtgtattgagaattaactatatattagacactgttctaagcactttacagatgttaactcagtccccacaataggcccacgacgtagttactaatattactcccattctaagatgaggaaattgaggcatagaagttacttgtccaaagacacca

SEQ ID NO: 7086 - DNA, 1200 bp, Homo sapiens
tagtgagtgaagacccaggacacacccatttactgtactttgctttatcaaagagctgcatttaactcccttcaatttctctagtggtacaatttcaaattgaagtatattattttctgaatataataccatgacatgttttaaaatgtgacgttaattctaacgggaatatatgtgtgttgtaagagctcttagaatggaatttcagcctagtggaattcttgcttactacagagcttacgtggccttagccttagcatagttctaagtcccttttactccagatcagtgggtgctttgtataagtgaaacactggctagaacatgcacatcgcttagcatgactgtgtgactcaggacccccgagtctgatttccatttagacaatctcaagctgtgacaatgggaaaatggacaaacattttttgcagctttaatgatttggggattctggctgtccccttcaggttacccgtttcctaaaactggttccagaccttttggccattgtgcagcgtaagaaaaaggaaggggaagaagaacaagcaatcaacagacagacagcattgtataccttaaagcttttatgcaagaattttggtgcagaaaatccagatccttttgtcccagtgctgaacactgctgtgaaactgattgctccagagagaaaggaggagaagaatgtcctgggaagcgcgctgctgtgcatagcagaggtgacctccaccctggaggcgctggccatcccccagcttcccaggtatgcggccggagacttggaacaggagctgttaccgcctggcacacattgaaaaataacactttggtgactttttttttttttcctctgagtagacgttgcataaaattggaatttgttaaagaattgatcttgcagggtgtggtggctcacggctgtgatcccaccactttgggaggccaaggcagggagatcgtttgagcccaggagtttgaggctgcagtgagctatgactgcaccactgcactgtagcctgggcaacagagtgagaccctgtctcttaaagaaataataataaaaataattaatcttcaaacagaaagatgcagccttcccgtttatcttcagatgcactactttgcagtgttaatcgtcctccattcttccttccttttgtctagtatagtcaaaaagcagtgggtgaaggttcttggcagagg

SEQ ID NO: 7087 - DNA, 1099 bp, Homo sapiens
gaagcgtttgttttctggatgttactgttttttttttttccccttgttttctcttctgtcccgtcctcttccttagcagtttctagcatgttgatgtatatttttaagggaaagagaacataacagtcaggtgcttggtgcttgaaatgtttatgagtagaggtatctggatttcacagatgaagaaacaaaattagagaggtcaactaatatgtcaaagagaagaacagctaaaagggggatggaggcagtgactggggtgacggagaagtcctctcagaggactggcctagttattgtaggggatatccaaaaaaaaaaaaaaaaaagtgttccctgccacgaagtactttctgttctagtagatgagataggatttactctaaaagttgaaaactagaaatcagtgtttgggactgtattataaattatatgtacttaaagaattcagaaacttcttaggggtaagtaaaactgtaaaagaggggtgggatgaatttgcttacgaagaattgttaaataaactggccttttttgaaatttaggatgtactggcctggaagagttgcttggaattgatccttcctttgagcagtttgaagcaccgttgttcagtcagctagcaaaaaccttggagcgaagtgttcagaccaaagcagtaaacaaacagttggatgaaaacatttcattattccttattcacttgtcgccttacttcctgcttaagccagcacagaagtgtctggagtggttgattcacaggtagctaatagaattacagaaataactatgggttaatcactttggtcttgtaaaaaattaagtagttgagaacttatcaaattaaagctgaaaaattaggtatattaagagattgatacaatgtccattgtgtgagataagcatgctcttctgcctttaaattcttttttgttgatagtgaaaagtagaactactggtgattttgagtaaatggtctaacctcattagtttttttttgagatagagtcttgctgggcactcaggctggagtgcaatattgaaatcttggctcactgcaacctctgcctcccaggttcaagtgattctcccacctcag

SEQ ID NO: 7088 - DNA, 1206 bp, Homo sapiens
acaggcataattaggctttggaagtcactgaaatatttctttccggttatctgccttctgggctttggtgggagcattttgggagttgctaggcaagtgaaatgagatcaacagcatgaggaaaacacgctgttttgcttctgaggtggtaggtaggccaagacgcagtggttggcttttttctctctccttaggttcgcccacagtggacagtttctttaattctaccttctggtcctcagggtgggccatggaagaccagttaacagctgacctcaggtgttctaaaagtacaggtcagacacccctagtacctcaggttcaggccgcagaactaggctcgtatttatatatcagcagttaatggatgcttattaagtctttactatctattgttctggtgccaatgtgaaaccgactgggtagaaaaggaagagctttttagaataaacattctcatgaataagagcatttgctttcttgcaaagcttacatactggccttcttggacatgttttcacagtagttgtagaaaagctaagagtgtctaactaatttttctttgttttttaacaggagaggagatacttacccttaagtcaagccagaaaaagtggtttccaaatggattggctgtctgaacctcacccaggtctgtttggctatggactagagaaagactgggtgtggtaactgacagtgtgctgaggaaatacatgcatttacttggctgcaaaatcaaaccagcagctaacgactctcaactgtgtctaatgctgatgagtgactgatgactggaaagaaagggaataggtaccatttatggagcaggtgttgtgtgccagataccatcctgagatggactcatagcagctctctgagtccttcagacaactccataatggacatgggaattatctgcattttaatttgaagaaactgagttttgggtggaaacttgaaaggttactaggaatctctctctggtctgtcttctaaagccatgctctttcctctgtgctgtgcttgcgtgggtccccgtctccttgaaggaagttctgtggaaacctgcctgggtggtactgtcacctgaggtggcctgggtctttcgcaggcccaggggcagatgtgaaatgtctaaaatgggaaacgcctttgcattcacacatctttaaaacactgcagcaaagcaggatcctctatttc

SEQ ID NO: 7089 - DNA, 1187 bp, Homo sapiens
tcttagagcctttatctctaccttatctctgttgtctctctttgcttgttgtgatgtgacattttcctcagtaccccaaaaaattaaaaacaaatttttatttcagagcccctcgttgtaatgctggtgtcatctatagattcttcatcttcctctgcatggaatgagggtagtagcctttgccctggggagagcctctcccttttcctgcagtgaacagtggaggaactagcagctgtatggtcccagctgctctttctggcccgtggagctttggattgacctttagggaaatcgttaattttaaggtctaaaatctttaggtcattaagtatggtccttcagagctcaggttgaggccaaaattgagctgcagagcagcagctgatgaaagtacaaaccaatcaagaatccagcctgtttcctcttgtcaaatttcccctggctgtggtccagatgagggagggtgtcctcatggttctaattcagggggtggaggctgcactgatgctgtgagcccctgcgtctgcctaagcatgcctgctgctttgggtcccaaggcctttgcagaagagctccatgaaagagttcgccgagaactgtgggcctactgtggcagtgagcagctggacgtcgcagacctgcgcaggctgcggtacaagggcatccgcccggctcctggctaccccagccagcccgaccacaccgagaagctcaccatgtggagactcgcagacatcgagcagtctacaggtaggagccaggaggctgcgggttcctgtcttccttcttcagtagatactcttatcagcatactggcacttagggttaaacatgtttttaaaatggaagggcttctaatcacattgtcccttatgctgtcctttttcactcgtagctattctgcattttacttcagtattactgattagtattcttacatcattatttttagatgtatcaatttaaattatttcctcttggcctacgccagatgggagtttagcttatgtataccatcctgtgcctctcctgccccagtttcctgtcacaggcatggtgatgtctttaatccctcccttagagaccgacctttgtccctcagtaatgtcactttgcttcatgctcttgtctcattgcttgtggatggtgtccctgggtgctggtcttgcagagcgcccagcctt

SEQ ID NO: 7090 - DNA, 1389 bp, Homo sapiens
gagaatgcatacacaaaggtctgcctttatctcaccagttgtgtgaattatgtgtctgagcctgagaactcagtcctactgcgttgtgccctgggtgtgttctgaaagtttagccgctttcctaaagctctgagattggcactgatgcgcaatgacatggagctggtagaagacatcttcacatcctgcgaggatgtggtagtacagaaacagatggcattcatgctaggctggcatggggtgttcctggagctgagtgaagatgtcaaggagtatgagcacctgacagagatcatgtccaatgtacagctcaacagcaacttcttggccttagctcgggagctggacatcatggagcccaaggtgcctgatgacatctacaaaacccacctagagaacaacaggtttgggggcagtggctctcaggtggactctgcccgcatgaacctggcctcctcttttgtgagtggctttgtgaatgcagcttttgtttaagacaagctgctaacgatgatggcaacaaatggctttacaagaacaaggaccacggaatgttgagtgcagctgcatctgttgggatgctgctgctgtgggatgtggatggtggcctcattcagattgagaagtaacctgtactcctttgaggactacattaagtcaggaattcttcttgcctgtggcatagtgaactctggggtctggaatgagtgtgtccctgctctgggactgctttcagactatgttctccacaacagcaacaccatgagacttggttccatctttgggctaggcttggcctacgctggctcaaatcatgaagatgtcctaacactgctgctgcctgtgatgggagattcaaagtccagcatggaggtggcaggtgtgacagctctagcctgtggaatgatagcagtggggtcctgcaatggagatgtaacttccactatccttcagaccatcagggagaagtactgagctcaaggactcttatgctcgttggcttcctcttggactgggtctcaatcacctggggaagggtgaggccatcgaggcaatcctggctgcactggaggttgcatcagagccattccgcagttttgccaacacactggtagatgtgtgtgcataggcaggctctgggaatgtgctgaaggtgcagcagctgctccacgtttgcagcgaacactttgactccaaagagaaggaggaagacaaaggcaagaaggaaaagaaggacaaggacaaaaaggaaacccctgctgacatgggagcacatcagggagtggctgttctggggattgcccttattgctgtgggggagattggtgcagagacggcactatgaacctttggccacttgctgagatatggggagcctgcactccggag

SEQ ID NO: 7091 - DNA, 1196 bp, Homo sapiens
catgagccaccacgcccggccaatgcccttctttctactcaaaacgttttttttttcttgaagggttcctggttgattgtgagttttaggaaaggaagacaccacttatatgtcagagtgccccatatgttggccagttgttatcagccatcttttttttttttttttttttttgagacagtgtctcactctgtttcccaggcgggagtgcagtgcagtggcctgtgatcatagattgctgcaacctcaaactccagggctcaagctgtccttccgcctcagcctcccaagtagctgggactacaggcgtgtgccaccgtgctcagctaatttttttaatttttaggagagatgcagtcttgctatgttgctcaggctggtcttgaactcctgatctcaagtgatcctcccacctcagcctcccaaagtgctgggattacaggtgtgaaccaccatgtctggccatcagccgtctttataaattgtggagaactgtcagttatcactttctgaaataccctaggtaaaatattaaagttctagtaaacatgatataagcggtatggcacatgctcataatgcatttgtcttgcccatatggatatcaaaaatattttatatattattattgaacactcattcagtgatcacttttaaaaagcagtgactacctttaaaattcgggattacctttaaaatgttttcagggaacatcctaaaaaccagtgttcctaggctggaaagaaggctatcttagaaataaactggtttatcactcagagctttcttccctgttctcagtggtctatttgtcctcaatggtatcatttgaaaatgagacagatgtggacttaagattctgtggtaagtcacgtgtgttaaccactttgaaatctcagggtgcaagccaggggacacatagaaatattaataccatctttctgtcaaggagtccttctggaagtatgacaacaaacagatataattttgcttaattttttgctatttgcatttttccttatttcataactaactgtgtctgtccttgtcgcccttcaggaagttgttgacatgaagtctgagggacaggccactgtaattcagcagctggaacagactattgaggatctgagaaccaaaatagctgaactagagaggcagtatcctgccctggacacagaggtggccagtggtca

SEQ ID NO: 7092 - DNA, 4562 bp, Homo sapiens
gactgaacaactgttgggatatatatatatatatataattttttttttttaaattcctggtggatactgtagaagaagcccatatcacatgtggatgtcgagacttcacgggcaatcatgagcaagtgaacactgttctaccaagaactgaaggcatatgcacagtcaaggtcacttaaagggtcttatgaaacaatttgagccagagagcatctttcccctgtgcttggaaaccttttttccttcttgacatttatcacctctgatggctgaagaatgtagacaggtataatgatactgcttttcaccaaaatttctacaccaaggtaaacaggtgtttgccttatttaattttttactttcagttctacgtgaattagctttttctcagatgttgaaactttgaatgtccttttatgattttgtttatattgcagtagtatttattttttagtgatgagaattgtatgtcatgttagcaaacgcagctccaacttatataaaatagacttactgcagttacttttgacccatgtgcaaggattgtacacgctgatgagaatcatgcactttttctcctctgttaaaaaaaatgataaggctctgaaatggaatatattggttagaatttggctttgggagaagagatgctgccatttaaccccttggtactgaaaatgagaaaatccccaactatgcatgccaaggggttaatgaaacaaatagctgttgacgtttgctcatttaagaatttgaaacgttatgatgacctggcaacaaaaagtaatgaagaaaattgagacctgagtgaagataagaaatgatctttacgtggcaaaatgaacacatcttgagtatttaggaaatgggcagtgaaggctaagaacctggtgtgtttcttgggatcatggtacatttatcactgaattaagccatcagggaaaaaacaacaaaaaaagagaacacctccagcttttctttttctgtatatactcatgtcccccagattccaacatttctcactgaaagggggcatgtatgcaaacctcatctttctccttcattaatgatgatcttcagattaaaccctttggtgctaggagctgacaatttccaaagcagcctgtgaagtcctaggggctgggggccactcttgcggcaagcagaaggccatcctactccgcggagtgatcatggaaatgtattttagttaaactctgacagctcccaaacggaagactacagcatgacgtagtattatgattgcattgtatgaaagagcaagtgactttctaagtaggatgaatcatattcatatgcagatgtcttagcctcttgacgctggaagtgtggatttatagctatgaaaccactgctggcagtgggtgggccactgggactgacgggggttaaagggcattttactaaggcagctaagacatattcagacatcaacgttatccttctttttcatatttctacctgagtgaagttcatccttagtattgagtaggaagttacagtaaatggtagttcattcttacttacacacatagctaatcttttttttttcacttggaattatgttgaatgtttcattttgacaaaaaagtagactagaaggtatgttctttaagttgtcttgcatccattatataagaaagaaacaggtgagaggaagagcagaaagctgagactggctgatgttcagagcacttactcctctagagggaaagcatgacaccgaacactaagcacacagctttttgttgttttggttttttctcccgcaaatcttaaagtgattcccatgaccttggccaaggacacttcttaaagattaatgactggcactgacattgccccaggcgggccactcctcacactggctctcagttcccagccatgcctggggctcagtcacttctattccaccctctgagactccattggtgtcacacaaggtgtcttcttggctttgattttgagaatcccctattttcacttccagatctgtcagctgccatggaggaataatagaaaaccagaaatgcgtgtagagggagatttctaaaacttcccttgtgtcgcccatagttgtagttttgggttctggcaggtggaacaccctgaaacctggaatcattctatgagaatacagttcagactttgcagactccagcccatactaactgtcatgaagcttgacttcttgtcataatgcagccatcttggaggaaattggccatttctgcttagatggttggcagggtcgcgctcagctttgctttctacactaattacatagcattattcaagtattgttttccatttcccatccctgatttccagcttcttaaagctgactgttcttgcaggggccacttgcttctcctagagtacaaaagtaagggccttccttactaactgcagggtctctctattacacctcaacatacacactttgctgctactgtttgtactgtctacagtagaatttccttatcttgctcctggtagtgcattacaggcaagcatgaaatgtaaagtatttatttaaataaaaagaaaacctctaaattggtaattgaattacctccctgtagctttatagtttgtgacatttcttgaccttgctagttctttcattagatctgcgcaagatctagtcatctggttaaggattttaagcagatgcaactataaacccaagaaactgtattactattactgttggtcatactaaacctgtctatttcctgaagtatatgacccacaaggatgtggaataactaggagaaactgtttttgtacactgtacatccttagtatttttacacgtatatgatagggatgaacatgattttccttcgtacagacagcttaaataaagcactatgtcaatctgctacttctctgtttattgttgttggatgtggttctataatccccccaaattaaatcttctttaatgaaaacatgatttttaatagccccagctggtattaacctaccttgtataaaatgtgacaggaaaatatagaaataattccttgtagctcacacacacacacataggggatcatttttacttcagtgaaatggcagtagtgcggttgtgcaaactttgatgaacggctgcttctgaggggaaacgctgacctctcagcactggatttaggatggatgtactgtgaagccagggatgaaggaggtctcagaccctggggacattcagacccgaatcatctatacaacacacggtttggacccagaatctgaaggaatgtagcttttcattaacgtcttcctgataatgtactgctctgcatatttcctttcttagagtgtatttctaacaacatgtcatggcaaattaacaaacttagacgtgggtgatgtagatgggtaggatggctggactgcagtctgacttcacgttgaatcattctggatggggcctttttctgattttacctcataaagctactattgtagaaacttggctttgctcctgtgacgaagccagacagaggaatggcttttgggaccagagtgagtcaagcatgtatgtgtatgtcacacggccaaatttgagggcattctcacatgtgctcttctctcaaaaccactggggttgacagatccaggaggctaaaaaaaagtgacctctataattctttaaaggtgctatttttagaatattgtataatttattcacagtatatctaaaacagaattaaggacaattaaaatatcttatgtgacagcctttatgtctagcacatttgatgaaataaaaaacttctgaatctgaatagaagttctactgtttcaggcttgaaccttttacatgctcaagagattcaaatggtctctgtgtgtagatcatgccaccgcctccaaagcctaatccacatcacttctgagaggcaaggctgagcatatggtgacatcagctctgtgttgagatggtgatgaggatgatggctcgctggccaggcagggcagccgaaggtcagggacctgtcctaactaactgcagccttgcctttagtgtttgtcattctcagatacaacacggtatgtccagtgtccgtttttattactttaaagcatttgagggcttaattgtgtatagtagaaatactattttagacaaataattatctgtgtacagatatttgatatactctaagtaaattttctaatttcactaagtacgtttttaggctcctctcaaatactgcgtattgaagaaaaaaatctgacaccaccgagccaaagatgcttttttgtctgttttcgttgtttaacagaatggaaagagtaatgcatagtgcttcctggtgtctcctgattgattgattgtgcacaaagtaggacgataaataaataaaatggagtctgatgggacattgattaaaggtgaaggatgattgatatatagatcatgaaaagaaaaatgaatggcaggaaaaaaagtttggtccttaatatactttggcctagttaaaatatgtgcctttttggtgtgttttgttcatcactacaagataaaa

SEQ ID NO: 7093 - DNA, 1370 bp, Homo sapiens
tccttagaaaaataacaccatttggaaaaaaaaactggtgttatgaagaacgtaaatgcactgtttttatttttattttatataatttaaattgactttcccactgtctttaagttgaaactgttaagctgaataaaaacttaagctgcaaattgataacttcgctacataacaaggaaaatataaatgtttacaaacagcttaaagatttgcatgtgcagtgtgcatttataacaaacttctaattgcacaaaacccatgccagctcagagtttaggtgtacacatttacccagttgagcgttcttagaataactactgcacaagttgacaataggtcgttctctctttttttttgtttgctccctttttctttttctccccttcctccttaccctccctcccttactctccccccccaccaccaccctccacccccaactcatgaaaagattctatggactgaaaaagccccaggctgaaaggactggactgccttgattgacatggggaagggggttagtagactatgtggattgcggcagcagaggctgcagcctaacgtgtggttttaatgaccagcacgcaaggcaaaagcattttgcacagtgtttgttttcctgtcttgcacttacaaataaggtctatgggagtagcatggaaaacgtttgctgtttttcccttttttttttaattgcttttgtttaaaatttgatcgccttaactactgtaaacatagcctatttttgtgcttaagatactgaatggaaaactccattgtgtgttgctggactgttttggaaatatttggttaaatgtgtgttaatttggctgtaatggcatttaaagcaaacaaacaaacaaaaaaagctgtgaaaatggccttggagcattatctttagttacttgaagagtttctagtttttttaaaatacagtttatgttaaaataatttttattaatttagagaagacaatcaatgtctgtgagaaaacggactttcttttggattttctttttgtggtcattgtgagtgattgctttttccttttcttagtttcacattcttcctttgttctaaaacttagactgacatctagctttgacaatcatagtatgttttattttcctgagggggaataacttataatgctgtttagttttgtactattggtgtgttggtgaatttttaaactgtgtgctaactgcaataaattatatgaactgagaatttcttgtgtgtattttttattgtgattatgtagtgtatagattctaaatatgtatcatacctggcatctttaatatcaattctattcggagtttatgaaattattagaatgccttaaatcactcgagtggaaaatgtgt

SEQ ID NO: 7094 - DNA, 1445 bp, Homo sapiens
ggaaagtgaaaatattgcacagttaaaaagggaacagtaaggcatactgtcctgtgctgggtcttatttgtacatcctgtttagaaatcggcacagtctgctaacagaatagagaacagcaaaaaggcacatagggaaaagttatggtgatactgagaaaagtaggggactacctgttttaatcccaacgagtgaacattagagatgaattgattcaattccttttctctttgtattctcctagttaagtggattggtgttggtaaatccagagaatctatgattcaactcttttaatgattgccagtaatgcaagaaacactccttgagagggaggggaaaagactttcttaaatatttcatttatgacctgcaaattcaagaataaagacactgaagtaagtttgaagccctacagttgtttccagtcttttcagatggatgcctactgtggagattaactttggcatattccagtgtcagctttctttagctggaattgccaaatcatttgttgctcctgctgctctcatggtgccacgttttttttttcaatgtttagtaatagtataatccatgttgtttgatatcaaaagtagaattacttttaatgtagtttttcttcattattgtcattgcgtgttcttaagttttacccctattagatggtaagaacaattaatgcagttttgcacaaatatttttacattctgatcattcagttctgtcattgtaatctttgttgttagaaacaaatgatgaaaacataggggttctgtaaacttttgtaatgctatgaattctgtttaaattttgggctgtctattttctgctgaaaccatgcaaaattgagctttggtggggctgggagggggttatgtattcatgggacctttaatttgtacagaacacagaacttatttctgtcagttatttaatacattgaaaatttagtgaaatgttcaaagagaatagatgtttcccaaaacaacaatctttatgttaaaaatagtcattaaaagatctgttgtaatatatggtggatatttttctttaatttcaaacattacctctgaaatgtgtatcttttcttttttatcttaccattaattttaaatctagtggattggttttcaacatcgtgcctgccgatatgcctacagaatcatctgtaagtgtcaaaatgaacccacgttgttagccataattttgattatgcctttatttctcctttcttgaaaaaaaaaaggtgttattttgacaattaggcataacattgttttgtagattatcttttaatgaactattttaaatgttaaattaggtgccacttaaatttattttattacaccatgaatagctgattaaaagaaccaaatatttctagtatgctttgcgtattgtgtttttgttctactaagagaggttagtaatagtatatagga

SEQ ID NO: 7095 - DNA, 1135 bp, Homo sapiens
gattcagcagtagaaaaaaccaaaagcatcccttaatggagcatatcatgtattagtgaaaacaaatcatatcaatagaaatatgtaatcgatgtagcatggcatatagtgctcagttctgaggagaaatagtaactcagagaaaggagctaggcaatggcaggcagtttggaggaggaggtaggggcctacaattgtatataatgtggccagggaggtttcactgaaaagtgacagttgagtaaagacctcagggagatgtgagaaagcaagcaaagtggctattacatgtaccaagtctcacaccaagcatagtataacattaatcatattaataaaacttaactataatagtaaattaaaaatttaaaaatgctgttaataaacttagctaaaggtgcacagttatgatggttttttttgtttgcagtatctaggctgtagaaagtgaaacagatattccaaggctgttctttcaaaacagtaatagtggaggcattaatgctccatgccatggtgaagtcttatgaaagtaattattctgattacagtaattgcttcctggggcctagaaaaaccaaggaaagcattagttctatgacaaggtactaaattaatttctgaaaaatatggttcacctgctttccatcaaccatttatttgtgtgttgtcagttgcttttttactttctttgagcatagaaaacaaaacatttacattcaaatgtctttttattcaaaagaaatgagaatggcgtactctaagatctcagtcttgtcatgactgatttgcaaaatcagggtttaaaacagcccttcagaactattctggcctctcaagtaactgagaaagactattgcttgggcaataaaatgggaacatgatgataaactaacccttatagctcagaattattgtttacataaagagtatttattctttttcattgctatatagtatccccttatatgaccatttcacacttttaaaaatccattcattctaccattgatgaaaatttgagttgtttccaatattgggatattacaaatactattaccctgagcattcttgtagatagatatcttttggtgtgcagtatactgatatggctttaaagatgttacttttatct

SEQ ID NO: 7096 - DNA, 3357 bp, Homo sapiens
aaggagtggctcacgcccgcagccctgcagtctagtgtcagccaagaactccaggatgaactggaggaagcagaggatgctgccgcatccgcttccgtggcaagcactgcagcaggctccagacccgggcgccacactaaactataaatgtctccaaagtcacacattcagaactgtctctggcagtcgaatatcactagagaaaagtaaacagagaagcatcctttagatattttgtatgcaaagatggctctcccccaaatcccagtttttcagctcaggattatatttgtaatcaaaaaaaaaaaatcacttggcgcaggagggagaactttgtaagaagctgccctctgttttttttatccactcgtaaatctggatttatttcttctgttttatacaagctctgttaagttatgtttacagtatcttgtatcgctgtttacaaatcttgcatggactcctgccacagtgaaagaagaaaatcttcatgtcttcaaaaattaggcaggtaatctttgtatacttctgacaattgccagatctatggcataaataggcacacaaaaaggtacttaaacagttatagtcaccatcacctgcttcagaatggtcttttagatttgtgtttgttttgttaaagttgttggcaccaggatgcagagaatcagactggcctgaggtgaaggagcacacagccctgagggcttggaaccctgggtccagttcctcttcacacccccttccactctgagtagcacatctccccaggtgcccatggaacacctgctttcatcccaaatatccgtccacctaggcggggtggtatgttcttacgtctctctgactttgatgccactcattctatagtttagctggttttcgttcaagatattcttggtagtaactgacaagtatgttgcacatgtattgggggaggcgcttcatttttattttaatacacatgtatttcctccttgcacaggattttgatggtgtgggaatatcctaagtggtagccttccaagtagcagtgagttgacattcagctgcttttaactattcaggctaccttttatactaaaccttgaaaactagaatctaatgtctaccccaaaaaagtagttctttgatattttatactttttatgtaccatgtcagaaagagtatgttggcgtttgtcatgggactcatttcacataatagaatgcctagtctcattgaccaatcgttaaaaaatcatatttgtgtgtcttaagattcatatttatatgttctctcaaatgtatgtctcttacgtaacatactctaagaatgaaactgtcaccacaggtaaatccttgttagcaaggaatctgtctgctccagtctactcctagtttgatccttggatgtaagaaccaagtcattacatgtcaaattcaatttttctgccttaagaatgaatgtccttcataaaatattggatgcagtgtaacactatccaaggcagtgacttcagctttatatacatataaaatatagttagttttaaaattattgacatttatttaaacttttagattggattgtttgctattgctctgtgtgaggatacataatctttcagtaaactgtatttttaacttttccataagctgattttggttcattttatcaacgtaagcacaccctgttcatagggaaaataaaccttgggttataagcattagcctgaggacaatgaagccacttaacctaatttatgctttcgactgttctgtttccagagaggaaagcctttacaaattactctcagttctttaggggcagaaggcttgtttcaagaggtttgacagaagaaaggaatatatgaacttaatgagatgtcgacttggttcaggtctaaaaatgagggcaaaacactaaggctctagcagtgacttgttcactaaaaagagagagtcctgtccccagacggttagtacaaagccttggatacagtttgcttgtaatatttttaataatgtgaggagtacagtgttttctaattcattcaagtatatatgatttaaacctgggctactgacacacacacagtagccattagttagactcttcttagtgaatatcaggaacatcccatctgtgcttaaccagaatccagcaagtcagcacacaagtgattttattgttattttgttgtatttacttgcatttgttgtatttactttcatctgcagcatttggagtttaaaaataatgtaaagggttctagtagaaatagtgtcctaaggccaattacctaccatactaacaatcagcagataaaattctggacgtgagattccttataatctaattatacctgaggttgagcaagaaatgtcttcctttagaaaatctcattcaagtcaggttcttctctacagttcaaaattgagaatggatttaattaactagcatttagccagctttttcttgcccttggagaaaaagaatcattctcaacctgataatctgttaagaaaaatcccatatgaacaatctggtcattaacatacatatgatacggagtctctttgttgtcaccaagtgaacatacttctcatggtgggttggacagtaatacatgttagagggtcagaagcttctggtttctgctgtttgctttaaatacccttggggtttttttttaaacccttacaaggggagcatcagctttggaaagtgtgactctgtaggagtgtagaaggcagtggtgtatgatcttagcctcgtcctgatgcctgaatccagccagctgttgctctgacccacagcaatagagcaagttacccatcaccagcatttgtacagagcagggaattctggttttagtccattggtagcattgtgtgtatgaggagattcaacaccacagacagctgcaggactcgatatccatggcttctttccatcacaaaacgggtagaaacacattcactgcttcagggttctaatctgtgtgtctccttatgactccatttctgtaagctactctgtaactttgatatatgctgtattttctttctttaaaagatttagatgttttttcagcaagctagccatacaaccattgtatctctttctcttcagtatggtttagagcccagatcagttagtaggctttcgttgtcttctctttcaatacatgtacatctttactgtttgaaaagtgttacagctgtcaaagaatcttcatggacctgaagataatttcttgtgaagttgaatgcaagtgtactgtcattcatagtgtttatatcaaaataccaggaatcttcacttttgctaccttgatatagcattgggctatcatgttacaacattgaaat

SEQ ID NO: 7097 - DNA, 1986 bp, Homo sapiens
gtgtaagtaatttcttatgtgctttatgtacattaattgtattttgagttcctaagatttatcagtcttgaaaaagatcttgttcagggattgaagtgtttataagtgttaatagggtaaagtgtgaatcgtcttgcagtagtagccataatctaccttttgaaggcaaaataggttgaagattgctataagttaaatttttttaataaagtaatattatttaatatatacagttcttttactgctagctttaattgtgtaaactaacaaagtcatgatgtttcgttttgtaatgtgtattgataattatgggatattaaaactaaatctggtttggtagaaatcagaggtatgacaggtataaatttgtttccagcaaattactctgaattagattcattgtcatttcctaaaaacagtttgagtggcttattgatgttttttctttaaaaacaaaattttctcttacagcaattctggggtcagaagccatggagtcagcattatcaccaaggatattattgaatacccaaataaaacgaactgatacatatttctccaaaaccttcacaagaagtcgactgttttctttagtaggctaactttttaaacattccacaagaggaagtgcctgcgggttccttttttagaagctttgtgggttgattttttttcttttcttttttgtacatttttaattgcagtttaaaagtgaatcgtaagagaacctcagcattgtgcacgataagagaatgtgtcagtatttcagggttctacattttatctgtaaaatgtgacttttttttttttttatcacaacagaagtaaaatgttgctttgtacctggtgtcttttattaagaatttactccccccatttctcacagagaataacagtcgggagtcattgtcacaatataatagaaatgttagcaaccagattcatgtaaggactaagtggtcctcatgaattgcattaagactctgtactgctcatattacactccatcctctctgtagtttgctgggtagtggagggggtaagctaaatcatagtttctgacaataactgggaaggttttttcttaaaataacaatggaattggtataattgggattgaaaactaaaacttggaactaagatagagaagatggagtgtatgtagaagggctgttaaaaatgtaaaacttggttgcattatttgtggaggctcaaacttgtgaaggttaataccataatttttccatttgttctgcattttgattctgaaaagaaagctggctttgcccatttcttattaaaaaaacttgttgtaaatccagttgtctaatgggatctatatgaagttagccatgtctgtatgcccttctcccacaaaatactgtataactagtgtgcttgtagtagttaactccaccatctttgtaagctaatgaaattgtgagtcacccatttatatcttaatttttaatcatgtcagttcttgaatgggtatctccttagcctgctgatttctttttctttctaaagaaagtgggtggagaaattaatttagacgtttgtttgcaataaaaagaattcattttactcttgttttgggattctcgccatcaaggttcaaaatccctttatataactcccaagaggagaaatttattaagtgtgtgctttctggacagcttattctttactctgcatagaacatttaggttttaaaaacttaaatgtatactgacaattgatacataattatgaagtaaagttgaattcttcccttcccctcccccccagacaacttttaacatatttaatgaggggaaaaggtactggctgggagaagttaacactgagtttatcatctttacagaatgctaatgctgtcctcaactgattattttatatacatatatatgatacatgaaactctgggatcagatgcttttagaagccatcatgcaagccagtcattgatgtcactgctacaca

SEQ ID NO: 7098 - DNA, 3357 bp, Homo sapiens
ataaatggcaaagttagtagctatatctaggaactttaaagaagctttactgaggtcagttttcaatatgagcaacaaaatacaccagtccctggattagtgtaaagacttcattcagcagttgaattgggaaaacacaggacatttttgaggaactcactaattcattttgactgaaaacagtgaacatgaaattgacctagaaaattcagtctagcttctaggtcagtattgtttctggttctggagatacgtgcttcatggtttacaaccatcagatttcttaactgtgtagcccttaaaggccacctaatagttctttaacctgtagcttccacaggataagctttgctcctaattttaattcttagttttttagaaagtttaaggaagcagattttaactgttgaatttttttctgtgtaacagaactttgaaagtgatgaagtagaactctcgtatgctaagaatggacaagatcttggcgttgccttcaaaatcagtaaggaagttcttgctggacggccactgttcccgcatgttctctgccacaactgtgcagttgaatttaattttggtcagaaggaaaagccatattttccaatacctgaagagtatactttcatccagaacgtccccttagaggatcgagttagaggaccaaaggggcctgaagagaagaaagattgtgaagtaagggatttttttttttttaactgtggcatttgaatattgcttgcctggcacaaaatgacatttagaagaactagatgattagtctgtttcatttactttgtgctgtgcatattgctcttaagtaattgtttcccccttatgttgactgttaatctttccataaacaaatttttgtccgttagtgtaagggctatgaaaacttagatatttaaattggccttaacaatatttaaagaattattaggtggtgtctactgacagtgaaatgacatttcttttcttttcactaggttgtgatgatgattggcttgccaggagctggaaaaactacctgggttactaaacatgcagcagaaaatccagggaaatataacattcttggcacaaatactattatggataagatgatggtaagtaaaatgtttagggcctgatctcagtgtttaaaatagactgggagaggctgggcatggtggttcacgcctgtaatctcagcattttgagaggctgaggtggatggatcacctgaggtcaggagtttgagacccacctggccaacatggcgaagccccgttcctactaaaaatttaaaaattagctgggtgtggtagtgggttcctgtaatcccagctgctcgggaggttgaggcagggacaattacttgaacctgggaggcagaggttgcagtgagttgagatcgtgccattgtactccagtctgggcgacagagcaacactccgtctcagaaaaaaaaaaaaaagaaaagaaaaattatagaccgggaggtattctaggtaaactttttgtctttgtctctatccattttgttagtatcttaaagagatgggaggaaaggcaagattaagttggttctttcaactctgagggtaaactgccttccactggctaggcttctgtttttttccgtagtgtttttgagctcttaacatctagcagctaaaaagaattgagtaagtgtaaggtcttgttacatagtttaagtgaccctgtttttgtagcaataatggacaaaggtaatatttaaattataaaatgttgcctgctttacatatagatatgagttgaattttaaaaagcataacttattaaaattcacaagttcaaggggaaattttaacttttgaatataggtggcaggttttaagaagcaaatggcagatactggaaaactgaacacactgttgcagagagccccccagtgtcttgggaaatttattgagattgctgcccgaaagaagcgaaattttattctggatcaggtacgctgtagctttgaaattgaaaaatattaactgataatttagatagattggtgtagaattaatgtttagggttgtaaacataaatttctttttttaaagacaaatgtgtctgctgctgcccagaggagaaaaatgtgcctgtttgcaggcttccagcgaaaagctgttgtagtttgcccaaaagatgaagactataagcaaagaacacagaagaaagcagaagtagaggggaaagacctaccagaacatgcggtcctcaaaatgaaaggcatggaattttaattctgttactgtgtgaaatcttctttttaaaagaatgtttttcctacatattctgcttgtgtaactatgttaaatctattaggacttaggcctcctgaaagttaacattttttccagcaatactgcttcaggaattaaaattgcagttgttacatatgcatatatgtttggtctgtttttatttttaggaaaatatgttactaaacctcaagaattgtcagctttaggattgtgaggattcgtggtgggtttctaaattaataatatgactttgtttcctgcaggaaactttaccctcccagaggtagctgagtgctttgatgaaataacctatgttgaacttcagaaggaagaagcccaaaaactcttggagcaatataaggaagaaagcaaaaaggctcttccaccagaaaagaaacagaacactggctcaaagaaaagcaataaaaataagagtggcaagaaccagtttaacagaggtggtggccatagaggacgtggaggattcaatatgcgtggtggaaatttcagaggaggaggcaagttaattttgagtgttctgtatttagttcaggatcgaaacaagtgataattttatagtttggatgtagctgaagtttcttcctcattaatggtatactgtcacagtaactaaagtattcatgtgatttgatattaaatacacctaggttatgttaatggttagaattaaacatttcttttgtctttaaacaattatttttggagaaaaaggaacaatctagaggaatcctaagtcttctgtataagtagggtacaatatacaatgaaactaaaacagctcttgtcttttagcccctgggaatcgtggcggatataataggaggggcaacatgccacagagaggtggtggcggtggaggaagtggtggaatcggctatccataccctcgtgcccctgtttttcctggccgtggtagttactcaaacagagggaactacaacagaggtggaatgcccaacagagggaactacaaccaggtaatgattcaagatccctggaagcatgattgataactgtagcttagtctggaaaggtgtgagctttatgttggggt

SEQ ID NO: 7099 - DNA, 1465 bp, Homo sapiens
gaagaggaagaggaggaggaaggaatctccgctctggacggcgaccagatggagctaggagaggagaacggggccgcgggggcggccgactcgggcccgatggaggaggaggaggccgcctcggaagacgagaacggcgacgatcagggtttccaggaaggggaagatgagctcggggacgaagaggaaggcgcgggcgacgagaacgggcacggggagcagcagcctcaaccgccggcgacgcagcagcaacagccccaacagcagcgcggggccgccaaggaggccgcggggaagagcagcggccccacctcgctgttcgcggtgacggtggcgccgcccggggcgaggcagggccagcagcaggcgggaggtaagaagaaggcggaaggcggcggaggcggcggtcgccccggggctccggcggcgggtgagtgctgcgttgtacgttgcgcgcggcgggaggcccgcgcggggtggggaccgtgccccaggcctgccggagccccgcagggggagggagccccgggcgggagggcgccgcggtgagggtgggggagggggcgcggggaatcccagattagccgagaggcctcgggctcggggcgtgtgtgtgcgcgcgcgcgtgtgtgtgtgtgtgtgtgtgtgtgtcggcggtggcagcgcctccattatgtggctcgagagccggggggagctgcagctgccgctgtagggggaggagccgcgggcgggcggcgggagggagcccggtcggcccgcggtggcgccgtcgcgctgcgtgcgcgcggtgcgggcacatgtctcggggggaggggagaggccccaggtcccggggcgggcgcgctttggcggctcctcgccgctgtattgtgcaaggagcgcaggggctcggcgtgacgtcacttccggcgggaggagccgggcggggcggggcggggggcggaagatcagtacaatgcggccgcggggagcgcgggcccgcgggggaggggagcgccgccgcgccgggctcggcccctccccctctctgcgctctcttcgggatacacgtgggcttcgggcctgggccgcgcagtttttctttggctttctcgaatcatcgaggagactggcaaaattagtaatgtctttagactgcgtcactagcgccaatcgaattcgtagttgattgttctttgaattcacatttgagtcctcggttaaaacctcagttaaaaagcaggataaagtcgagctgctttggttctcggaacggaaaagcgtttttttgttgtttagaggcttggcctttatggggctcgtgtgtgttttaggggacggcaaaacagaacagaaaggcggagataaaaagaggggtgttaaaagaccacgagaagatcatggccgtggatattttgagtacattgaagagaacaagtatagcaggtataggatgctcacctagttttactcatcccttatt

SEQ ID NO: 7100 - DNA, 1185 bp, Homo sapiens
tgggtggaggtctgggtgaaccttgttacatttcaaattcaatgcctataaaataagaatttcaattttgaataagcagtgtgtggtctgtgctggtccacacacggttactggtctgtgataagtatagaaatggagaggaagcgtttagaaacatctgctgatggaataattttctgtctgttgaatctaagaataaaaaatcggggcttgcattttgtgtataactagaagtaaaagaaaaattggtccttcacccggatagtttgagatgcactgctatagagaacgatggagcatgaagcacctgttctgtgcttttcttcctctcacgattgtctttaaatggtcagcatcttagtagctgtctttgcttcagaatttcagtaccttccctttttttttcgagaaaagacactgtttctggaaaaaatagtaacagtcacccagaaaagagatcgagacaactgatcgtcaagttggttaactattatgtgctggctttgaacatcaagaacatttcaaacgagggccttttttttttttttgcatgattttcacattaatagaaaatggtgaagtagggtatcattagattttcccatttgctgacagttcactttgaataaaggtggacttaatgatgtactttaccttataaagtatggagtacatgaaacccaataaaaactcttgggtgaaaccctagctttgtaggttgaggcagtggaaccttcatgtatatttgaagagcagttagtggattctggattatgcatagaattgaaccctgaaacagaaaatgaatcttttgggtgacctcatatctttgcattgattttctttcccaaataaccattaaaactcatgggttttgtttttgttttttttgagatggagtctcgctctgtcgcccaggctggagtgcagtggtgcaatctcggctcactgcaagctccacctcccaggttcaagcgattttcctggctcagcctcccgagtagctgggactacaggcgtccaacaccacacccggctaatttttgtatttttagtagagacggggtttcaccgtgttggccaagatggtctcgatctcctgacctcatgatcctcccgcctccgcctctcaaagtgctgggattacaggcgtgagccatggcgcccagctgtgtttttttattc

SEQ ID NO: 7101 - DNA, 1179 bp, Homo sapiens
ggtagatgagccagacccttgtcctagtggtcccccgctccccaggacttcagagatgttgcacgcccctaggccctctgtgctggggcatcaaagacaatgaatgaggatgaaggttggtggcaagtctggagcgggcgttgagcggaaggcgagttttcttttgttttctgtaggaaaggtgcaaacgtcaaacaccgtggaaggagaaaaggatgggaagcccgaggggtgtccaagccctgtgagactgaaaaagcactttgaggaaccttaaagaccttgtttgtacataagaactgctagcaaaagagacctcactcttctcttgctttcgtgagaaaggaggggcgtggatgtaggattgctgtggaaagcgaacacaaaacaacccagaatgactgattaagtgccttgcaaatctttattattatccaaacatttatgttcatactttcttgtgtacagatggtgctagtcaagatgaaaacaacaaaacaaacaagaaaaacattttggaaatgtattcacagctctttttctcttggtgttttatcctatttctgacttgctgtttctaagtaagttgtgtttgtagagctatttcttaatcagtattgcttatgaataaatattacctgtcttttatggttattctggtgaggccactcaaacagagagacttccctcggcacgagccagtgtgtgtgtttccaaagtaggtttggagcagcaggtgacctcgatgccacatcccaacaagcagcgtggtcaggtagacccagaaggttgattgtggggcaggtgctttagagaacaggtgaggagacggcacctgcagcacaggggaggaggagtcctttgcgacctgggccctccctgctcctgggaggtgggccgtatgttctgtagaccgtttgcccccctcaagtcctccacacatgtggttccttgacccacaaatccacagtttgcgtggccctcaaaattcatattcatttttattccaaaaagtcttgaacgaaagctggaaccaattcaccagagccatatttctttctttagtattttctagtgttgtgttgtagattgattaaagtgggtttttccccagctgagagaccttctcaggcttgttcagagacttcaactgtattggattagaagaaggattcttga

SEQ ID NO: 7102 - DNA, 1142 bp, Homo sapiens
gtttctgtagtaagcagccaaatgggaaagatcccttcgttttgaatttgatgagaatgggcttggaaatccacgcccaccggcttgcacggaagaggactcagcctcttcctaatggttcaacattcaattcctgaggaaagtgctgatagtattagttccctacatttccctaagactcccatccaacccctagtgctactgaagagggtttgggaaagcaattggagttccttagcttggatatatatagtacctgtttttttcctctggaaaaaccaaagtactttagtgagtcttacaatcttaaggcattttgtcccctcactgggtcccgagaggcagggaggggctaggccttgagctaggagcaaggacatgggccgccaggcctggttgttactagctgtgcaaccttgggcgagcctcttcgctttgctgggcctcaggttcccgagtggaagactgggggtcagaacagctgcccttctgggagagcatcaagagaaagtggtataagtgatgggaagtgctttgaagaaattaaaggtctgtctaggagctgggggtaatcatttacagatgaagaaactgaagtctagtcattgactggcccgagttcacagagtggttttatagcaaaacagggacttgagtccagcttattggattcttcccatcagatcatattgcaccaggtatgtgtagacatgaacacataccattcctctaaggtgtgtgtacatacacggatgtgtgtgtacaggaggtacctgacatggtgaaaggccataggacagaaaacctgagttctaattccagctttgccagtcgtcccgtccgtgatatattccataggacagaaaacctgagttctaattccagctttgccagtcatcctgtccgtgatatattccataggacagaaaacctgagttctaattccagctttgccagtcgtcccgtccgtgatatattacctaactcctccagaactcagttttctaacctataaaatgaagacattgtgctagatgatctttgtggttccttcaagctctggatctctaattccatgattagtaatgtatgtatgtgtatataaatatgcttatctgtagaaatgggcccatttgaaaagt

SEQ ID NO: 7103 - DNA, 2399 bp, Homo sapiens
tatcagtagccaaatcaatcaagtggaagaaaggatatcagagattgaagatcgacttaatgaaataaagcaagaagacaaaattagagaaaaaagaatgaaaagaaatgaacaaagcctccaagaaatttgggactatgtgaaaagaccacatctacgtttgactggtgtacctgaaagtgacagggagaatggaaccaagctggaaatctctcttcaggatattatccaggagaacttccccaacctagcaagtcagttagctttaccgcataacaaactaccccagaacttagttgcttaaaataaccttttttttaaggttattgtaagtcagcagtttgagctggacagtccttctggtttggcctaggcatgctggtctcagtgggctcactcactctatgtggttgctggttggtaggtctgctgggaagtggaggtgactgggccatgtagctcatcagttcgcccagccttgttcacgtggctgtggagttctgggcactgtaaggaggcaagccccagtgtacaaatactttttcaactctgcttgtatcatattagtatcccatggaccacagccaatctcaaggccaccccagaatcaagggatgggtacaggctcctcattaggagggactgcagagcaccattgcaagggcgtggacacctggggaggaagaaactggagccatcactgcagtccaccatagttagccttacgttttttgtttttgtttttttgtttgtttgtttgtttgtttgtttgtttttgatgttacagaacatttagtgaatttgatgaatctaaagaccttctttctagaaaaccatacagttttcccttggtatccatgagggattggctccaggacatcctgggtaccaaaatccacaggtgctcaagttcccgacataaaatggcgtggtatttgcttataacccatgcgcatcctcgcgtaccttaaatcatctgtagattgcttgtaatacttactaaaatgtaaatgccatggaaatagttgctatactgcatttaaggaataatgacaaggaaaaagtttgtacctgttccatacaaatgcagtgtttttctgaatattttcaacccaatattagttgaatccacagatggcgggacctgcagatacagagggccaactgtacgtatgaacagtttgcttttaggatcagagattctgagactccctgtggcccatcagtggataccctggggcccttcatcagatgagaaatagacttgctacctttcaaaaacactggtgggaattgtacgggttcctcattttaaattcattaggaaaaaagtcataacagaaggtaggaatagtaacttacatgccagatgagcagcgttcactgaaagaaccttgtgtttgccaaattttctgaatgaaatttatcagtcagtgatgatcctggattaagagatttgccttcacgcctcctagagaaagcatgataggcttttaaatccctctcatcccgcttccagttttctaagagctaggggccctgcctgcatcaacttttaatagaaagcaaacatctaagcaaaggtaaacatttaccaaacaactttacagcaaaataattttggagaagggggcaagggatggagaacaaaatttaaaattcgtgtcaccagtggctggcgatttattgccaccccagcctccatgactgctatttcattaatccatagtcattgtagcggcaggcttttttcacgtcagtaacttgatgccattagttgctcctttgggatgagaacacatttaaactgaaaatgaacatgctggacataatttatagccatgccacatgaatgccaagagtgcaggggaggaaggctgcccgggaagcctgctcagaatggatgctcaggacatgcttgctgtagccaggcaggagcgctgggcaggcaggggggcagccggagcctgatgaagccagacagccacaaaccacagaggccccgagtcagccttcgctgcagggatgaaagagaaattccacacgtgggggcccgtccctgagttaggtcttgaaaatgcttttctgccccaattgggaattgatgttcgctcactcaagagtagcccactgggatcctgcagggagaagattctgggcgttgtctgtggagcatcgtgtaatccctatgacaggcaatcgttggcagaagcctcaggaagcccctggcgccctctctgtccctgaagtaagtaagagatcaaactggttgaggagaaggaccagaaacactacccccaaattgggacacccccttaacttctggaggtttgtaagcatctgaaagctattggctcaaagtcaacatattcaaaattgattcaaaacatgttaaaaac

SEQ ID NO: 7104 - DNA, 1228 bp, Homo sapiens
ttccttcttaaacattccatcagaatccatgaaataaaccgatggaaaaaaactgataaagatttttcctattttgaaaaaaccgttaatttgcttcatagtccaggaaaaaaccatgctggtttgattcagaagttaacagatcagatgtgtttgacctggtttttttgttggtggattatttcaactaaagttctcattatactttaaaatatttgttaaaacttgtatcccttcccaaattatacacatttaaaaatgtttaaaatttcaaaaattaaacgtaggactttctgtcttatatttttaccatccaatttatacataagtatatatagacaatgtactgttgctgcttaatgcaaaatagttgtccttaaagcaatttagcatttgtttacaaatatatatgtataattttgctcctgatttgaaactgcaattttatatatttagagggaaaaaagccaaatcatgctagagtgcactagatttcatgtaagagctgtttggagcagtggaagagtctcagaggactcagtgtgttttcatacttcgtgttctttcatgtaaacctgatttgagaaattcgtcatcactttttcctttacagaaactttataacaagtcagcatccatttgtagtctctggttcatctcaaatgtttagcctcttctcctttttttgttttttgatggcctttgtcatgtttcatcctaaatttatatctctaggcgcaactcctcttgtgaactccaattgttcattcttagtcttggcttggatttcaaatttaacttaaccaaaacagaactgttggacttgctctcaactccctgtaaccaaatttgttcctgttaaattcttcctcatcttaataaatggtagctatgatcttccacttgcttcggccaaaaactcgagcattatcctgactcctttcattccccacaagccgtcccgcagtaagtaaggcctgttggctgtgctacccagttctcctgctaccgacatccgagtcaccattgtctatcacctgggctatagcagtgacttcctaaccattttctccacttccattcacctttttatagcccattctctacacaacagccagaatgatccttttaaagcagaagtcagactccttcatgccttggctcaaaatccagtggctttctatcttcttcagagcaaaacccaaatatggcagtagggccgtaagtg

SEQ ID NO: 7105 - DNA, 1153 bp, Homo sapiens
ggccctaaattcagtgacgacgtctggtaatgattgagagtgactgctgactggaggtttgaaggacctggcttcccccactttttctttctttatcccttttgcagttttcataggattctctgtttgtgagaggattctgcagtaagcaggtacttgtgttttgcttttataacatcactgtaagcgtgcccctttacatgcttaaactatgcccatatgactctctgcagaaaactggacctgtttcctaggccctgctgtattccagctgagaggaggcataggacataccaagggagttttgatttgcttatcctcacatcctctaatttaatgggtagccctttatagagacaggtgactatccgcattttagatgagcaaaccaatgttcagggaagttgcccaaggtcagagagctagttaattgagaaaccaggattgaaaatcaaatccagttccaagtacagcgttggctccaccatatgtgatggtcttccagctgtaagcgtttgctttgctactgtgagaaacatttatacttgtctgctgagtcatagggcaatgggaatatttttggcttgctctatctggctaattaagcaatggcagtaagataggcagagcccacatttttgaggtttttctttgtaaccaacattcttcatgtaatgtttcccccttaaaatgttaaaattaggccagtcccagtggctcatgcatataataccagcactttgggaggccaagatgggcagatggcctgagcgcaggagtttgagaccagcatgggcaacatggagaaactccatctctagaaaaaaatacaaaaaaattagccaggcatggtggtgcacgcctgtagtcccagctactcgggaggccgaggtgggaggatcagctgagtccaaggaggttgaggctgcagcgagtcatgattgcaccactgctctccaacctgggtgacagagtgagacgctgtctcaaaaaaaaaattattatcccttattcttttatttcttatagtgtctgtagcatataggcctccccagggaacagtgctgtccattttctgggttgccctgcctcaacacaactctccagaccaccctctgtctggcctcaaccctacgtaaccctttgtgtgcac

SEQ ID NO: 7106 - DNA, 1180 bp, Homo sapiens
gcctggctttttctttttttcttttaccattttattggacttgatgtggatttccctaccacgcatttgatcctaaagaaactctatcagcacattttttccaggtgatatgtgtttgctgaaatagtcatatggtacctaccagtccttactcatatatctttttgcagttatttttacaagaatttaagcacttgagacatttcttttttgtgtgtgtgcgtgtgacggagtcttgctctgtcacccaggctggagtgcagtggtgccatctcgactcactgcaagctccgcctcctgggttcatgccgttctcctgcctcagcctcccgagtagctgggattatgggtgcctgccagcacgcctggctaatttttgtacttgtagagctggggtttcaccaggttggccaggctggtctcaaacccctgacctcatgatccgcccgcctcggcctcccaaagtgctgagattagaggcgtgagccaccatgcctggcctaaaacatttatttctaatgagaatgaatatgtgaataaaatcagcattctgttaggaatgaaaaggaatagatgtgtgtagtcagccagttagtgtacactaaaccagttggtattgtcagtagcagtaagagtgactgtctcctcagacttttgatgggctggcttagaaaagtaacatgaagataaagtgggtcctggatgtctttctttatgggagctgagtgattatgccagacatgagatctaggactcattttgcaaatgaagaaaaaacagctgaaaacttgtcaataaaaatgataaccaaaggagaaattatcatatgatccaatttagtaatgactgagggatcataaaaatttattaaaatgaataacagtttattgcttttctgctttttctatttttttccttttttatcttcagaaatcaagaaagacattttgctgctttgggaatgttatgccatttttgtcgttaaacggaatatttagagttaagatatgattaggataaggtaaaaccttatgaaatgttctcacatataaatgtatggaacttttcaattagctgtttaaaatgaaatatttatatatggagatcttctcagatatataatgtttaaaaaaaaaaacgcaacctttatttttattttttgagacagtctcgctctgtt

SEQ ID NO: 7107 - DNA, 1145 bp, Homo sapiens
atcactgattactcattttagaaccagtttccagcatatgttcttcctacttcctgcaacagtcattttgtagttactggcctggagggtaagtctttatccttccattagacgggttcagtatgagctgctattaattttaggacatgaaagagagataatcaacactgctatttctctgggaatacactgaaaattaaatatgtagactaaaaactacactgtatcttaagtcaacttctgttcattttaacagacatttagatgaattttggactctttcatttttaaaagattacagttataatgaacaataattaggaaagctttttttttttttttttttttgcaaaatggaaggaatttcaaaattcatagtaatggtgaaaagcaaagaaaaagaaataaccctaaacacaaaacaaaacaagaaacatgagagaggaccgaccatcagttagccatgatctgactcagtctgcaagacagggaataacttccaaatggttctttgttgctacacatttactgggtggcttaaaaaaaatactcatagagcaagagaaattatgtattaggataatgtcctagtaaaatattacttttgttttgtctttatatcacaaaatatttaaagtttagtacatattaggggctagagattgcagacacaacatgatgttctgtcttaaaagctgtattcatgttttctaatattcttagactgtatccttctcaaagcaagaaatgtgttttattcgtttttgtatccccactgtagcaacgtggaatgaacatgagattaaagaaagccatccttcatgtagtcatttttgtcaacactgagaaaatactgattgagcaggtggtgtaagccaggcacagtgcttagaggtgggggtaccagcttgtgtgatacgtgctccctgcccttctggatctcacagcctagcagggaagacagatgtgtacataactaaccccaaatacattcagagtgtctggaaacacacaggagggatggttgggttggagatgatttcacagaataaatcacattcaagtttggctggcctgtgacccataatttataaatcaaaatattggccatctagccaatgtcattatgagccacgcattatgcc

SEQ ID NO: 7108 - DNA, 1270 bp, Homo sapiens
tgcttttgggtccttatttgatatcttttccactcttcattcctatttgtttctcctttcttttcttttcttttttttttttttgagacagagtctcactctgttgcctaggctggagtgcagtggcacgatctctgctcaatgcaggctctgcctccgggttcacaccattctcctgcctcagcctcccgagtagctgggaatataggcgtgcgccaccgcaccaaagtgctgggattacaggcatgagccaccttgtttctcctttcttaaacgcagatcttttgactggagctgtggaactggggtcagagttgagctccatcagcacatcacctcgttatctagcacatcacacctactttgtatgtttgtgtagcagaccatttcttctttcgtgtttcctcattttacatttcatctcttcagtcacagcgaaaagttgttccgtgagacctcttgcataatgactctaaggggcttcagagacattctcctgcgaggtaactgtgcctgtgatgtggggagagtgtgagactgggaagcagaagaccggaatgtgatacagcctttcccacgacttggctgaggaactgctgttgtgaaccttttgccctggtgggattattgtaagtattcagagggatcattttgagagaagtgctgtggacattgacagtgccagactctcacaggtcaagttttcattgtctcttagttttggggctgatatgaaatgaacttgggtctttttctgagggctttcagaaagttagcaattaaacaagaattctaaattctgttttttgaattcacccaccgtgctgttctctggtttcagagtacttgtgcatggtaagggactgtgaggaaagactttgaaatgattaaaaaaaaaagagcatgttttgtctactcaaccatcaggtcagctctgcctttcactgtctttgagctgtactagaattgtgtgtgctgcagaaaatagacagtaaagcgcctggttcttgtccataaaatgcagttgtgtttggagaatgcaatagattattttcctatgcatattgactagttttgcacattttacatcttgctggcatttctgatgcttatgtatttgtgtcttctttgaattcttttaaaaatcagacttagcatcttactcattttctagtgagttaaatcttttatatgtgttttattaattttgagaatcattattttgctttacagaaaattatttcttaacaatacagtaaaaaaccacaat

SEQ ID NO: 7109 - DNA, 1140 bp, Homo sapiens
tcatcttggaaataaaactaaaaaaaaaaaaaaaaaaaaaggcagtagctgctgaattcttttaggaactctatggagttcaggttcttggtctatttagccgtagtggaatttatgaaaatctaaaacattaatgatgcctaagaggcaggctgcctcactgagatgaatgctttgcctggcctgatagcagaattaaagaaaattgaaacttcagcgttttgaagatcactggggtatcatttggtatgtattcagaatagttcatgaataatgtttagatggagtccatataaacccaattcatagtagagtggaaaaatttttatatacagaaaactgctgtagccagatagtaaaagaagatatatttaactgtttatagtaggcaacagaaggcagtgtggaagagtccaatgaaaacagtgttaggagtgcttcttgtccctttttacacaactagaaaatataaagcaaaagtaatttttataacatatgccaaggatctactcatatggtacatgttttatatctgccataacagactgacatagcatctttcactgtcaaattgagttagctgtggtacatatcatggatggtttcaaagctattttgccattaataaggcatttacaaatactataataagtgcttatagtatatactgccggtcctttcagattgctgctttgcatgcatcaaatcctatttataaagtggtattatccaaagtgaatagggaaaatgatctagaaagtcaggattttttttttccacactcacaagtagaatccttctctctagtgaattgagtcagcatttcagaatggaaaagtctgatgtgcaaatagctagccccaagatacctataaaatggggtcactcaaaaaggtgaaaagtacaatgaatttacatttaagtgtccttggcctcttttaggtgtgggaaatgagtgatgagtagctgactcaggaactatagctaacctcttttatatatagtctatgtttagagtatagtaaaaagagaagaaactgctttgtgacagtttcccatgtacaagagatattaatgaaataaaatgtttttttaactcatatatatatatgagtcccatgttaaaatatatatatacac

SEQ ID NO: 7110 - DNA, 1246 bp, Homo sapiens
atgaaaatctgaatggacctatacctagttaggagattgaatcagtaatcaataatctctcaacagagaaaagctgacttggagggcttcacaggtgaattctaccaaacatttatagagaagctgatactaatctttctcaaacttttccaaagtattgaagaggaagaaatacttcctaatgcttttattatgaggccaacattaccctgttaccaaagccagacaaagatattatgagaaaagaaaactacaaaccagtatcccttatgaacactgatgtaaaaattttcaacagaatactagcaaaccaaatttagcagcatattaaaaggattatacaccatgaccaaatggcatttattcccagactgcaagaatggttcaaaatgtgaaaatcaatcagtgtaatatatcatataaacagattgtagggggaaaaaaaccccacgtgatcatctgaatcgaagcagaaaaatcattttgacaaaattcaataccctttcatgacaaaaatcactgaacacataaggaataaaaagaaactacttcaacatagtaaaagccatatatgaaaaacccatagctaacatcttactggtgaaagaccaaaagcttttcctttaagattgaggatgagataaggatgcctgcttttcaccacttctattcaacatactactgaagttctagctagaccatttaggcaagaaaaagaaataaaaggcacacaaattggaaaggaagaggtaaaattatctctgttcatagatgatatgaccttgtagatagaaaatcctaaagatcccacaaaaaactatcaatgctaataactgaattaaacaaagtattggggcacaacgtgaatacacaaaaatccgttgcatttttatacacaaacaaacagtgaacaatctgaaaaggaaattacaaaaacaattccatccaaaagaataaaatacttaggaattaacaaggaggttaaaaacttaacaatgaaaagcagaaaaacattgctgaaagaaattaaaggcaacataaataagtggaaacatatcccatgtttgtgaactggaagatttaatattgttaagatgtcattacctacccaaaggcctctacagattcaatgcgttccctatcaaaatcgcaatgatgtttttttgcagaaaaggaaaaaaaaatctaaaatttatatggaatcttgagggactccaaatagctaaagttatcttgaaaaataaca

SEQ ID NO: 7111 - DNA, 1222 bp, Homo sapiens
tttaatattttgtggtatgttagaaataaagcaagagaaaatcgtgatactatattcaagattacatgcttgtgtttggccggtatgtgcctttacatttagagtgatcataaataatggatgtgatattctgctataacctccctcataattttagtgaagtatataaatcagcatggagggaaaattactaaatgacttttttgtgtatccttttcatcctctggtgaacagtgtacctcaataaaaagcgagaacaaagttgatcatgttatattcagcttttaagcttaaattttcagttctgttaaccatctcattctggatacactggtgctctgttacttcattgttgttggtgggctaatttgtgggaagagtattacctctgttgttttgaaaggtcaggagtgtgtatatgtttgtcacttgagggtttcaagttcatgtaggaccagattttagagccttttttgttgatgagctctgttgggtttcactgctgtagcctgctataaggtagtaaagaaagcaatcttttgaattaataaagtgatggattatctaattacaaagttgatgtgaaatggcagtatgataactttgactgcattactaaatgatcccagtgactgatcagatgtgcctgggttccattaaggaaaaatatgccattaaatatttaacactaaaagcgagcaggcacaccaggattgctaacctccagtcaccggggtgcttgtgtgtttacgtgtggtggtgactgctacatgccacatctctctactctgctcacaacagctgctagaatacttagctgttgggattatacttctcttctggtgttaagtaaagcaggcaaacagctaggatgcttaactgcatgcagatcctggcattctaattatgaaacggtgtcatgcatctatgatttatatatgttgtctttattacaacagattgaatctcgaagttgattcaggagacaattattctcagaaatatttctctaccttcaaataaagtgatgtttgtaggacacttgggctttcaaagaaaacaactcattgtttggatttttaatgatgatatttgtttatcgtgttcttcattcgtagccatttggttaaatatttcttttcacttatgtgttaataacctatgatgagttggtgtatatttatcatagttaaaaaccagatgccagctaaacttctgaagt

SEQ ID NO: 7112 - DNA, 2271 bp, Homo sapiens
cctcgcctacctgagtcgcgagctgtgtggggtgctggggaggggggggcgtcgggcggccggcagccgcgggactcctgctggatggggctgcacaggcagcttggcggtgctgcccctgacgcgcgtgtgcccgggggcgggtcgctgctgacaggccccgcccggacacccccctaggttgccgcagcggggctgggagggggcccaggctcagccactgccccccaacctgggctgcggtggaaatgggaaagccattgggcagacttgagggggaagcgttgtgccggggataattttgctgggagacgaaaagtctgtgtgctggacagtcttccttggtgcggctgtggaaatcacacgtggcgggcgtggggctgggtgggagctgggatgagtataaatcaggctcccctgcagaggccccgccggtaaagcatcaggcttgcagcaggtggaagaatcttgatgtctacggtgcacctctgtggtctgggttgtgtgtggcctggggatacgaagaggaacgggacctcctcaaagagctgatcaagtgagagagagaattacagtgtaccagaagggctgaaatagaggggcaattaatgtgctgtgggagcatcagacacgggtcccccgtgtgctgtgccatttaatggctgtgcaggcatgtctaactcttaaccaccattctagatgcagggattcacgtgaaggtgttttggaagcctggacgcgctgtgccggtgtaaagtgctatgtgaaagcaatttatggaaatgtgtaacatacatgaataataggaactgcattcagtcaacaaatattattgagcttctgtgtgcgaggaagaagagttctattttgagatgagtgcgatgattttgtgcatggccgcttttcagacctgccagtctgagatttaggtgggtggaggtgggacggtaagtgcaaaactcgtatctgtaatttgaccattgttcttactttgttctcatttgattcataattcaggaatatgactttgcattttagagctaccaaataataattttgtctgttgctttctgaagtaatgataacagcgaaaacatctgttcgggagagagcagcatcttgaagtttttgtaaactgtgtggttgaaaacaattcgttcctttcaagatagttcttggaacagaaaagttttggaatgaataaatggtgacaaattggcaattgaatcattagagctgaagttgagtcttgtgacacacggaattgtgcatttccaaaataagctacacaaaccctttgtgggtgggatgcttgttgatttaccatactatttcattagtctcattcatttttcctgtttgcagtaactggggatttaagcaaaaaaggaatttaatgaaagagttttgggggagttctcagtgttgctttaaagtctgccaagacttgactgggcatcggctgaaccaagttaggattgcactgcaaaagtagctggggctgggatctggggtgtatatcacttctgtcgcctgataatattggattctgcagtaggtaccacgaacaccatagacactggaccctggtgctgctgctgctgctgctccttgggaaactcactgttgctggagagtgattctctcaaccattcttctttgtgatactggcttttattcaaagtcctcagtgagtgtcttggattggctaaacttaggtcactgcctgcacccctagcgcgagggaggttgagacggtatttagcctttttggcttttaagatagaaggcaggctcactctacttcccaccgatagttatccagtggggaaatcagcaaacataaacatagaaaaagggatataagtaaatgctaagcatctaaacaaaacaagctaaacagattcttcataatgactgacaaatacttactagtattttacacagacacaaaatatttgcacttactttggattgccaggatacacagttcacttgtgttgtggtagtagttgctctgtttgaacactcccattttagtggttatagtgttccaaagagcctggttgggaatcactgcaacctgaaaatagtgttagggaaatgttagcgcattgtttgatgcagttttctgccactgttgaatgcctgtccttgagggataagtttctgtattacttgtcatcttgtaagtaaaatttgtttctctttattcactgtccattgtgaagtctttaagaatagtgcatctttcagtttttgtagccccag

SEQ ID NO: 7113 - DNA, 1213 bp, Homo sapiens
tctgtgtcaattaacttgattagccagaaattaatcacaggcctagagaccaaagaaaaagctcccctgagtctcaggcaacagttttgtcacggatgcaaagcttcctgaaatcatgaatgctggactcagtttggcaaacgcttacacctattatgttctgagattctgagaaccagaatgcaaacttaagtaagatacagttcccactgtaggtgttttaatcctggtcttatatagaataaaccagtactttgctgagtgaaatcaccatatagaattcagtattaacagatcatgcattcagatgcttgaatgtgcattcttgttgtgggcttgatttagatcctattgcggggtcattacgcaaaaattcaatcataccttccatagacaaatgtctgatttttgtttaaatctgtccgttaggtggcctttccttatctgaggtgtagtggtctaacatttaggaagccttgctttgactttatcgggcagcattaaaaaaaaaacaacaaagaaaaaccaaacatgaattatagtttttaacaagtgatctttatttcctgtcttctgttaggatcatttgaaagaaaaagggagaacttactttctagttgttactggctggcacagtacctccctttgtgtttctgcttatttatttagattatgtgaatcttaaagggctttttatatcagttgaaagtgtgttactgcgcatgcatttggtgattccagtgctagatatttaattactgtgtatttagtgttttgattttctataatttcagttccgcgtgtttttacacttgttcattttaaattgatgtttcattttcacttataatactgtttgacttgtctctatcatgtcaccataaactgtaatattttcaagggttatagatcaaagatatttatttagaaatgtacaagataatgaaatttagattccttatacttaaggctgattttattagaagattattttaatgttctattataaattttaagaatttgtattcaaattgtatgtaaaatatgtaaaatgttgacggtactatattaagtggttctataaaagctattcacaagttctactgtgatggacatcctcatcatagacaaacctcctctgttttatcctcaatttctagttacagaaatttggtgatgcttatttttgccaattttatgtcaaaataagtta

SEQ ID NO: 7114 - DNA, 2063 bp, Homo sapiens
tcttacttgatcatatctttttttttcagaaacacagaaaaagaaagtgcttggtcacctcctcccatagaaattcggctgatttcccccttggctagcccagctgacggagtcaagagcaaaccaagaaaaactacagaagtgacaggaacaggtcttggaaggaacagaaagaaactgtcttcctatccaaagcaaattttacgcagaaaaatgctgtaatttcttgggaagattttaatgtacacctatttgtaaagtcatcagaatagtgtggattattaaatatctagtttggaagaaaataatttatataaattattgtaaatttttatgtaaacagaaggtcttcaataagtaaagtaactccatatggagtgattgtttcagtccaggcaatttttctattttatattaagacttcatacatttatatatgtaaatatggcttattaatggaatgttaaataaaatgtatacttcacagtcgtttgtgtcttggatttttgaaagggaggggatatctgtttaaatagttttatatgctcattggtctcattttctctataattaaaatactagaccagtcttaaaatggggatgattgaagtattgatatttctttttacagttactattttataatttatgcactttgattctgtgattcagatttctaatcagaaaatgtatttttttgtttttggctgttactatgttaaaattgaattatgggcatgtcattttgccatctttgtagtttcacaaattttgtgtaatctacctcaaatgaataatccaagtattggttaactataatgttggcatctcttattcggcaagcttaaaggctctttaaagtcttaattagtcaaagactaatccaggttagattgaccggttcactgctcacttgcaaccttatcaaagggtttgacaaagggaaatgtaaaataaatctgtttatggatattgagtgcatcttgtatgtgcctaatattgataggatgagatgtctgaacaaatttttataatattgctgtgaaggagcttgctattgaaccacagaaatcccttaatattcaggttttaaaactggcaaattctcacaggacctcaggcacagattattgaggttgggagagagtgagtagatgtagaaaaggagaaaaacaacacacgccctgttctctacagtacaactgtgtgcaattaagcaatggtacttgatgtaggctctaacactcatcaataaataagtgttgtaaaataatttataacaggtaatcgatagtgtgtaatgaatggactattaataattgattatctagaaacgaactgctttcgtgggcttttaatattttaatgtgaagcatatgcagtgtgctttctgcatttatttttctaccaaataatacagataatgagaaattggtgaaaatgcctacgcaaagtgttgacagtgtgaaagcagtgcgagtgcggccttttagtcaggttagtgatggatgttacgctgccttgttgaaaatttcactgactttgattttattacttttttaatgatagttatcaaacttgtatttaagctgcttgtcatttatggaatattgaacttatttaaatgaacttgttaaatgaataaagagctaaacataattcagtaaacaattcctttgcgcaagtagcacaataaacatggatgcaacgtatgtcaagttaatacttttttaaaccaacgcaatttggtgaatatagatgtgtggtacctgtttttaataagtgtactttttttcccccctccgtgaatgtagatcataagcaaacaaattgcctgttctaaatgaactttacatatattttaaatgaatgtatgtacttacgtataaatgtctttatatagcttgaataaaaacactgctcattaaaatgtgttgctacaacattttaggatagcgcatgaatgatattctcggaccttgtagcaaccatgtatctgatgatcaaagcattggttaaactaaggtgcttagtatcatagtagtaaggtaaacaatgtactc

SEQ ID NO: 7115 - DNA, 1234 bp, Homo sapiens
tgccagggcagtcagtcaggaagaaaactaggaaggcaaaagaaatttctgaagcttctgaaaacatctattctgatgtcagaggactatctcagaaccagcaaatacctcaaaattctgttacgcctaggagaggaaggagaaagaaagaagttaatcaggacatactagaaaacaccagttctgtggaacaagaattacagatcactacaggtagggaatcaaaaagattaaaatcatctcagctgttggaaccagcagttgaagaaactactaaaaaagaagttaaggtttcatctgttacaaaaaggactcctagaagaattaaaagatctgtagaaaatcaggaaagtgttgaaattataaatgatctaaaagttagtacggtaacaagtcctagcagaatgatcagaaaattgagaagtactaatttagatgcttctgaaaatacaggaaataagcaagatgataaatccagtgacaagcagctgcgtattaaacatgttagaagggtcagagggagagaagttagtccatcagatgtgagagaagactccaaccttgagtcatctcagttgactgttcaagcagaatttgatatgtctgccatacctagaaaacgtggtagaccaagaaaaatcaatccatctgaagatgtaggatctaaggctgttaaggaagagagaagccccaagaagaaagaagctcccagcattagaaggagatctacaagaaataccccagctaaaagtgaaaatgttgatgttggaaaaccagctttaggaaaatccattttagtgccaaacgaggaactttcgatggtgatgagctctaagaaaaaacttacaaaaaagactgaaagtcaaagccaaaaacgttcattgcactcagtatcagaagaacgcacagatgaaatgacacataaagaaacaaatgagcaggaagaaagattgctcgccacagcttccttcactaaatcatcccgcagcagcaggactcggtctagcaaggccatcttgttgccggacctttctgaaccaaacaatgagcctttattttctccagcgtcagaagttccaaggaaagcaaaaggtacttttctttctctgcaaaacagtttttcatctcagtcactcttcagcttaaaatttggttatttgtcctaaaaatggttttatagggaatttttccccttcccccctcaaaccaaaattgatcttttagtagtaaagtt

SEQ ID NO: 7116 - DNA, 1162 bp, Homo sapiens
tactctattcctgtctttccattccacaggcaccatccaagcacttttctttttctctctttaccttataactggataagtccttctcagctaaggttcatcataataaagccttaatgcccaaaagcatccgttttaggtagtgaattaacttctctagtactagctccgtaccgtccttgcgagagagactgttcattcaaatcattttgtactttctgcctctaatacctcaacgttgctcaagtattaactgaaaacaagcaaggatataacttctgatgagtgactactttttaataaggccttaaaattgagaaacagtcaaaatgcaagtgaatgaatctggtcttacatacaaatgatagaaatgcgttttgatgaatcaagtgaaatatgaattaaaccgcttaatttatgagaaaatcttgctataattctgttgaggtgattttactttgagattctttattctgtttttaaaaattatctttttcttccagctctatcgcctgacactagtgtttcagtctttacctggcaggtgaatatatatggacagggaaagccttctgtatatttggggctttttgatataaatcgttggtatcatgcacaaatgccagattcgttaaggtatgattctttttttttctctctcctttctctttgtatttgtatgtgtagctgaccaatgacttagtaatgttttaaattttcttttaggtcaggagaatatctacataattgctcttattttgcactgtggtcattggagtctgttgtaagtaggacttctccacatggcatcttggatatattagtacatgagagaagtttaaatagaggagtccctccttcatatccacctcccgagcagttttttaatccaagcacttataattttggtatgtatttccttaacattacctcttaagaaaagtaatgcacaaaagtatgtaaatgtatacgttgtgtagtttattcatttagtgttatctgtttgtatctcactgttagttaacatatggataacttaggaaattaatatatacacacaagaaacttagtatttatatgttttataaaggaattatgacttggagatatttagtatttatatgttttataaaggaattatgacttattttgaacttgctag

SEQ ID NO: 7117 - DNA, 2152 bp, Homo sapiens
cttttgggctggcctctgtggcaggggtctgcagagctccttcttgaggtttggaaacagtcgtcatacctgttgattttcctgggggccaatcactagggatctggagctcaccaaaaacaaagcttacattttaatttgtgttgcacacctaccccataatgtctttataccccaaagatccttggtaaatgcttgtgggttggaagcggagttgtcatcgtttaaaaggcacttaagtcccttcttccaatctgtcctgtctaggaatgtggagctctgcccccagtgaggggttctcctgtctgggtgagccaagctccagaacagaaccttgcctgacaacacacttgatagatacattagcttggagtgctggtgtgtccaaacactggctggcttagaacaacaggagtgtattccctgacagttctgggaggtgcacgtccaagatcagggtgtcctcagagttggtgccttccgagagctgtgagggagaagcggcttcatgcctttgctggcagttgccattccttggtgtgtggaagcgtcacccagtctctgccttcatctccacatggcactcttgctgtgtgcgtgtctgtctccaaacctccctttgtttaaggacaccagtcatatcggattagagcccatcccaccgactccagtataacctcatctgtatccgcagcaaccgtttaccaataaggtcacattctgaggtactagaggttgggacttcaacatcggaatttgaaagggacagcattcagcccatgactccagataaacgtgaggtatgctatatcattcctaatttacagatgagtcaatacaaacttgagtgagcttgctcacaattccatcaaaggcagggttcagacccaagtttcagcatttagggcaggtgtcctctgcatggaagaatcatactcaatagccgtaaacgctgacaaattccccttcctccctgccttctgatgggggctgggcaggccagctggagctgtgtctcctgctgggattccggactgagagtgacagcaggtagtgaaacctcaagcaatttaaaacatggtattgttcctggaagactggttatgttggctagggtcagcaagagagggcatcaaggctgtagtctagcagtgatttaatctgcaagtcaaaccagacgggtattttgtattattcatatgtcacatcctaccaacagacagtaagtcaggcaaggctcctggtgctccttgtcactcacgtaattttcacatcaggaaaactctgggctgggtgcagtggctcacacctgtaatcctagcactttgggaaaccaaggtgggtggattgcctagctcagtgacaccagcctgggccacatggcaaaaccccgtctgtaccaaaaatgcaaaaaattagctgggtgtggtgttgacgtttgcggtcccagctactctggaggctgaggtgggaggattgcttgagtctgggaggcagaagttgcagtaagccgagatcatgccactgcacaagctaggtgacagaatgagactctgtctcaaaaataattaaaaagcctctgccccaaactcgttaaaagattttataaccacaactgctgtttctgtgtagatgcatctgcatgcccaggagcagtaaatgcaataaaatcatttggttatactttgaacacaaaataaacggttgaggcttttactttctaaatagtttgtctcttgtatcaacatagctggaaaagggagaaatccgatttttaaggccaagggaggggaaaattccaagtagaagccaggctctctgtacacgtttaccccacctacctgtgtgctcctacctgtgctgaggattctctctgtagctctaaggtcttgggaaggttattcaccttcctgcttcagacgtctgactcaagagaagaacactgttctacttaccagagtgtttttctgtgtaaaaccacatcatgaaggagaaagcgacaaagggaatgtgaggggctggaagccacagggaggctgtctcttgagtccccaccactgatccagagccaaccaaggcacctcaggaaatggaaggccacattgcctctggatttggaaatcctcctgggtaatgtaactgaaacccaggt

SEQ ID NO: 7118 - DNA, 2733 bp, Homo sapiens
gagaggaaggcctgagaggaaggctctggaaggtggggctcaggtcaggagcaggattgctggggaggaacaacgcagagcaagtggagcagggaagggtgttgtgggtctgtggtgggtgctgagagtggagcagggaaggctgttgtgggtctgtggtggatgctgagccagctgtccaggtattctgggagagcaggccctcagacctcagtgcagagtgctgaggaaggtggagacgtgccccatgggtcgccttgctctgctctgccctctgcaggagcacaaggccaaggtgacagaactggagcagcaggtagctcaggccaagacgcgctactccgtggcccttcgtaacctggagcagatcagcgagcagattcacgcacggcgccgcgggggtctgcctccccaccccctgggccctcggcgctcctcccccgtgggggccgaggcaggacccgaggacatggaggacggagacagcgggattgagggggccgagggtgcggggctggaggagggcagcagcctggggcccggccccgcccccgacaccgataccctgagtctgctgagcctgcgcacggtggcttcagacctgcagaagtgcgactccgtggagcacttgcgaggcctctcggaccacgtcagtctggacggccaagagctgggaacgcggagtggagggcgccggggcagcgacggcggagcccgtgggggtcggcaccagcgcagcgtcagcctgtagccgaggggccagggttcctggcttgaatctgccaccacgggccggttggggcccacagtcttctcacgccctctcctctggggcctcgtcttcccgaaggtccccttctccagtgcttccctgggagaggccagctgtgttcgagtcctctgtgcctgccctggcgttctcacagcctcccccttcccctcagcaggcggctctctttgccttacccattcagaaggctcgccctcggcgctctgtctgcctctgcctgccagctcatcacgatctgcagggcattgaccctttgctttccctttctgctccctctctttccatctgtttggctttttccctcagggaacttggtctagaaggcactgggaagctcatcagagaaaatgggtgctgggcctgagtactcccgtcggaggggatggacagtcacccctcccgttggtttccagccccgccccccttcccaaggcaactctggagggtaccctaggtatgctgctgagccctgccccccgtcctgctccagcctgcccgtgtgtaacctgtaagatgtactgtgtgcctccggaagacaccacctttcccttcagcattccctttcatgacctgaggcactctgcgatgtgtgccccaaagcagaacttacagggcctgcaggaagctggtgtcagggagagaaacccaaccccactgtcaacatagggagcatcaccaactccagactggctcctgtgggtatggtgtttccgctgggctgggtcctcaacattgccaaggtgctagtgggtccctaagagggcccatgttgggggtgaagtcatgaggtcctgaaggcttaggcccctgtcattcccaccctcactcttgctgcacagttgtgtttactttttctgggtagaggatgctgaactgactcagcaccctcctgcaggacggggttagggaatttggtgctcaattgctctcccttgctcttccccaaactgaaaatacctactgcaggatccctcggggcacactgaagcttggctgccaaccctcttacttcctttgttacagggaggggttggcttggggtgaaaagttctgccctccgcagggagcagctccagctgcctggcagtgctcccagtttgtagggaagccacaccagatctgggtgccttgggagaaccagtccttccttttgacccaccccaggaagatggagtgctcttttctaggcccatgttctgccagcaaccgggatgcgtgggcaactggactctgcacgggggtctacaggttgagggaggttggtcacaatgagaacctcggggtttgaggtggccatgggcagacagccgaaagggagggagggtgtgggtgtgcgtgtgtgcatgtgctggtgtgtaagggggaaagggtctttcctggttttatttaaataaagtagtttatgtaacagttaacatctactgtccttgctggaggaagagaaaaggggcaaagatgaggcaagggttgggcaagggaagagcagggttaggcggcaggctttttagatggtgtggtcagggaagggaggtgaaggaccagattgagtgagctgcgctatgcatgctcttgcgggggtggaaggccccatggccagggtggtcatgtacagggcaagtgtagagaagcaggggaggagttggtgcctcatggggccatgctgtgtgaggtgatgggtgccaggagagggtttggtagaaaggggcctgcggggtggagtgggctctgtctgagctaagagatgagagtgccagagggttgggatcttagatgtgtctggatgtgagcatgaatgtagagaagggacacaagtagtgatgccagatttatcaatacagtgaacccactgaaatttcagataggcagtatttttgtctgctgcagtgtttaggatgtacttacattatgaattatccgttgtttctctgaaattaaaacctaga

SEQ ID NO: 7119 - DNA, 1200 bp, Homo sapiens
cctgtccccaatctcattgcctgagaaatttgaggcacagaaggcaaggggtccaatccctacagtcaaccagagcacttggcacagcaggtaccaaggctggggagggccacagacactgggatggtgaggtgagggtagacagacaggggagaatgccgcccacagaagatgacagagaggaatcaagtgaaaagggaaaatgacccgggatgacagggaagctctaggctgagaagagcattcggcagggcatgtcagacattctggagtctgctgtggagaagatcaaagcagcccctggaagtttaactgtggaaaaatgggattctaaagaaggggacagcccatgcaatttagtgagccaggatgccaacttaggtcagtgaaaagagaaatactttgatatttaggagttaaggttgaagagcctgttacccttaatagtgttctaggttgagagtgtgtgtgtgtgtgtttccaaagcagatttagaagaaaatcatatatatacccatggtgaactattaaaaagcaagcagttggggagatactgttgtacgtgaatactgacatcaagtaggatgatcatacttacccaaactgctttcccctctgcagcagatagtgcattcatgattaggtgaaccaggggtgtcacccagagtgatactttgtacagggaacattgcaggacattgcagggtgagagtgtgacaaggaggtgagataatggaagtaaagcacagaattgggtgacaggagagttgagtggtcaggatgggatgggtgtggtactcatggtgtaggtgaggactgagcctcaaggaaacgagcaggccatgacagggagaactgctggggcacaggggccaggaaggggacagaggagcatgcctgccgggtcagctcagttcatctctccgtggaaggtggctatccttttgcctcttctctccctaccacccacttccttctctagcaccacaaaaagtaccagcacatccaccagaagtctttctcctgcccagagccagcctgtgggaagtctttcaactttaagaaacacctgaaggagcacatgaagctgcacagtggtgagtggtggaactccaccttcctctgtgggaccttttaccttcctttgtgggtcccgtcaccctgggctctgtgggtttcttcacctccccctctacgggg

SEQ ID NO: 7120 - DNA, 1404 bp, Homo sapiens
tatttatttagacctttgatatttattaaagcaattactcacaatggaagtgaaagaatcaggagaaaagccttttaaaaagtattctccaggtttgtcagggtcactctaaagataaaaatgtaactaagtcttctgtgaaatatcatccatctaatcttgatgctgttgcagatggtggtgacacaagttaattgacaaactactgccaaatggtgcacaatattttgtaaaaagtacccagtagccccatttcatacaatgtacctaaattatgcagtaacttggcatcatcgttccctccttgttgctgtgtaattagtcagtgttgccacagtgtgtggcgctgatggagatgtcagaaccgagaacacttaaccttctttgattgtttttcaagttttaagacttcgatccacccctatgagagcaagtaattgtggaaatatttttggtgtaaaatcattccagagtatgtaatatttaactgatagctgcatgaaagtgagattcgtgttactttggcttttctgtctctgttgacacggttgcacatttccaagttactacagcgtgaaaactgtgtgtttaaaaaaaaacaaaattaaaaaaagagattgtggcctggttttgtaaaagttttaggtaaaattacaattgattgttttaggaatcattattaaaaattttctgcaaatcataaagctatatcgaggtgttgagcttagccactatgcacattgtaattattcattgtggctgtccagttctatgatgcattctggcattttgtaagctgctctgactagcaatatatagattcatttaatgtgttaacattggttaataaatgtatttaaaaaaaactagctttagtaatttgtttatttagtgtagtcccctatacccaaccaaatactaccgtcgctaaatgttgatcacatactgtgggtcactctttagtgactgcttaactttatataaaatcagtgtgttaaacatcatttgttcacttaaacgtataaattgaatttactttcaccagatctcaaaaagaccatacatgatataataaggagaggatgattattatatcagctgcatatcaattattgcaaatcagcctgaaaaacagatacacaactcagaatggaatagattcttaattggaggccagctgaggctaaccctctgctgttttcatctacttcttggtatggtagttgtgggtagttgaccagccccaggtcttagtgccaacattaacccagccttagtcggtactctggttttcatcattcatgccatcattcatcattcatgtgatagacgtatcacaactgggatcagatggtttaggtctgaatattaaagtcccagttcctgtaggattgtaaagtttcc

SEQ ID NO: 7121 - DNA, 1450 bp, Homo sapiens
ctcacctgtgcacttctaaattgaattggcccacggtgtccaaccaagaaggagcatctgcactccgagaaagatgtgttctgtaactgccccagtgtgaccccgcagtggctctcggtgctagatatgcatgactaagattgatgctgggcaaaatgtagatgatctttcattatgttgtgggcagcgtctttctctgcctttgctatatgcagtcagcagtaagccttttgctaaaagagttttgtttgacttctgagatccaaggctgattgttgttaaaaaaaaaaaaaaaaaaaaagtggcacatttaaaaaaatgtgtctgcatatgtggtgcatccttccatctccacaaaccatttgattcttgaaatattgtttgacctcattgctgtgtgtgaatatttctccacatgcttcagatgcacattcctagtctctgcttcctaaggggggaaccaccacacattggggggaaaaaagacattttcctacacccacccaccttgttgaaagggaggtaggtttggggcttcaggccaggcactgactatgaaacattagctgcagtgtgcaggacagctttgaggtccagctgaagtcaggaagcaaaacaaatgtagatgtcacttcaaacataatttcaactgtcaccagatcaactctacattcaaggagtgtggacgctgcagtgcagttgtgagggcagttagcagccgcctcttctgcatcctgtcaactctgattagttagagtttaggctcaaaagagttggtggactgagattgaaatttggttgtgcaagagaaaggaaaggagacacttagtaccaccagtttcagcaataaagaagggtcattctgtattcaaaattgtactgtagataaatcattcatgagattgtaaaaaatgtttgtcttgtgaccttgtgcttttgaagtcagacaaaaccgtgtaatcaacttgcacaaaaagagggtacacagtgaacatataaacacagacctaatcaaacaggagcagattcctcatggtgcttgtttattatatatatttaatcctgcttgacactttacccaagggagatggtcccttttatcagttgaatgttagcagcgttatttcagagtgtggtgactggttagagaaactcatgtactcaaccagccacagtttcaaacaaaatttttatgtgcaaaggacagcaaccttcttgtatgttaaaccaccagtacgctttgtacatctgtgataacgcctgttttatattcaaatgaacaaataaaagcttttatttttgttgctctgaaaatagcagtttcttaattggtcccctggaaagatgtctgggacagctttaatcccgggaaggaagtgactcctacagggaaatgtatctgactctgtttacataatttgttgcattacttagtacagataatcatact

SEQ ID NO: 7122 - DNA, 1142 bp, Homo sapiens
actacctgatcgtcggagtggtggtcgtggtggacatcggcgtcatccccatcaactcccgtggggagaagcagcgcatgcacctgcgagacgggtttttggcagaccagctagaccccatctatgtggcctacaacatgtagtctcgtctcttggcttccatggacttttctagagatgtagacattgttctccgtgtccactgaagcgtgcagacacagggcaacactcaccagaatacagccatttgtggtgagagtggaggaggaagaggaggaggaagaggacttctcacagcagccacgattggcatgggggtgaaatgtgaatttaccactgaatttcgctcagaaggactttggattactgccttcagtttgttggaaaagcccatttcaaaactttcttttcttttctttcttttttaattattggataataagtgctttcttcgtaaatgtggtattttgttaagccgaaatagcaattaaaaaaatatcctgccctccagatgggttcttttaaacaatttatgtagtgtgacaaagaattgttttctctgttttaatgtgtcatgaaatcttaatgacatggatctgttactaatttaagccattgctagatctcatccttttaggaaagtttgaggtacgagaaaaccttccaaatagcaccttccaattagataatagcagctttctttgtcagaaatgtgctgaagaaacaaaggctggtatacggccttcgaagttagtatagaatgagaagaaattataaataaggtgtatttcggcaattatcttgcaaatatctttgtactaaactaaaaagataaaataagttaacttcctcaatatgtaattatgtacaaaacgtttaatttattttgatctctttagaactataaaagagaaaaacattcaagaatattaaagtcttgtaatgtttgctaatataaaaaagtgttgtattatcttgcgtggatagtatcacaacaaatatatatatatgaaatataaattcactaatgaacaaaggagattttaaagtttaagatgcagaacttgtcacttgcatggtgtgccccccgtactcacatacactctgctgttgccagcagtcgcagaccgcaggagccctgt

SEQ ID NO: 7123 - DNA, 3605 bp, Homo sapiens
ccctcaagtccacacctggagcccccagagaccagaggcggccggcggggggccggccctcgccctcggccatggggaagcgtctcagccgagagcagagcactccccccaagtctcctcagtgaaaaccgtacgtctgggaggggtcgcagagcgctgtgttaaccacaaacgagacactctcccactcagtgcgagggcgagccgctggttaggagcttgcagtgtctgaggcctgtgggatcctcaagttggttttcttctgtgagttggattctccccctcttgaaaaaaaatcgatttttcaggatttaattaatacaaaccttattttaggttggtgcttaactggaggtgatgcataagtctgatttttttttccaagatagaaaaagcatttatcctaacaaattggtattttttattaagcctccatgtggctctgaatgcaagctatatatagtgagtttttctaaattaagggaactctgctttttttttttttttttaagtaactggtctgtaagtgcatatctctagaacgtccccgcagatgaatgagggccagtggccttggcagaggcaggtgtggcctcgtagaggcagtgctggccgcgccagggcatcagtgctgatgtgggagctgtgcttccacctaagccgttggtaggggactgtggcatttaagaatgtagagagcgcatcctttttgatctcctgggcggagtgaacctgcaggggccaccccagaaaccttggttctgatgcactgcaagcaagtaaccagcttctcactccagtttcaagtggctattatgtaatataaattcaaagcacattgtgaatagaacctacatgaaaacatacactttgttgcccactgacatgttaccagaagttgtaccatgatgttgttttgacccctgtgagctgatggccccggccctgctctgtgcacatttctgtccgtgttccccagcactctggttggagagagtccacatcttcagctccgtgtggacatctccctgtacctctgcatcagcacatggatttaagagttatgtaatcgtgagagaatggtgtttgtggtttttccccctctttggctggtggaggataaagttcctgctcttttacctccaagacgagggcctcattgattcacttccagaagtgctgcacttctgaagaacaaggatgcactaaagttagcaagtttataataaagttaaatataaattattttgttttaaaatgcctcaaatttttctttattctaagcagcaaacattaaaataagaatatttcctgctaaatgtaaccatacactttattccacaaaatgttatttaacaagactgagggttttttttaagaaaaaattatttccatccaatatttaaagacttgaattttatttaaacttgaaaatgactttgccttaacttttgtataagacagcttagagtccatggagcccggccctgggttggcgtgagtgggtcagagttactcagttactgcgtggatctcctgtcgctagttttactgagtaagcatactgtagtacaagagctagtagtagtttttgtaatataccttaaagatcttcaacagttgatcttttttcagaatgttggaaaatcctgtaaatgcaaatagtcaatactgtattaaatacgtgcacttggagtgtgcttcgcttgtacagttgtaaataatcagaacatatgaaaaaggtaccctacagagaaaattctgatacagattattgatatattataaatgttgctgttgagcgggatgtagataaactaaatgttgtggtttgaatattattttgatttgttgagattttcttttttctcttacatcggtgtgttgaactgattctgcctctttgctgcaaaagggaattggaaagtcttattaaaagcctccagatgttttcatactcttttaaaatgtatgtaaatgcatactaatcatatctaatgtgaaagagttttaaagtatatagagagcaaaaactggcaggatcgtaagtgaaggtgactagtaatctaatttaaatcacctgcagctaagcatgattgaccctgccagaggaaaacatgcctatttgaccatttcctttaaagcagttgccattattcaaatacagagaaatagccacagggctagtgtttttcaaatgcattttaaagaacatggggatttttttttgtagttgtcagttcactgaccaaaaaaaaaaaaaaaatcagaaataattgatctgtgaaacccaaactctcaatactcagaaagctgggaggcaacctcgaggcctgggcctacgagctgcatcttcgctacggaagggccagggcgccatcagccattcccaaaacacaaggcctgcccgtccgccagtgagtccttggtttttaataatgagaagtcctttcccccaaggtgtgagcattgcagcgcagtgtgtgtgtgtggttagagccagcttagtccttcactttgtcgaccgaagtgggagctcaacagctgcatgaggagggcagcgcgtgcattagccagtcgccactggagggctctgctgccctccggtcaatacactgtagttactgcctagccagcagcagtcttctgcatcaagaactgaaacgttgctcggaggtgatttttatagcatcctttttaattaaaggtgaaatacagattgctatataatgtctgaaaaaacctgatactacttcaagagtttctgctcagaagaaaatgagagttatcataataggaagctgtggcggtccatgccaactgtgctgtgtcacatacagcgatgagagtggctttcatactttttttttttttaagttaacaccctcctttacccccagcagtatctcaggttatagaatcagagatgcagcagtgacaaatggcattttaacttgtaaaatcgtgtgatgatgcttatcattttgaaatagaagaataaaaacctggtcccgtttcaccagacatgaatttcaagtggagtcgtcgttctctgagagtgagtgtcttgacattttcacccaggccctcctgtcatcacatcaccggctgtcactggcgggtggccgtaaacgtcctgcgttgctatattaggatctctgcagttcaggcttcaaaaccagttcagtgtatccgggcgacgggtagtggtggtgcatgcctgtctgtgtgccccgctggcgagctgtagttgcggcttgcgtgcctcgcggcccactacagggctgcagacaatcgaggcgagggcgctggccgccagcagctcacagcgcgggggtcatgtggtcgctcctcgagggtttcgtttttgttctgcttcattaagactggaatcaagcttacatgtaaactattggtaatttaagtttccttttgtgtcattcagtgtaaaactgtctaatttgaaaaaaaatgtaggttatgaaaataaagatttaggcactgttcaatttttcttttgattttttttaaattaaaatttcttcaataatgcatcttttctaaacatagttttttgtctgttcccataagtgcatgagaaagaa

SEQ ID NO: 7124 - DNA, 1099 bp, Homo sapiens
agtgtcgctatcttggctcactgcaagctccgcctccctggttcacgccattctcctacctcagcctcccgagtagctgggactacaggtgcccgccaccacgcccagctaattttttgtacttttagtagagatggggttttgccgtgtgagccaggatggtctcgatctcctgacctcgtgatccacccgcctcggcctcccagagtgctgggattacaggtgtgagccaccgcacccagccctacttttttttttttttaactacaattctgctgtaagattattaggtctggttgggtgtgtgtgagtgacttctgggatgtgctggacaagaagcttgtgggtgagtgtgctttcagtgacaaggtctggctgtgttaggttgtagacactcctgggatcctggaccaccctctggaggataggaacaccatcgagatgcaggccatcactgccctggcccacctccgtgctgcggtcctgtatgtgatggatttgtctgagcagtgtgggcatgggctgagggagcagctagaactcttccagaacatcagacctctcttcatcaacaaggtgtgtgtggtcactcatgttttgcttcatatcctgcagtacgagaataatgatttcattatttttcttccttgcctagcctctcatagttgtagccaacaaatgtgatgtgaagagaatagctgaactttctgaagatgatcaggtaaatcacgttaatattttgaatatttcttacttaccaattctgaattctcatctcagacaaccaaagtttagatgaaggaattttagcaatactagtccacaattgtattttatagttgagataatatcctcagtggtttagtgaaaagacataataaaaacttagttattggcaaactaaaacgaaaacataagtttctggattctttgttcttgagtgtgtggaagcatctgtatttgatgggttggacttttggaaaatgtgattacttaggagagaactgttggagaagggtgctcacaggtgttacttcataaaacaggttctgtgattaaatgagtttggagactaatgattgagtgaaggagaaggagg

SEQ ID NO: 7125 - DNA, 1201 bp, Homo sapiens
cacagctgtgcccgtgccatccccttccacgaggcctggcccccgtctcaccctctgcactgctggccagcatctcgtacaggcacatctgcctgctgggctcctggccgggttgcctcattggggggtgataaacgtgtgtgttttagttttcatttttgtcttatttgtagccagtgaggttgtatttggggtgacattagaacggacacgtgggatgtggcacgaaatcagtgtctcaggactgagttccttgtgtgtgtctgccgggagcattggaagtgaaggaggcggtctctgcacatttttagccttggaatttaattgttttaaaaaaaggaaatggtgcacaggggttactgacttgctggcggctggcgttcacgtggtctccattttcttcacagaaccctccctgtgaggtaaatggcacataggcagggcccaggtgggtctggaccagggcaatcgctctcctctgagtcagggaaacaaagctcccatacacactctgccacactcactgactcaggggttttctcattgttaattttgcttcattacaactccatttttaaagaaattggaagaattagaaaaagaagaagagctgagaacagctgctggagagtatgacagtgtatctgagagtgaagacgaagagatgctggaaatccgacagctggcaaagcaaattcgagagaaaaagaagttgaaaattctggagtccaaagaaaagaatacacagggacccaggatgccgcgaactgctaagaaggcaagtttgtgtctttccaaagcagtgtgatctagtttttgaaaattggattcctgtgtgatcattgctaaataacaacttttcaacccatttatggccataagattgcacattcttgttttattggtgtatggatttgcaagatcgctcacgtattgatcttttatattctttactgcgtcctttcttggtgactttcagcttcgagtttggcactactctagatccagtcattttgcagttgtacagattaaaactgtaacttatggttcacagacgttcaaggctatcagtgaacattttcctcttcttttttctctctctcttttttttaggggggagatggagtcttgctgtgtctcccaggctggagtgcaatggcgccatcttggctcactgcagcctccacctcgcgggttcaag

SEQ ID NO: 7126 - DNA, 1285 bp, Homo sapiens
gggtggctaatgagatttctgatgcctacgggggagggaagtgaggaagtctaacctgcagccctctttaaagaaacttataaaaatcagaaagggctttttccacaaagaaagacacttatcttctcaaaaatatttgcaaacattttcacaaccgtgctttagattgcgccgcagttcaaacgatctgggatgatgggcgtgagcgtcagtttgcggctttgttctgctgcttttctgttatgaacgttccctctaggtaattcagtctgttttgttgggcctcttggtaatgacgactaagtcagcttttctaaggaaaaagagttaaggtaatagatggtcaaagtgcagtgggcattttggaagcaacacatgagaaaatatttgaaaacggcacatgatcccctgcacagctccagcagcacagctccagcagcacagctccagcagcagtgcagtcagagcctctgggaaggagccactctgttcttaccctgcgaatggagcaggtgaagaatgtaactctagtagtttgtttcttataatactgttattaatgttagaagtggtgagagatttggaaaatgaaatttacgacaatactgttacttatgttagaaatggtgagaggcctggaaaatgaaatttactacaatacggttattaatgttagaaatggtgagagacttggaaagtgaaatttaccaccgcttattatggtgggaggttgtgtgtgtcctttaatttcactccctcctaaaatgttacaatgttatttaacatctgaatgacactttctgtaagcaaaagcatctcccatgttgtggaggcataattttcctggattgaataggatattagtgttcagaaagaaaagaggataatgatgggtttgaggttgaacaagtgcttttgcaattcctctgaccagttgcagtggaagttcttcctgttactggtgaaaatgttggcctcttcctcagccttttatatcactgtatccgaggagaataactcgagggtgcggacccaaatccatgtgacagtgggttgtgctttatggtcttaggaagaatgaatttagatgtgtttttcagggctatgccaaatcagtgtttgaaacaagttgtgtaatgccactgattttagttcttcacttagtttttttgttttattctgaaaagtctacattattctgatttacttaacagctggacagctgttttcttaccaaagaaaaatttaaaaagcaaactctgcagaaatcgttgtgttgaattag

SEQ ID NO: 7127 - DNA, 1148 bp, Homo sapiens
caaactgttggttaagtaagtggcttagtttgatgtgaaaggattgattgtgatttcatgttttattcatggaggtttaattgatagaaccccgggaacaatggtttaggctcctttgtcctctaatgcagtttcagtattccatgaaaacttaaactaacttagcctaaaaccaggttggatcagtgagatttgtgagaatgagaatgacccgtttgtggcagacatgcagggcttctcttgacttcttgtgaggattggtcttgtgtctgggtgggtctggttctaccattgagcagtgtgtgtgtgtgtgtgtgtgtgtgtgtgtgtgtgtattgtgtgtatgtgcatggggtctgtgtgatcttgtagctacgtgtgagtaacttggtctcttttgaataccgtaagcaggtggtacacgcagtgtgttcatgtagtcggccttgaaatgtgaataatatggaacctcctgcttcattatctgtcaactcaaaaacttacagtgtcactgtttcatgcacaacccacttttacctcttctttgcaggatcaatgtatgtgtcggccaaaaaatcatagccctcccccatgacaaccgacaagtgagactgtttgatatgtcaggagtgcgcctggcgcggcttccccggagcagccgacaggtaacagcacggtcggtgaacatatgcagggcacagtggaggaggacgggtagagatattttacattctcattttcttactaagtctttgcatgctaagttttccttggaaatgcttgagctgtatttagagttcataaaatttaaaattgaagaagtagagttgtacactcaagttattccacacctacttcagtgttttttttttttgagacagagttttgctcttgttgcccaggctggagtgcagtggcatgatctcacggcaacctctgtctcccaggttcaagcaattcttctgcctcagcctcagcctcaatctcccgagtagctgagattacaggcatgcgccaccacgcctggctaattttgttagtcaggctggttagttagtcaggctggtcttgaactcctgacctcaggtgatctgccctcctccgcctcccaaagtgctaggattacaggcgtgagccaccgtgcccag

SEQ ID NO: 7128 - DNA, 1191 bp, Homo sapiens
ccccggcgctcgcgcccactcacggtctccctcgcccccccgggagatgctcccggcgttctatcccgccccgccctggcgcgccccgcaaacgatgtgaccccggccccctgcggtctcccctcctccggacgctgcccctgccccacctgtggcgctcccgtcatctctagagcccccaaccagagtcctccagcccacccgcgaggctcgcgcacctgcgatgcggccccactagcagggacccgcccacctgtggcgctacccctgcctctgccgcctcccgcaccgctagcgcggcccccacctacgacgacccccgcgtagatgctcctgcccacacccgccccagccccggcccctgcccctagccgcgcccgcgccccctcccccgcagcccctcccatacgctcgggccccgcccgtcaccgcccattggcgctggggccgggcgggggcgcgggcggggcggcggttccgagtcaggcgcgcgcgggcagggtccccattgcctgctgcgcacccggacgtgcggctcccctcggcctcctcgccatggacgcggacgactcccgggcccccaagggctccttgcggaagttcctggagcacctctccggggccggcaaggccatcggcgtgctgaccagcggcggggatgctcaaggtgcgcgcccccctcccggcggcgagggagggacggacggacggagctggggagaaccgggcgaaggcgatggggtgaccggagagaagaggggggaagcgatgggggggacccggggaaaggtggcgaagcgatggggagaaccggggagaagagcggggaagcgatggggagaaccgggaagaagcccgcgcccggaagcggcaggggtacctgcggggcggcatgagccggcgaggcagccccggggtccttgcccggtggggcgggggaggaagggacatggcggtaggaacctccatccggaagatcagtgagttttccaccttcggttttgttttaaatggaacctggcagagggagtcgcctgaagcgccctcgggggtcgttctgcctctgagctgtaggacggggccgggcgtcccctccgaagcgtgggtacagcgcgatcacttcctaagtgcccccccgccccccaactccgccgcacgccaccccctagaatgtcgaggaagaaacggctg

SEQ ID NO: 7129 - DNA, 1142 bp, Homo sapiens
gtttatgaagaaagaaggaaatacagtcatccctcttagcctcagggactgtgtcccaagactgcagtgggtgtctgaacctggggatagtacccgccccctgtatacacgaggttgcttccatctgataaccaaggtggctactgagtgactcgggcaggaggcacagacagcatggagatgcagggcacagggatgattgacgttctgggtgggacagcaagagagcacgagatttcatcacgctactcagaatggtgtgcaatttaaaacttacatatttatttctggaattttccatttaatatttgtgggcctcagttgaccactggaccatgggtaacaaactgcagaaagcaaaaccgtgaactggagggactggtgttgatgtagaatcaccatagggttgggggatgcgggagtccagcctcccagggccatctccccaagcagggagccacgtgcccactgcacgctaaacaaagtgactccttctcgctcgtttcagaaatgagagctgcagtgaaaactacaccaccgacttcatttaccagctgtattcagaagagggcaaaggcgtgtttgactgcaggaagaacgtgctgggtcacatgcagcaggtaggcccgagactgcatgaggggccacaaagcccctgtcatgtgacttttaaaagattagtgtcttattttagccattgtggggaaaaatgtataagtaaattccaagatgataaaaaacatctgaactttttgagacagagtcttgctctgttgcccaggctggagtgcagtggtacaagcttggctcactgcaacctccaccttccaggttcaagtgattctcctgcatcagcctcccgaggagatggcagtataggcacccaccaccacacccagctaatttttgtatttttagtagagatggggtttcaccacgttggccaggctggtctcaaactcctgacctcagatgattcacccacctcagcctcccaaagtggtgggaatacaggcctgagccactgtgcccagccaaaacatctgaacttttaagtgatgccaaacatcaccagctttaggattcttttgttggtgaggtttgagtaatggggattttaagggaactgtcagctttcatga

SEQ ID NO: 7130 - DNA, 1183 bp, Homo sapiens
aggctaccttttccttgactgtctgaaaatttattttaatattttcttaatttcttttactcactttatttctttttttagtttttgttattttgagacagggtctgtctctggcactcgggctggagtgcagtggtgccattacaactagctgtagccgtgacctcctgggctcaagtgatcctccaatctcagcctcccaagtagctggggctacaggtgtgcaccaccatgcccagctaatttttaaaaattttttgttgagatgggagctcactacattgcccaggctggtctcagactcctggacccaagcaatcctcccacctcagcctccaaagtgctggcattataggcatgagccactctgcccagcctatttttattttttttaagcgtttattatttaaaacacttacacctgccctaacacttgttattagctgtgtgaattttataaactctgttacttcttatatatttcaagtgagttctggatttttctcttttctcttggaaacttgattttcagaaacctgtgcccagcagctctggtggagatgcccacgttccccatggctcccaggtcattaggaagctggtcatggtaagaaccacagcccatccgggttgccagcgggtgggtgcttccctgcatggctgtgtctgccactgatgttcgaatgttcctccgtccgcctgtctgtggggctggcgtgtccctagagttgcgagttcagtgcatcctttgtcactgccaccctgagccttttctctctcagacagtactgagtgaaggccctggtgggggtgtgtcctcctgtgccgaggagggccctggtatggggtgcgtcttccctgtgcccaggaagagggctactgctctgggtggtctcctcccgggcaactcacccttctttgaacgtagctcccgagctgagtcgatgccagtggagcggtctgacagatcctttccgcgactcagcctggtgctgatgctgtttggtttggttccttgtggagtagagtgatttaacacattcctatgatataatatgatatgaaatataaatatgtaactgtgatataaacggcgtagaatgaaatgtttttaattgaacagtatacgttaaggcatcacgtcaagattggaggacttcatgtcagttttacagtgagaaat

SEQ ID NO: 7131 - DNA, 1116 bp, Homo sapiens
aaaagaaaaacacccagcacaaagacagcttttccagggcctcagaatgtcatgctgttgtctcttacaggtcaggtcattaagtattagaattttttttttagatggagtctctccctgtcgcccaggctggagtgcagtgacgcgatctcggctcactgcaagctccacctcccgggttcacaccattctcctgcctcagcctccagagtagctgggactacaggaatttttaaaattttgtaaatctcagcagttctctgttttgatatttatcctgccataactcaaaagtttaaattttatttttaaaaaatgatgtaaaaatgacatggatgtacacagaaccagttacttgagaacactgctttaatgagcttttcagtggaggggctggagtttaaggcgcttcgttctgatctttaaatcaagcatattacgagggcatgatgaacgtgcccggattccagtgcatcatttctggttttgtcttctagatataatggctacacgagggaggcctactttagtgtcggcctccaagggattgcggagaaagacattgagaccgtcagaagcctcatagacagaacgattgatgaagtagttgagtgagtgtagcttgtttgtaacaatctgctttcgttcctcattcctgtgtgctttttgggagaagctgagcctgatccattgtttcggccttccttctctgtcatataacatgcttttgttcatatttagttgtttaaatattatctctgctaccttctgttactaaaactcttcaacatcttaggtttttgttttgttttgagacagggtctcgctttgtcacccagcctgctgtgcagtggcgtgatctcagctcactgcattttcctcccctaccaggctcaggtgatccttccacctcagcctcccaagtagctggaactagggtgcacaccaccatgcccagctaatttttgtgtagtagagatgggctttctctgtgttgcccaagctggtcttaaatgcctggcctcaagcagtcctcctgccttggcctcccaaagtgctgggattacaagcatgagccattgtgtctggcccatctttgttcttcattgtattctt

SEQ ID NO: 7132 - DNA, 1145 bp, Homo sapiens
ccagtccaagagctagtcctagaagacctgcaggatggagatgtgagaatgggaggctcctttcgaggagctttcagtaactcagagaaaggtaaaatgcaggccttcaataatttaaagaaatagaagctcagaactgaagtgaatttagttttgcctttaagaattctagagatgaaatggctccattgtcctatacttgttacatccattgagttgtccaggccttcccagctcgaacacccgcaggtgtatctaagaaataatgcataggcttaatgtattcacattgacataaataaattgccataaattgacagtcacgttaagattgtatgaccactttgtctagaataaacctttttttagcctgatttcttttttttttccaattttttttttcagctaaaaatatctttagaattcgcttccatgacccctctccagcccagtctcacactctgcaagccaatgacgtgttccacaagcagcagtggttcaactgtattcgagcggccattgcccccttccagtcggcaggcagtccacctgagctgcagggcctgccggagctgcacgaagagtgtgaggggaaccacccctctgcgaggaaactcacagcccagaggagggcatccacagtttccagtgttactcaggtagaagttgatgaaaacgcttacagatgtggctctggcatgcagatggcagaggacagcaagagcttaaagacacaccagacacagcccggcatccgaagagcgagggacaaagccctttctggtggcaaacggaaagagactttggtgtagagaaggctctgtgtgttaactgatgggagagactgtttgtttataaatgtgtacagttttgttttctcgtaaggggagcatcatagggttactttataccagttgtaacattttcattgtttttggttgttcttttttctttttttaatggcagctaaagatatacagattactgttaaattgcagtccttttttttttaaagatattttcttgaattatttagaacatggtaagcctggtattttttaatcaaacaaaatatttatgaaatgggttttctcttaattctggattcatcatggctttctaataccaattgtaatatttacaat

SEQ ID NO: 7133 - DNA, 1256 bp, Homo sapiens
tgcaaatgctggaattctgccagtgtttctttgctaagccttgcatgcaaaatttgaaattttaacattggcacccaaaacctacatggaatgtatgtctggagtatttcaaactttacattgaaacataatttccttggaaaacaaaccataagcctgaggaggtttttatcaactggaatgctttatattagtttgtttttcactgtacattcctcattttacattcatttaacctgccgattatttaatttttttattgtaaagtagtttttagcatttgcttttatttttttactttgatgccttttcaaattggcatgtctttaaagtatttttcttcctgattaaaaatgtgtgtgtatgtgtgtgtgtgtgtgtatatatatatatatttttaaatcacattaattttaccaagtgaaaccaagccatactgtttttgagccaattaagaaaattgccatttttaaagtgtagcatttcagggtaaagacccatgaaatggcttgatgtattctagactactgaaagaaaaccacttcaaagattttgttgaaagttttagtgttgtctgaaatgcaagagggaaggtgattggtagtgagttaaaagaaaaagagaggaaaagagagtagttttgtcttcaagtaaaatgtctggttgtgccagacatttcacaagtgtgaaaggagataggagaagctcaacttgagggcgtgtagtaagttgtagaaggctcgaggggacgtggacttatttgccttggtttgcaatacctgcaaataatgagtttgaaaagaaacaatgaaatgtgttaaaaatttgaccatattagataaattttcgtggatttagtcataagatggaaaaagactggtgaatcttttattacaaaatgtttctgttaaaatgggatcatcatctttgaaaggggggaggaggagtaaaagcccgattataatggtgatcaattcaagtcagtgttgactattctgtgaaatatatttggccagtggaaatgataatcagaaaagactgtaaatagatccatccaaatgatttctctgtacaaatgaatgatactattaaaaaaaaaaaaagcacacacataatcaccctgaaggtttcttgcctggtggctatgttgggggcatttggcaaaatatgctggtgtggcaaaggaggtagtggtaagcctcataaaagttagtaaaaattgtagttcaacctttgaaatcattgatgaatcagcg

SEQ ID NO: 7134 - DNA, 1708 bp, Homo sapiens
gattgtggctccatggtgggacgaatgtgagggcaaggcaggtagctgctggctgctctgtgggattcatctgtacctctcagttgacctcaggcagagccatggtcaggtgtgggaccagctcacctgactgaattctctctccctccagatttgttagcatcagtgacctcctggtaccaaaagacttgggaacagaaagccaggtgagtatggaagtgtgaaaggatatgggcaggtttcactggaagacatccctccatggtcttaagtcttcgtaatttttgttttcagatctttatttcccgcacatatgatgccaccactcattttgagacaacgtgtgatgacattaaaaacatctataagaggatgacaggatcagagtttgactttgaggaaatgaagcgcaagaagaatgacatctatggggaagactaacagcagtacatgttattatgtaattaggacacatttaaaatttggcaaataatgcatataatgaaatcaatattgtaaggcctgcttttgtaatgaaaatggagagaatgaagagcgctgtgccagtaaatactccccttcacctttctaattattaacttgttttcatggagtggctattcagcattggcagttaccacattctgttcaatttaaccaaactggctttttttttttctagtgaagttaaacaaacattgggataccgacacagacaacttgagacagtttttttaatcttttaatcagtgtagctatgtgctgctgctgctcaagagctggatccatacaggttgtgtgtcatctgtcctcttgaggttcaggagattctaaattgaatattccacggtttgggacagcatccggaagttttccctatgactttatattttgtattatgtcaaatgttatggcagggcccaaatagcatagccacaagtttggtttatgtgggcataaaattctaaccaaaccccagacatagggagtcatttggagaaagcctgtatgtggtgttttaacctaataaagttgatgagagagaaggggagaggaagcgaacataaagcgggtcaagtgtagtgcatcttttgtatctcaggcgtggcttcttcagtggaccaagctgcaatgcagtattgacttgacagagcctctacttctgtctcaaaatggctccaaatgatttctgtactgcaaaataaagccaaattctggaaactactgcccggtgttggtttgtgtgtcctgattgcaagggtcacagctgccgtgcttcctttggtagcactggagtcaatgccagtcagaatgctcagcagcggaaagcgtgggtgtcttctgatctggaaggatcacagcaggtcctgtcgtctggcttccctgtgagtagacctcgagttttattcttgacacagtaccattactagacctatcatctttgtgcagaaaaaatagtgtttaatgattttgcttgtagcagcagttataagggagtaagtgaactgtcaggtagagtaggtgctttagtaaataatttttgtgtagttgaaatgataaagtgtttacatataaggccctttcccctgacagtgatgagcctcacggcagatgctgttgtttaccacagataaacactgactcttcagagtatgaaggagacagactaaggtagatgatgtgttaaaggaactagggtggtgattta

SEQ ID NO: 7135 - DNA, 1122 bp, Homo sapiens
tttcttttttttttttttttgaggcagagtcttgctctgtcacccaggctggcgtgcagtgctcactgcaaccgccacctcctgggttcaagcgattttcctgcctcagcctcccgagtagctgggattacaggcatgcaccaccacgcccggctaattttttaatttttattagagatggggtttcaccatgttggtcaggctagtctcacactcttgacctcatgatctgcctacctcagcctcccagagtgctgggattacaggcatgagccaccacgcccagcctagataaatttcttaaatcctctctaactggttttgttatctttaaaactattttcaacccaatcaggttagaaacaaaaatattttgatctagtataggtgaagttgtgaagatggattacggaagatattgaaagaattgatatttttattgggcactatcaactcatgaggtcagtattgctccagggattgtgttttaagtccatgtgatttttgtcacccctcagccctgcatctggcctgtgcaggtcagcacttggcctgtgccaagtttctcctgcagtcgggactgaaggattctgaagacatcacgggcaccctggctcagcagctcccaaggagagcagatgtccttcagggctctggccatagcgcaatgacataaggatgtttccaagaggaggcaataaagtgcatggtaattcatatcctgcttcttaagtcagtcacagattcagcgaaaccagttggaagccagttttccatctcctccacttcctcccttccctcatcctgcatgttccactcctgctgaggagttcccagtgatcagggggctgagttcccagctccatgacaggcacattatggagtcccaagcacagtcataatcttcccgtagtccatatttcactctttgtactcttaaagtagaatagataacgtttgcgcgatcaggctgtgggatccttagagaagcatgtaccatgcatgaatataatatagcatacacactttcacaaacatatgaaatatcttatagtaactgctgcatggtaaggctgtgataataataacaaaaatatcacatacgttgctattagcttgagc

SEQ ID NO: 7136 - DNA, 1195 bp, Homo sapiens
aattgaaactagtctctgggagtggggctcaggcatctggatggtcttaaagcgtcctactgactttcatctaactagggttgaagccaccgctccagtgcgtagcccctaacctcggacacctttgtgggccatgagctgatgagatagtgaggtcggggtctagacaggtgcacccaagttactgcaggagtcaaaagatggccagattgtatctccttagaacatacagaacatctttccggcaagaatattcattcaagaagattttaaagggtgaataacatttcagtaagatataaaaaagacgtttgaggagatagaaatagcaaaaggaaagttagaatcaggaaagtagcgtcctccctctgtggttttaaaaaaagtcgtataaaggctgtaaaattgatttggtgtttttctctccttgtggtaaaccaaaaagtaggttaaatttgttcaagataaataattgatacaagtgaggtttcagagtgttttctatagtattttggtgagcctactttatttttctccaatagtaccccgagattttccttatgaagaggactcaagacctcgatcacagtcttccaaagcagccattcctcccccagtgtacgaggaacaagacagaccgagatctccaaccggacctagcaactccttcctcgctaacatggggtaatgatttaatgttcttatctaaggacttgagagacagtgtgaagcgttgatagccctttcaatagatgcagcttgtttgaaactgaggacattcaggacccttggtgtgtgcaggtcacacggtacctgcctcaatcgtgtggagcgtgttccagtgtaatgatggggcttgttcaaaacagcaacctcccagtagaagttttgactcattttgatgttgaacattattttcctagacaggcacagaacctgattaatgtttacatttgccttcataacgtttgcaaataaaatagctcatatgaatcagagctgacttactgtctccaaagggcaggtgataccttttttttcctgataaagtgggccatttgctttcaggtcatggttctaaacctttggtctaaaaaactcggggtcattctaactacaagttgacatgtttgccagcatataaaatttgactgtaaggctgacgctcaggtggggcttggggatttttttaaac

SEQ ID NO: 7137 - DNA, 1461 bp, Homo sapiens
agaaagaataagaagggtctggtcccagttctgactcggccattcttacagctctttctggctttgagtttgcttgtggaatttcctgggcagttgtgttaaatccgccaggtcacgtgcagacaaagctgtggctgcgagagttggctggcctcttggaccagaagccatctccatatcctcatgagcgattccatatctccactcagaccctgtggactacagtgttccgctgtggtggctgccaagatgccttcttaaacttatgcaaggaaaccaaaccctcccacagttcccaagcagacactggaagcagaggcttctcacccttcctgctttttcaccacaatcaccttgagctcgtcccttggactagagtctccacagttccagtaaaattctgcggtgggctgatgagctgcttgcatttctgtgacatttccagatatgattctcagtgggattttggaaactttgattgctcaagctcacccttcttaacattctgtaatggttacagatgagaatggaaaacacatattttatggatgaggcgttttggtctcccctgcagtcgatttctagaatcaagttttagagttcggctgatgcatctgcctggggacctcagatgggaggagtgtgtcagttgtaccccgacagaaatgtctctgggatctgtggctggcttgccccgggcatctctcctttaagctcaagttttgaactctctgcggttttccacccctgccttctcagccacatgcttttggccttaaacgctcagtcttgtggagttcaactctgtcaaacgattggaaagggcatccatttccagatctttggcattttccccgcgctgactctttgatgatccttcactgtggccttttcaagctcagctgttcctgttgtatttgagacgagggtgagggaatgtggtggccacaaaagaacagggacttgcagcacaaatgtcacttctgtctcccttttcagtggtagcacggaggaggaggtgctgcgttggagggaggggatcctccaggagctctctggagcccatctaggaagctagagtgtgtggcccgccaggagctcaggaaggatacagccactgtcgcaggggaaagtgtttgcttcccgtggagccaagcgcccaagactctccgtatccttcaccctgacagtttaacttcagcgtttctctgtgcagttgcggtcaccatgggtgagcactgtctgtgcacgtgccagggaggagatggctgggaccactgcacaggagggcgcagcctggcgtcgccatgaaagttgtctctgtgccatctctccggtccttgaggagagcccagaaagattttaggacccaggaggtgcttttcctccagctgttgccagtgtccttctgagcctggattctccggggatttccgtcgtggtggatggacttcacatcag

SEQ ID NO: 7138 - DNA, 1202 bp, Homo sapiens
atcgagaccatcctggctaacatggtgaaaccctgtctctactaaaaatacaaaaaattagccaggcatgatggcaggtgcctgtagtcccagctactcaggaggctgagttaggagaatggcgtgaacccgggaggcggaactggcagtgagccgagatcacgccactgcactccagtctgggcatcagagccagactctgtctcaaaaacaaaaaaaaaaaagaaggaagggtgcatatggaactggaaagagaatgaattcatactctcactcgtttaacaaatagtattaggcacctactatgtgctaggcatagttctaatttctgggaaacaaaaatgaagaccacctggttctttcttcatgaacagtgggaaggacaaacacatacgtgagcctgtcttgtcgatgtaagatgcgtgtgcgtgcatttctttctctttcttcatctgcccagctttgtcctgctgcgtcagcactggctcagtgttggtctcgtttctcttgcagacatcattcagtcgaggtttcacaaagaacatgaaacttgaagctgtgaaccccaggaatccaggagaactgtgtgtggcctccgttgtgagtgtgaaggggcggctaatgtggcttcacctggaaggtacgtactcgctgggggtagcagtcgctggggggaatgtagagtttgtcgaaatggcaacgtgtggaggaaagcagcccttctcagaaggggccttacttctctttcatttaaacagatcttaaattattccgtgttcttaaatcagtgaaactaatcaaacataaatgtagtcagaggctctcatcttaactaataatttcatgcaatgagatgctggcaagataattatgtttggaacacagtggtctttttacatctatgattagaaaagcaaatgtcacaattaaattaatgtgagtcactaaaactgagattccaggtctcggttattatcaggacaaaattgtacatttgtattttaatgtggttatatcctttactttgatttctttcgtagttgtttaattcttcctcaaaatagtacctggaggatgactttctccccaaatgtctaataaacagaatttaggcttgtttgttcagtgatgttgaaactatcctttatagctatagcgtatttacaggtgcaagaaaattcacagaatgctgtattttgtga

SEQ ID NO: 7139 - DNA, 1184 bp, Homo sapiens
cacataatcaaagtatgagagcattttggtcattagagtagcggccagtagagtaagatgaatgtctgggaaaccgtcatggtgtaaattgaatgctctgtattagaattatctgtctgttggaaaagtagaccgtttgctaccacgttttctaggtccaggcaaatttgggtagaactcttcttaaaagcatactgattgttaacaaaagcaattttatctgggaagggtgatttgtttggtgagaacttagcacaaactgttattttctattgacttgtgatttttttgttgttggatacggaatggggtacatggatgtgtgggagggaggaaagggaaggggtggggcatgggctgggcaaggatggggtggagggaacgccagactgttcgccagtaccttggatgatggtgtgaaaaaatattatcttctgctgtcatctgtttccatgagaaccttaaaataaagtttaaaataaggagttttgcttctgtttaaacagcctctgcgagggaaaggccctatagacctcattacagttggttccttaatagaacttcaggattcccagaacccttttcagtactggatagttagtgtgattgaaaatgttggaggaagattacgccttcgctatgtgggattggaggacactgaatcctatgaccagtggttgttttacttggattacagacttcgaccagttggttggtgtcaagagaataaatacagaatggacccaccttcaggtaagggccaaagcttttgctgctgtaaagtattttagaaaaagatgtgatattttcctggatgtgtttctagaaaatgtatgagctttctggtatcttttatatctgagtatgtgaatattaagcactttaacttcacaatgctttccatagagactaaaacctaagacctcaatcaatagtgttctcaaaggagaaagcaatgttagaggccttagggaaattgatctagttccttgggaatcactggttcagaaaggaaagacacagtagattgagacttgaggatattctccacgtttttctttaggaattttgatagtcttgtaagtaggttccgaaatctctggccatctgtgtacccatctctcagtctgtccattcaccaatccatccacctactcatccacccatctatccatttatctatt

SEQ ID NO: 7140 - DNA, 1225 bp, Homo sapiens
caaccatccgtttttctttttttgaatatttctcacccacggttggttgaattcacatacagtatctaaatttcattaaatataaatatggaaaatcccatttgctgcatgaatttgtgtatttgaatgtgttttagtgtatttggtgttttgttttgttttgtttttgagactgagtctcgctctgttgccaggctgaagtgcagtggtaggatcttggctcactgcaacctctgcctcctgggttcaagtgattctcctgcctcagcctcctgagtagctgggattacaggtgtgcaccaccacgcccagctaatttttgtatttttagtagagatgggattcaccatgttggccaggctggtcttgagctcctgacctcaagtgatccacctgtgttggcctcctaaagtgctgagattacaggtgtaagccactgcgctcggcctgatttgtgtgtgtttgaatgaataaatatgcagaggtgaaacacattcatatttatgttttgctttgattgtatgctaatttatggcagtggctgtttttttaaggcttgtgcaaagtggacgagacaccaaaaggctggtatattcagtacatagacagggacccagaaactatccgccggcaactggaactggagaaaaagaaaaagcaggaccttgatgatgaagaaaaaactgccaaatttattgaagagcaagtgagaagaggcctggaagggaaggaacaggtgggtaagcaacatcatcctgagaagcaacgtccagaggtctaaagaagcacaatggcttggtttttcttttttgtttttgttgttgttgttgttttggagatggagtcttgctctgccgcccaggctggagtgcagtagcgcaatctcagctcactgcaacctctgccacccaggttcaagcagttctcctgcctcagcctcctgagtacctggaactacaggcgcccgccaccacgcccagataatttttgtattgttagtagagacagggtttcaccatgttggtcaggccggtctccaactcctgacctcgtgatccggccgcctcggcctcccaaagttacaggattacaggcgtgagccaccgtgcccagccagcttgtgtcttttcagcgttgaatcaagttctgtgggcactgttcctgaactaagaggagaaccagcctggtgtcaaaagcacatttttggcattgacaaaccttggtt

SEQ ID NO: 7141 - DNA, 1108 bp, Homo sapiens
ctaatttttgtatttttagtagagacggggtttcaccatggtgtccaggctgatcgcaaactcctgacctcaggtgatccacccatcttggcttcccaaagtgctgggattacaggcatgagccactgtgcccagcctatatttctaataaaattgttttcactatctttttattcatagttctatgcattcttcattaaatggcttaacaatataaaggttccattggagccagatgttaactggtactagctattcttcctgatatactgagggttaaagtaaaaaatatttctcagatttaatggcattattacattttaacacttctctagtgtacagtcctaattatgtctgacatacacaattgggaatagttagaaggaaatcattctggaccaatcagtaatggaatgaaaaactcaggaagtcccaatgccatggtaaaggagaaaaactcctttttcatttcctttcatgtacagtgtgttcagattaactttaaaggagagtgagatgtaggtcttaagattttgtctgcaattgagtattacctgtatatggagcccatctcagcaggcacccagtcatcagccagcaaccccttccaggtccctcgacctggtccctcgacagctgctagatatcctgttgcaaattaaatatgaagcagggatggacttaattttgcatttaaaggatttcttaaagttcagcctcaaatgaagttgttagtgttttcatttttattgaagctggctttgttggaaaggaaggggcagctagaattgtcctcagtggtattaaagaaaaatgctctggaaaaaataaagtttatgcctaaagtttggcataaactttatgccaatatgcctttatatatctatatgccacatttcataactcttcttataaatactgcacagttgtcaggcctgccaaaatggtatgtagcctactgtgtcagtacagcctgttagtaaacatatgtttatagtttaactgtttcccagtagggtgtttttgagactttcctttttcagctttgtctttctgaatggtagtaacaaagggaaataaaacatggtgagtttatatcacactttga

SEQ ID NO: 7142 - DNA, 1192 bp, Homo sapiens
ggggacacgctagatgttgtgttattggaagctcgagagccactcagctcaataaatactcaaaagatcccaccaatgctttctccagtccatgtacaggacagtacagacttggcacctccctcacccgagccgccaatgttggctccagttgcaaaatcacaaatgccaactgcaaaaccattagaaacaaagtcatttacacctaaaacaaagactaaaactagctctccaggacagaagactaaatcacctaaaaccgcccagtcaccagcaatggtcggaagtcctattcgatcaccaaaaactgtatccaaagaaaagaaatcacctggacgttccaagagccccaagagtcccaagagccccaaggtcacgactcacattccccaaacacctgtgagacctgaaacgcccaacaggactccttcagctacactcagtgaaaaaatcagtaaagagactatccaggtaaaacaaatacagacaccccctgatgctgggaaactgaacagtgagaatcagccgaaaaaggctgtggtagcagataaaacgattgaggcctctatcgatgctgtgattgcacgagcctgtgctgagcgagagccagatcctttcgaattttcttctggatcggaatctgaaggagacatttttactagccctaagagaatttcaggcccggagtgtactactcccaaagcttccacttccgcgaacaatttcacaaagtcaggatccactcctctgcctctttccggtggaacctcaagttccgataactcatggacaatggatgcctccattgatgaggttgtacgtaaagcaaaactgggaacaccttcaaatatgccccccaactttccttatatctcttctccgtcagtgtctcctcccactcccgaacctctccacaaggtgtatgaggagaaaaccaagctgccttcctccgtggaggtaaagaagaagttgaaaaaggaactaaagactaaaatgaaaaagaaagaaaagcagagagatagggagagggaaaaagacaagaacaaggacaaaagtaaggagaaggataaagtgaaagagaaagagaaagacaaggaaactggcagggaaacaaagtatccctggaaggaatttcttaaagaggaagaggcagatccctacaagtttaaaatcaaagaatttgaagatgttg

SEQ ID NO: 7143 - DNA, 1744 bp, Homo sapiens
tactgtttcaatgtacaggagaaaggttactgtaaactgtgttatgttggtgcttctgtgaattaagttgtggtttcatcatgagtcttaatgttctttgttgataagacaagtttagaattggtttacttaatacaaaaaaaaaaaaaagaatttcaaaaaaaaaagttgtttgcttaaaaaaaatttcatgtgagggaaaaaaaaaaaacctattccagaataagttttgtgttggcttgtgaagcattgatgtcattttttttaattgtggactatttagatgtgtttgtgttcagcaaaatgtgatgtttttttcttttaaagaaaaaaagtgaaaatatatagtgccaaattccaaaggtacttccttcctagagcttcagtgtgtttcttgtgagaagtaatttgataacatgggtattttattatgtgttttgtataaatccctaatatttaaaaaaaaaaacaaaacaaaaaaaggttacaaagtttgttaacttgctatcctgtggtcttgttgcctgaaattgttattgtttgttatttctctctgatgttttttgtaagacattgtataagtgcccatgtcccacttttttaaccactccgcacatcagtgctgtgaaggcaacctcaccatgtattttcttcataatctatggaaacctctaaggtgagaaagttttgaacttttaaccctttctacccagagctatctggaatgttgatgactttttatactgtcatgatttgagtttgttttggggtgtttccaatttggatttttttccctgcatctatcctctaagttgtttcggtttgactactttgttctttggttaagatccaaaagaaaacagaaaacaattccacgaggccaatctaaagggaaaaaatcctacactacttttactacttttgattatttctcatttttgggaaaagaattcctaatgtgctactagaattccttcttcagttttaacgagtaattggataaaccctgagggaaaacggaggtagattcagcacctaacaatcctgtatgcttttgagatcacgtttagtgctatgtcctagtctagaatattttcatataccttgcagtaaaacgactttgtggcaggacagtctcttgaggggttttgtttctgtttcctaaatactcctaaataatatttctaatcagccattatgctggggcatctctgatcccagtaggtacctctgaatataccaggtgtctggagttagaagcccatagccctttcccagcctttttggtttttttaattgaacacatttcatctaagtaaagctcagttctttatcacaatttactgaccaaatacctagcaccagttcctgctgccactttttaaagtgccatatgactttctacgaacaggtaccttgctgtcttgacaaatcctaatgtcacgcctacagccccaacacaagctccagtcttcctcttcggcatgccctggaagcttcttccagtcttcctcttcggcatgccctggaagcttcttggcctcagctccccttccccgctcagcaccctgttaggatcagtgtgtgtggatgggatagccctgggatggaaaggactagcctctactgatgcaaaaaaacaaaaagcaacacaaacgtttccttcttatagcacatgcacttccttacaatgacatgatttgtattatcctcacatgtgtttactactgctggggccttcctt

SEQ ID NO: 7144 - DNA, 1126 bp, Homo sapiens
agggaaaggagcctccgaaggactcgcaggggcagtcgcagctgatgtttgagtgccctgggatgggagtcagactggctgaggtttcaattttgcattcatggccagccaccgttccaggtcctgttgagatcatcatgtaacaggacaacaaagtccctgtcctcatggggcttatattctgatccatttcctcatctatgaaatgaagattgtagtttttatttcatagagtcatgaagattgagttaatctctgaaatatccacacagtgttgtcactcaggaatgatttggaatgttagggatagtcacccaccaccacagtgctaggtttcagtgaccaggagcgatgtggagctgagtctagtgggagtccagaggtaaagacacagtaaggtcacatgtgacccaggagggaggaggcacaggcagggcaatctgaggagactgtgccatggctggaggagcaggggctccaggaaggaggcagcatctgcactggaaatgcagcaggagggcccagtgagggaggcctggaaagtccacttggacttgacaatgaggagctctctgctgtcacctgctgtgattcctagagtcagaatcagactgcagtggccacaggcacaagtgggaagtgatgcagctcaaaggtttggatgagatgggatgtgcagcgattgagtcgtagctggagcgaaggatgtgctaagttagggattggaggggcgtgcatttacatgggaaagtaatgctaattagaaatcagttggacttcaacattctcaagtacttccacaaagcatcccttggttttattccagtttgttgctttacgtatttgtaagtattaaacaccaattactaaattatctgtaattcagatttgtcatttggaggaaaatcaacataatctgaatataaagcaggcagcattgagaaacttctacgtatgtgaacatcattgacttcgtcgagcagtgatttaaagtctgctccacatgtagtaaacaaagaggagatgtgatttagaaatagcatatgtggggccaagcacagcggctcatgcctgtaatcccagaactttgggaggctgaggctggtggaccacctcaggccaggag

SEQ ID NO: 7145 - DNA, 1253 bp, Homo sapiens
actgccgtctagtcgaatagaagtcctccctgttgacactggtgctgggggatattcgggcaattcagggtcaccaaagaatggaaaattgatcattccaccagtggattacttgccagataacagaacatggtcagaagttagttatacatacagacctgagacgcagggacaatcatggacccgagatgctagccgtggcaatttaccaaaatactcagcctttcaactcgcaccctttcaggaccatggcctccctgcagtttctgtagatagtcccgtgagatataaagcttcaccggccgcagaagatgccagtccatctggatatccatattcagggcccccgcctccagcctaccactacaggaatcgggacgggctttccatccaagagtcagtgttgctgtgagatttgacgtgtacttgctaaagacgagagagaaaccacgtgaaacctacattgctatgttcataattgccaaagcagtatttatactattgtaaacaactcgcacatctctcctgtctgttagtagtaagaatacagggaaatgtcttcagccccacgtagatgctgcttaagatgagcgtttcaattgcatcatcactgacctgttagaatttaacccggaaacatcgcaatagcatttagggatgcacgcacagtggtaatttattactcagttccggttatgtttttctccaaaacctgaacatttttactctgttggctcattctattttgactaatgttacaaagtactgaaaaaactgtagaatagatatttttaaggctatatgtagtgtatgtgtcttttaatagatataggcatctgttcatccacatttgaacacagagctaaagaaacgttttttaaaaaactacttttaatccagatccatggaataatatgtaattcttgttttccttgtcttttagtccagtttttctttttccctctcatatatttgtaacctgggtcctaaactgactgaagagtttgtcctgactttattaattgcagtctcacagaatgctcatcattctccttcagctgttgccattttctttcaatctgaaaattaaagacattggagagaaaggctaaccacttaatggtgcttaaaaatcggggcacttaaaataagtttacggccaaaggtgcagcagtgcttatcacatccacatactaagagattggtcttagtgcgtttgtgccctttgttctggtctgactcttgcgaatctc

SEQ ID NO: 7146 - DNA, 1124 bp, Homo sapiens
attgtttgggtttttttcccccgaatatttttggtccatggatgtggaacccgcagatgccagggccacctgtaacttgggggagtgacttggtggtggtgggtagcgttgcagacgccatcttgctggactttgtcctgtggcagtaagctctctgatgtgaccctgtttgttcctttaggagacgttgatccagcagcacgtgtcatttcattaggtcctgtatctgatgttgtggttagtggagtcctccagcaattgaatgagagcagtggacacatctcagcaggtcggtctagagagttgcgaatctaaacctgggacaggctggggccaggaggcagaaacaccagcctctgccaacaccggaacaagccgacgcttccagacaaggcggaaaaggccttttgtaatggaaatctcgcgagggttaatcttctcttgagaatggcagtcaagaaatgagatggttcacttgactactgagcagttacaccaaggagagcgtgaaggagatgattgagccagagaagaaacgggttgtgatggtaatggtgtgggggaaatgaacttgagctttaaacttgatttgagtttcagtgtctctgaattgaacatcccacgttggaagaagatacatttgggggctccaggactacagtagaaaagtatagagcaagcaggaaaatcttctagtaaaacttacatgcaggacaacaaaatgatgaaagatatccaaataccagataatccaccaggaaggcttttgtttaggaatttgtttcaagaggaacaagggatgagggagaaaaatccgttttatccatcagagtcagtgctataaaattgcctattaaggtaaaagaaaaatgtggagactattttactatacagagagcattaattcagatggcttagaaaagtgataccagcccaagaacagggatctaggtgagcccattgtaagtatcattgaaaacaaaacatgcccgtcaacatgtcacagaaaacgaacgaaggacaacaagaagtggatgagaatattttgttgaccttcatgggtttacagcctctgtctctaaacaaagtatggaaacaagtagagcttttattttgcttttgtt

SEQ ID NO: 7147 - DNA, 1201 bp, Homo sapiens
taatttttagattttcagtagagacggggtttcaccatgttggccaagtctcaaactcctggcctcaagtgatccacctgccttggcctcccgaagtgctgggattacagacgtgaaccaccatgcctggcctggtcttacttcttaagaactaaagatacttaagttcagaacttaatctgagatgatcaaaagatgacatgtggaagacaggctcagtacaaatgaatggaactgaacctctgctggggctgtgaccaggactctggaatgtcaagatggcaagaagccccttcctaatagtttgggtagttggatagtttgcagccttgattcataccgtagagccccgtgtgaaaactggggtactgggaagaggcagcagaaatctaaggcctggattccagtccagaagaacacacattctaagggggtttccttggggtgagttattctgccgctcaggttattctcctcagcccctcctactgtcccggatcctaggaaaaccatcccgctgtgtccgtgttatgtctctctccgggatatgtagtaaagtggcattgctgtggccacttggggagtgtggggccatctcacaacacacacagacttatctgccttccactggagaagctggctgtctcctggcagctcacgtctgacatgatgttctgcaggagtttgaccactttctggccaccaagttctcgacagtgaagcgatatggaggcgaaggggctgaaagcatgatgggctttttccacgagctgctgaaaatgtcggcctacagcgggatcactgatgtcattattgggatgccccatagagggaggctgaatttattgacaggccttctgcagttccctccagaggtaaggttactcgctgtgtttctcagtagcactatatgattgattgtaacagaataaaactgctggtttcattctggtgataaatgatggtgatggtgatggccgggcactgtggctcacacctgcaatcccagcctgttgggaggatgaggcaggaggatggcttgaatctaggagtttgagaccaccctgtggaacaaagtgagactttgtctctaccaaaaataaaataagttagccaagcatggtggcacgcacccgtgttcccagctactcaggagactgaggccagaggatcacttgagcccaggagtttgaggctgcag

SEQ ID NO: 7148 - DNA, 1244 bp, Homo sapiens
ggtatttggattggttttccatgtatacttacttatttatttattgagacctaatctcgctctgtcacccaggctggagtgcagtggcgtgatctcggctcactgcaacctccgcctcccaggttcaagtgattcttatgcctcagcctctctactagctgggattacaggtacctgccaccacacccaactaattttttgtatttttaatagagacggggtttcaccatgttggccaggctggtcccgaactcctgacctcaagtgatcttcccgtctcagcctcccaaagtgctggaattacaggcataagccaccactcctggctttaaattttcttttttgttgtatgatttcaactcagcacttcttccctagactccattgtgatgaatgccatttttttccttttgaatgtatccacaatagctgatgttccgtaaaatgcgaggcttaagtgaatttccagagaatttctcagccactggagacgtcctgtctcacctgacctcctctgtggacctgtactttggggcgcaccatcccctccatgtgacaatgttgcccaatccctcgcacctggaggccgtcaaccccgtggccgtgggcaaaactcgcggcaggcagcagtctcgccaagacggcgattactctccagacaactcagcccagccgggggacagggtcatttgcttacaggtacttggagcttctgaaattgaggccagaggtggggaaaactgggaagaatgtgtgggttgggagggctgaaagcacatggcagacattcatgatgaaactgagatgaccttttggaaaaagattctgggattgttttaaaaactaacaggagattcatgaggtttagtcttcaggcaactggctttagcctggggcttccacttctgttttccttgcatggcttatgaattaacttggggtttgggctggcaaacctgctccttcttagagcacagatgtcattatctctctggaagtatggccttcttggaaactttgtggttcccatacatataacaagacaagcgtgaaaaaaaaaaagactttaagtgtggttttacttcgtttcttgtttactttattatcttttcttttttatggctttttttttgagaccgagtctcactctgtcactcaggctggagtgcagtggcgaaatctcagctcactgcaacctctgcctcctgggttcaagtgattctcctgcctcagcctcccgagta

SEQ ID NO: 7149 - DNA, 1239 bp, Homo sapiens
gtatctaccttgctgtgttaaatcatgacagtgagacggtgagatggattcgttttgcacacaacattcaaaacacttcatattgcccccacttgttgaaaaataaatgtagttcaaattgccactttccagtatttttgagcttatttaatgagttctggaacatttatatctaatctatattttagataattactttttatacttttttaactcatggtatccccactccccacccccacctcatttttatttgtcccttctcaaagcagccacttagcccacatgggcgaaatcaagtctccagttatttctgccacaactgcttctaaggcctcctccttctcctcctcctcttcctcttcctccttttccttctcctcctcctctcttcccagtgacagcatcatcgtgctgtttgcctgtattggctatgccttctaactccaaccagtcacttgagaatattctttcaagattctgggccccgattcttttctgtttaaatccctaaagcaaagatctaattctcaagcaatgtctgtagttcagtgggggtgaacaatgaatatattcatgctaggaatttgtgtctgttgttgtactcacagcagcaacatgagtgtaaacagtagacaataaacttttatttaagaaaactgattcagttgtgttggaaaaaataaagaaatctgatattaaacgttttctaagatcatttgtataggttcagtgtattcataagaagtccaccctgagatgcctgtaaaagtcaaatgtaattacacttcaaactttaatcctaaattattgacagatagatagatagtgaccaacttaagggtaatcatatatgtgactaacatttgggaggaaacaggaaaacagtggtctcaaaacaacaatatcccagtctccatttgaaagagcatagatcttggtaaatcattttgaaaactatgtgctttatttcccaaaagatcaaacttaatttttaaaagacacccttttcagaagtatgggttttcattgctgtttagtttcttaggtgtggtatgtcttacgtagcttatgcttacaaagccaaataatcgcagggcaaggcagataaaggcaggcaggatagtgacagtggctcggtgagcatccgccaagggcctcagaccactgttaccataaaaacatccacccagtgttatgacgtccgatttttttttcccttaagaaggtggaaatatg

SEQ ID NO: 7150 - DNA, 1152 bp, Homo sapiens
ctgagactgcaacagggaaagcaagccgaccacatggggctaatattgacagttcccataatagatggaccggagcgagcatactttgtttgactttgcctcagttgttttctttttccgagccgaattaacagcacacacctggaggaacacagtggggatggtgttgtctttccctcacgagcaggagaggtttggattgactgcccaggccagctcagaagaggaaattctgaaaggggatccgtctttgtcatattccctgaatcaagtgtttctggctgcagctgcctagccaggtgttttgctggctttattgcctggccttttatttttctgcctcttgaccaacaagaggccttcctgaatgtgctccacaagatgtgtcaggatggggagtgaggacacagccaccctggacgcgggcagccctggggaaggcatgatgacaggcttttgagttctttggacaggccataaatgaatcgtgtgggtctttggggagcaaagcaacactgttgtaaatctgtgggctttgtcagcctttcagtgctgaacctgtagttggtcaagtcatacaatgtgcagtgggcctataaagtaaggcctgttatgaatatgtgagcttcttgagggcagagcctttgactttataaaaagtacttaattaggccgggcgtggtgattcatgcctgtaatcccagcactttggaggccgaggcagtcagattgcttgagtccaggagttcgagaccagcctgggcaacatggtgaaactacgtctctacaaaaatccaaaaaaagaaaaattaaaaaatgagccaggtgtggtggcatgcatctgtagccccagctactcgggaggctgaggtgggaggatcacttgagcccgggaggtggaggcttcagtgggccgtgatcatgccactatactccattctgggtgacagagggagcccctgtctaaaacaaaagcgaaatcaaaaacgatgtgatcagtgtttgctgaactgatggtgcattatccagtgtttagagtgaattcaaaactcaaaagtagggaaagtgcaagtgatggatgtggctgtatctctacattcatctgtgttcacttcaaacatttatgcctctctgttcgcttgactgcagcgg

SEQ ID NO: 7151 - DNA, 1353 bp, Homo sapiens
gctgggcatggtggtgcgtgcctgtaatcccagctactcgggaggctgaggcaggagaatcgcttgaacccgggaggcagaggttgcagtgagccgagatcgtgccactgcactccagcctgggtgacagagcaagactccgtctcaaaaaagatggccatgctggccaaggctgggctcataggaaatatctgtagtaggatgaaaggaatctggcctagggagccccggactcggtttacctaccccgtactcatcccactcatctgtctaccctagtgtccatcatgccctggatgaatcgtaggtgggagggacagaagccgagaacaccaggcacacggggtggggggaatggggggagcccaggtgatcccctttggaaagtggattgatcctctcccctgtggaatgacagcttaacctgattaacccactggggcttgctattttatgagcatttttaaacagaaaggaaagatgatatcccagtgcaggtagactttatttttgaaagcatcgtggcccctcacctctccctctcccccagaaccttggccagaattgagtcttcgcgttggggaggccacgctggaaccattgctctagggctgaaggtggaagtagggccactgccgcagcttcagccagagccctcgctgcttcgcagaatttaacaagcacacgactgggattcctttggatatgagaaaggaaggcaagtgcgggcaaagggaagctcctcccgtttttcataaacagaagtaagatgtcctctttcccaggtttgcacaatcacttctggcaaattaattgaaggtccttgaattcagccagtgcacgaaacctttgcatgttcttctgaaactgtacttcttccctattctgtctacccacactctgcgaactttgccttttccttaaacacattccagaccaaacactgttcagtttgttaaaaaaaaaaaaaaaaaaaaaagatgtatatacctgtatgtgatccaccacccttttgaggggcacctggtcctcggttggggctgcaggtgtgcctgacatttgcaaaagatattccagtctttcgatgttcagaattgaaaatgtggagatagaaaagctcaaacagactcctaaaaggagggtttctttcctgaagactccaagaaaatgagtgtgcagatgagttagcttgacaacctcaactctggggagcaggcaggcggtctgaggaagataagggcccacgccccactcacctggcacctgttcggtggtcccggggcatcatggtctgcagctctgggcccccagccccactgtgaagtcagtcctgcatgctggccgaggcccggc

SEQ ID NO: 7152 - DNA, 1204 bp, Homo sapiens
aaaggttgcctccaaaaacaaacattttgagagccaaaccaaagtctaggctgagtccaaaaaaccaagacggtttgcattggtccagaaaggtcagaacagagagatgcccgggagccagaaataatttcttgcatccatcacagtttgtatggatccaggacctagctagggtcagggcttatttcgaacatgctctgattgaggcttgaacctcagtactactccaaaactgggggaaatgatagggtgcattcttccatcattcctccttgttaactttatgtagataactcctgttcattctcaaggcccctctcaagttaattggtcgcatctaggaggcctttctgcaccaagatctaaactaggggcccttccctttctcccatggacacccttgcacctaacactcacctggcctaacactcgtgcctaacacttttgccacgccactgctgccacatctctcacctggcttctccaccacgtctgtctcccggcacacagcagtgtctttatacatcccagaggattcaaaagtgtctgctgaacaaatgagatgattgcctctgcttctgggaaggtacactctgttctaggagacctctcctgggctctgtggatttctttctccacattcccttcctcttttgcttatatcctcattcatcccttttcttctcgcagatatcctagtatttactagaacatgcattgtcctgtacctagaactgaaaccatgtattttcgcataccttgaaactgggatacagtttaaatcctaaaagaatgcaccaatgcacctgtaatcccagtacatgggaggctgagatggaaggatcagttgagaccaggagttcagaaccagcctgggcaacatagtgagatcccatccctacaaaaattttaaaaactagccaggtgtggtggcacgtgcctgtagtcgcagctattcaggaggccgaggcaggagggtcactggatcccaggagttagaggctgcagtgagctatgattgtgccactgcactctagcctgggagaaagagcgagactccatctgtcaagaaaaaaaagtaaagaaaagaaaaaaatcctaaaacaggccaggcgcagtggctcatgccagtaatcctagcactttgggaggccaaggtgggcagatcatgaggtcaggagttcgagaccagtctggccaacat

SEQ ID NO: 7153 - DNA, 1188 bp, Homo sapiens
cgagccaccatgcctggcctataattatttctcaactcctaaaaacttgttaactgtggattttatttgatatctcttaatagtaaagatttataactagtttgattattgggtgcttcgtttactttaaataaaatatgtatttctctaagagacctctttgaagtaccaaagttaatcatgagctttgggtatgtgattatattgtgggtctcaaggtattggggcagggagtggacaacaaaaatattgcccgcatttttgtcatgtagaacgttttctcctgcctggttcttaaattaacatattttcatttcctagaggaattaaggaatttgcaagagcaaatgaaggccttacaagagcagctaaaagtaacaacaattaaacagacagcaagcccagcccgtctgcaaaaatcccctggtaagaagactgtcattctggcaatcgtgtgcatttattttattagaaattatcacatcatttctgcatccaactcctgtccaaacagccctttgaacctctttctgaatgggtttttactcacttattttacttttgattaagtagagaagtctccccggccacctcttaaggagaggagagttcagagaattcaggagtcaacatgcttttctgcggagcttgatgtccctgcgctaccaagaaccaagagggtggctcgaacaccaaaggcttcacctccaggtgtagtacttgcggtctcagtatcttggcactattgtatgtgtttatgtgtgtgggggtgttcatgtgtgtgtgggtgtctgtgtcttttggtctgtcttatgtccccattgagaaagaaagtttcttgggaatggaagccacatgatatattttgtgttcttcgtctacatctcaaagtgcctagaaaatccttagggccaaggcacgcggcaggaagattgcttgatcctaggagtttgaggccaggctgggtagtatagcaagaccctatctctacagtaataaaattagccaggtgtgttgcttgcctgtagtctcagctacctgagaggctgaggtgggaggatcatttgagctcaggaggttgaggctagagtgagctgtcatcacaccactgcactccatcctgttccagagtaagaccctgtctgagaaaaggaaaatccttaggtacagagtagctatttactaagt

SEQ ID NO: 7154 - DNA, 1617 bp, Homo sapiens
aagcagcagaggcagagaagctgctgtcatgtcaacactaacagtcattcttgttttcttttgccaggcggccttctgatctgtttaccacgtgagcaagcagctcggttctgtgcagagataaagtcccccaaatatggtgaaggccaccaagcatggattattgggattgtagagaagggcaaccgcacagccagaatcatagacaaaccccggatcatcgaggtcgcaccacaagtggccactcaaaatgtgaatcccacacccggggccacctcttaatctagacagaaatagctgtttggttttgtttttaaatagatctatttcccttatcacttcaattaaagactataaacaacaaaaatctcattgtgtctacacatcggggtgaccttaggtcggtttgtaagtggatacaattaataaaataaaatccattgcctttttttcctgttacattaactgaagatgcacctaatcttgaggcagcttctgagttgagaattatattgttatccaatactgttgattcattttgaatctttagacacttatctcttgccgcataggctttttaaaggtgctttcacatagcacaggcattacccgtagtcgtgtcaaatagcagttggtgtcttcattttatgtatatttatcatataagtctgatttttttttttaagcgtcttgaatggttttctggagagacagcattggtaagtggcacatgacggtatcccagtcataagagggttgcatgattcctttgagtgtttgatttgaaaagcctagtcttgtctctcaagagcatctcggacccagaacattctccagtagtgcattcagttcaacacagcaagtgcttcattgcatggaaaacactttgaagacaaaaaagaaatcttatttctttttttgtagccttcctgatatttacagtaataccattaactgttttatcgatagcaaaaaaggatactttttgcaatgttattagatgttctatagtgctacaaggaattgccttccgaatggaggttcatgtataatactcatttacaattcaatatataattacacaaataatttttaaatataatcaatagtaaagactgttctgtggatggtagtgtttaatacattttctattttgtacagtgatttcaggccttttgttttcttaaaatcagcagctgtttggcctaattcttagcattattttgtcctttgcgccagtacttttttgtgcacgctttttgtgatctgtgttaaaaacctgcattgccaacattgcagctcgaacttaaacttgttattcaaataaatatttaattttttaaattgctcttgtataatcagatgccccttttagtattattttagaagcgttgggagggttttgcctaaagtacaatttatcgggaaaaactagattttagttttataaaacttttaagtctttcatgggacctatattttcttgaattaaattttgtagttctagaataaataggcaatctaaaaaggtgttctctgtgttatgtaaagtggaggcttccttatattttaacctactaagcaatgaggagggattcctgtcattaagcacaaggg

SEQ ID NO: 7155 - DNA, 1619 bp, Homo sapiens
aggttaatgaccatttgccagaaacactttcctacagacccatccaaatgtgtggagtacaatgcactgtgagatctgtgtatggtgtgttaataacaataagaaacttagggaagcaggctgtggacttctggaattaccaacaggaatgaggaaagaagaaaactggagtttccagtctctgagttctacctgatgtaactcttgattggttttaagaactttgttggccttcatttcatatctgactgcaagctgatttttctttcttgctttcattttaattagtccaaaattaagttttaaagatttttcctcacaatttaaatccatagacaacagaagggggtttaaaatgacctttttttcagttgacccgaaagttgtggttagatgattaaaaagaaacatttgaggatggacttaattatttcagtaaaatattataatttgcctattgtcttttatgtaatatttatataaaatatttttatatatttcaaaaacatgggaccattgaatgaaactttatagtccttaaatgttgctgaacttttgctgtcttgcaatagaatttgaatgtaaatattattactggtataactcaaatgttatttttcttgcatttcaaagcttgcttttatcttccaagaagtgtaaattttagtatttgtcatctctcaggacagatacaattaataggaaatagaagtttgaagaaacagagatggcacatcatagcaaactaagttcaaaacagaataaccccagtgcatcaaggttaaggtgggacagtggtttgtgatgccagggagagtggggaaattgtgatgatgctggtagacctgggcagactgtgttcccagccacacccgccaacagaggaggaaggtgctggtactgatgtccccacccgagagtctgtcctggccttggttttccacagtgagggctcgttctaatgttgcacaatgtcatactcagatatcactgtgacctgttactatgctttagaacccgagaggcctctgttcacatggcagcatgtgtgagtggatgctcccggagcaggtggagtggtggcgctggatagcggtaagagcgggggctccaaaggcagaacttccagcttcacatctcagctctgcacctgctcgctgtatgactttagcaagcaactggatctttctaagcgtcagcttcgttgtcttaaatggtagttggtaataatagtccatgcttcgtagcatcacttttgtgttcaagcagaatgctgagcacactggcaaataataagagctcgtaaatattagttgttgtgtcactgttgtcattagagggaagccagagtccctttcaggagccctgtgtttaggggcagtgtgtcctcacaaaacaataacagtaataatgatggtgttagcagcaacagcagtaatcatggaaacgttgattaagcatttactgtatctgaaccctgcggctgttcctgctttcagccacttctgcattgagaagggccggggatgtggtggaagctagatgtcaccaagtagggggatgtagattcacagcggtctattctggttcctcttgggaggttcaaaccttggggaggt

SEQ ID NO: 7156 - DNA, 1241 bp, Homo sapiens
ggtagaaagatttgactcgtgtgtctactagccaacaggcagagcagggttgaaaaaaatatcagctcccaaagggcccatgtgtctacatcatcagttactgtcatgcaccacatttgtgtgcagataccaaaagaggaggaaagaagaaaaaaattaatgtgtgggagctgcacgtttacatgttttgagctatgcttcaaacacaactggaaagccatcaatcttcaaaggcctcaaaaatacttttatagtaacaagtgcacgactttagttgggttattcaagatggcacaaaaaggtttccgcagaggtggtatgctgtgcttttggcgcaagtggtggggggatggggtgggggtggaatttttttctcactctaatgacttcctattggaaaggcattgacagccagggacaggagccagggtgggggtagttttgtgggaaagcagaactgaagttagcttaagcataaaaacaaagaaaaatcttcgcttttcatgtatgtggaatccaagaataaccataggctctaccagaccagaagggtaaggatggacactaaaatgaaacaaataccaaggtattccttctgctgcagcctggagaccaccgagagtcgagctggggcacacacacacctggccgggacccggcagggacaaggcgggccgtggcctcctccaccaagtctctctagacaattcagggcctgctttccccagctccatgcatggctggactggtgattccagggtgcagaagggattcatattcccagaacgctttaagtgtacacctgcaggataaagagataccggttacattattaaatgattctagggattcactgggggatatttttgttgcttttactttcatggttagagctacaaagaacagtgattttttttttttctcccttccccattcagaaacattatacattgggccatttttctttctcccaaagaagattcatggatagtcagactgaactgtgtgcaacaggaaaagtcaaaagggaaaaggtagctgatgaggttacatggttacatgttctacatcatgcatagtagcttgaaatctagtctggagaaaactggatcaagattctagcccactggagttgcaaggaatgagaggcaaaaattctaaagatttgggttatattttcaacttgggggacagagagaaatggagagcaggaattacagttccaacaaacatcatgatag

SEQ ID NO: 7157 - DNA, 1159 bp, Homo sapiens
tttcccaggaagcctggcatgctcacagatgtcctagagccctcacacttctcacaggaaccagttccccagcctgcagtgacaggtgaggatcacaaccctctatgtgggaattggaggcctctgttttccagctctgggaccccgggtgggtctttcatccttggtgttttgctttccccaattagcagcaaaggaaattcctgacctcaattagtgattggtcagatggcaccacgtttgtgaaattgcttgaggaaatacgtgccatcttttactaatgtcatagttaatctagcatactatcactggccaacacttgcatgaagtttaaattctctaaaaggcccgcaaattaaatcagagatgatgacgtaccctttgggaattacattacaacacctttctgtttctggaatgttctttatagaacagcgatgtgattgatctctgatgggcagcacggcctctgggtgagtgatggccgacagggctgggacagagagcttcataacatttctaggcagccagttctggctggtatcctggccactgctcacactctactgtactgggacatgccaaccattcctttctctgaagagcttcagcaaagcccaggcctcccaaatgatgtttatcaaccctagagagacaagtgaggtctagtggttcgagtcagcaagggtagggagccatgagggttcaggtgctcccctgacactcgggttttttcttctttcagggtcactgtgcaaatcatttaaggaaatctctccttctttctctctgcctgtctctccctccctccctccatcagctctccatgcatatacatcaagaaaccattctacgatctaagacagggcggagggaggctgtgctggttggttatttgtagctccttcagaatgagaagctgcacaggcaccaattataattggtaacttctatgctgaccccagagatcagaaacgttgtctgctagatcccagcagcctctgaagcccagagccaaggaacgtcttagagactttgcaggaaaatatttgaaagttcaaaatgtttagagtcgacattagacacttttccctctgaactcagagtggggacttcttgaattggcccccaatccaaacgtctttccttcttcctaatc

SEQ ID NO: 7158 - DNA, 1304 bp, Homo sapiens
caagtttcgtgggacccagagccttttttcttttaaaagctaaaaaacaagtgtttaattcctctttttgttatctgttagataattgagatcacctagaaatgcgtttaatctgttcactcactgtaaattttgaggacccagaattgtcttgtttaatttatactttcacccctgttgcagttaacaccagagaaggaacgtgaatgtcgagcacagccactacccttgttggcacttaatttagaaatagggtgagaagtttaaaagcccatcttgattttattttcattccttttggttctctgtgtaataatagcaggctacatagtgacattccagttccaagaaggtacatcctgtccattcattaattgctttgattactaggagggtttctgttcagttttgtttttaaatgtcttgctgatctagttctttcagatggaataaccttccagtcccttagagagtggaactagtccatataacccagcttcagtagcaaaagtagaagccgccacatcttttcatttctccaagaggagagtggggaaggttcccatgaccagctgggcagtcaggatttctctaggcattctaatgtgaaataagtgtagactgctgtcaaggaggcttcatcagaagatgtatagcatttgaatgtctaatgataatgcatatcattagaatccaagctttgaaaatttctgattaatgctcatgtatttctttatctttgtttttccttgtgaagaaagactttcaccactgtctgagtgatgatgctgttgataaggatgatgtcgatgactactatattgcatctctcaggaacagctgatgggaagggaggggctgctgagttcccttgttctagctagcagcacgctcctcagagagggggccgagttacagacagcagccgcattctcatgcaaaattagttttaaactgctagtgtgggcatcggtaccttttgcctgggtgataccgaagaattgttgaggatttagtatgctccgtagagacagttcagccagtcatttctgcattggagagacttctcatactttctttgaagactcatagaaagctggatctagagcttttgaatccttaattagcacagtagaaattagctttctatgggaatgctttagtgttagcagttgacaattaggcccatattcaatctgaatgggaacaaaagtaaatgcaatgataatatactgctagttagagaaacatgttagttgattatacctgaaatggattatttatctcatcagcaagtattattt

SEQ ID NO: 7159 - DNA, 1125 bp, Homo sapiens
gcgtgaagaaaggcggaaccttcacgctgattggcggcgacgcgggaggctgtagcggccgaccggacgcagggggctggcgggaacgtgaagctccgcggtgcctgatggggccgttgggcggccggtagctgttgctgttgggggaccccctcattcctgccgctgccgtccctgctgcctcatggcggccatcggagttcacctgggctgcacctcagcctgtgtggccgtctataaggtgaggggctgcggagctgggctagggcttcatgacggccacccggttttctggcgctgggtcatccacaggcttgagagcggcgtgtcgccggcctagggatgtcgtggagtggcgttgccgcgaggacactccggagcgaagggccgggcaggcccggcctcgcgcctggcgattcctccggaaagtcgtctactccgcggcggaggctcgcggcgatgtagacgcgcggggtcccagggcgtcatggcggcgggatgcccggaggggtcccagggacgacgtagctgcagggtgcccgggggggtcccggagacagcggggccgctgggtgtcccggggggtcccggggacggcggggctgcgagcattttgggggaggtcacggggacgtcctggcctctggatgccggaaggggtctcgctgacgtcagggcctcaggattcccgcgggtgggaggtcctgggaaagttgtggccgcgaggtacttggaggcggtggtctctgggacagcagggccgcagaacgcgctgagctgggcccgaacgtctaggtcccggaggggcggggaggctgcagtcgagctggggctgatggtcccgcaaagctgcctggctgtgaagccagttgatggtgcgtggtctacagaggtggcctttctggaagtgagagcctgacaggacttgtggcctttctctcatcagtggggaggcagaagaaacgataatcatgaactccgttgccactagtcccgcgtttaaatgtcaaatgacttgttaggaaaagccaaagggaataatactacttcatttgtagaaatgggaagaaaggggcccagcgcggtggcttacgcctgtaatcccagcactttgggaagccgagg

SEQ ID NO: 7160 - DNA, 1128 bp, Homo sapiens
ttattaacccacaccatcctttcaagacaattcattatgatttgacgctgaatattaacatttatttgtaaatatttcaaagggaactaactacatttccttgggagttaacttactctaagggtcttgaccatgtaagtaccctctatcactgataataaagctaatataatagaaaatttgaaatttattctaaattgtcttaactctctttctcctatatttctttttctgtgtcttcaggttctggagatatatcttcagattctattgaccacagcccagccaaaaagagggtcagaacagtatgtaaatgtggagctgtgacttgcagaggttacctcaactgaactttttcaggaaatagagctgatgattataatatttttttcctaatgttaacatttttaaaaatacatatttgggactcttattatcaaggttctacctatgttaatttacaattcatgtttcaagacatttgccaaatgtattaccgatgcctctgaaaagggggtcactgggtctcatagactgatatgaagtcgacatatttatagtgcttagagaccaaactaatggaaggcagactatttacagcttagtatatgtgtacttaagtctatgtgaacagagaaatgcctcccgtagtgtttgaaagcgttaagctgataatgtaattaacaactgctgagagatcaaagattcaacttgccatacacctcaaattcggagaaacagttaatttgggcaaatctacagttctgtttttgctactctattgtcattcctgtttaatactcactgtacttgtatttgagacaaataggtgatactgaattttatactgttttctacttttccattaaaacattggcacctcaatgataaagaaatttaaggtataaaattaaatgtaaaaattaatttcagcttcatttcgtatttcgaagcaatctagactgttgtgatgagtgtatgtctgaacctgtaattcttaaaagacttcttaatcttctagaagaaaaatctccgaagagctctctctagaagtccaaaatggctagccattatgcttctttgaaaggacatgataatgggaccaggatggttttttggagtaccaag

SEQ ID NO: 7161 - DNA, 2038 bp, Homo sapiens
ttgttatcaaattattaaccacttttaaatagaataataactacatttgcctccataattgaagcagattactaattaacattttcgagaattaaactgcttgcttatgaagtagctattaaaactaaattgaaatgcaatggatagtttcttgtagatttaaaactgcattgtactgtactttgtctataatgaaaatgttctattcaataaggtatctttttttcttctttttggccaagatggcactaagtaaaatttaaatcgagagatggcataatccatgagtcagccagactttcagctggaaaaatctttagtaaataccttccttctaaattacagaaagtaacttttccatacacactgtaaacagcagacactctaacagagcatcggttatgctccatctcctaacctgaaggactcttgtcacacacccacctctgagaacccaagctcctcagtttttttaatcttttggccacatttcatccaattaccatcataccttttatacgttagatttccaaggaggtaagtgaatcacgtaatgggggtgaactgtacccagtcaaaataaccttatctgactttttctatatttttgatattttttctctaaatattaagtctttctcccaagctcatgtctattccttcctaaaagtcaaattgacatgaagtgaaaaatgatgtgttgcttctgaagacaatggattgcttggcatttgggatctttcctttaaaactgataatgcttccccaattcagttccatctacctgactgactagaacatttactgtggtacattttccaggtttgataggaaaatgctaagcgttgtatgacacagatattcttgctcacaggcactctaccagcctttgaaaaagtcaatttaggctggacgcggctgctcacgtctgtcatctcagcactttgggaggacaaggcaggtggatcacgaggtcagttcgagaccagcctgaccaacatggtgaaaccccatctctactaaaaatacaaaaaaatgagctgggtgtggtggtgggcacctgcaatcccagctactcaggcggctgagacaggagaatcgttgaatctgggtggtggagggtgcagtgagccgagattgcgccgctgcactcctgccttggcgacagaacgaaactctgtctcaaaaaaaaaaaaaaaaaggccaggcacggtggctcgcagctgtaatcctagcactttgggaggctgacgtgggcaaatcacgaggtcaagagacggaaaccatcctggccaacatggtaaaaccccgtgtctactaaaaatacaaaacttagctaggcatggtggtgcgcacctgtagtcccagatacttgggaagctgaggcaggagaattgcttgaacccgtgaggaggaggttgcagtgagctgagaccgcaccattgcactccagcctggacaacaagagtgaaactgtctcaaaaaaaaaaaaaagaaaaagaaaaagtcaatttacacacgcatgaacactagtttcaataaatgtctgtttggctattcctaattttgaatatttcctgcacttagtatatctgtgccatagttacaaagagtcttacacatttgaatattaccaaacaggaccctatgaatctatgtaagtataactcattttattagtttcaaggcttctttacaaggtgtcctttcacaaactgtatgacatgacaagtttatgcaagattactttggagtagcttttttacttttgggtggtttccttatcttattagggtttggaatcagtttctttattttaaggggttgtaatgttacagaagcctgccgaccgtcagcaagctttctcttaggttttgacagatcttcaaatgaagtgtccaaaagctctctgtcttggctttccagaggttcagtctctaaattttccccagaatcttcaattctgtcttgaagccatggtacacttaaactggggactctggggatgatggctcttacttcgtccacaaagtcagtg

SEQ ID NO: 7162 - DNA, 1230 bp, Homo sapiens
tgacatcattttgtgacatgtgcaaattacacaaaattcaaattccggtgtccctcaataaggttttattggaacatagccatactttttttttttttttttttaggacagggtctcactctattgtccaggctagaatacagtggcacagtcaacagctcactgcagccccaaactcctgggttaaaatgatcctcctgcttcagcgtctttttgaagaaaaagaactagctgggcgtgcataccaccacgcctggctaagtttttcattttttgtagagacaaggtcttgctatgtttcccgtgctggtctttaactcctggcctcaagtgatccttctgccttggcctcccaaagtactgggattatagacatgagccaccactcttggccacagccactttcatttacatattgcctatggctgcttcacactacaaagctgagttgagttgttgtgacagattgtgtggcctgcaaagcctaagatattcactctctggtcttttacagaaagtttgttgaccttggtcactacgaaggagttggaactctcctttctataggttgccgtgattctaaagaccaacccacagctgtgacatccctgagactaccaccagagggcgactgggccccacagtagtacataatataggacctctcttggagataatggaagacttggaatttcagatggttccaccctaattgcattagcgttctttcttaacaggagaaaggcttcaagaaacaaaacagtcctcattcactggaacagggtttgagataccagcattaagtaaatgagattttgacttaacctggagtcaaggctctaatttaggactttacttcccactcattttcatgccacaaagtctatacaaagtaggttttcaaataattgcagaatcagccaggcacggtggctcacacctgtaatccctgcactttgggaggccaaggtgagcagatcacttgaggtcaggagtcttgagaccagcctggccaacatggtgaagccctatctctactaaaattacaaaaactagccggacatgggggtgtgcacctgtaatcccagctattcaggaggctgaggcaggagaatcgcttgaacccaggaggcggggttgcagtgagccgggatcacaccactgcactccagcctgggcaacagagtgagactctatctcgaaagtaaaataaataactgcagcattgcc

SEQ ID NO: 7163 - DNA, 2043 bp, Homo sapiens
aatcagcccggaagggaaggggagatgctttgtctctgcagcagaactacccgcccgtccaagagcaccagcagaaagagcctcgagccccagacagcacggcctacacgcagctcgtgtacctggatgacgtggaacagagtggtagcgaatgtgggaccacggtctgtacccccgaggacagtgccctgcgatgcttgttggaggggtcgagtcggagaagtggtggccagctgcccagcctgcaggaggagacgaccagacggactgcggatgccccctcggagccagcagccagcccccaccagagaagatctgcccacgaggaagaggaagacgatgatgatgatgaccaaggagaagacaagaaaagcccctggcagaaacgggaggagaggcccctgatggcgtttaacattaaatgagctatcgcagacccacctgactgtggaatataaaattgccaaatatcctttctcatggaagcgcgtacccgttcgtggaggaaacggaacggcagcccagccgtgggacggacgtggacgtttactgcattcctgtttgccgtgtaaatgttagaaaggaattaaagttattactcggaataaaggatgactttggcggatgtcgcccctgcaaggaggtggctgaaagtggtgtccagatgtccttccgaggactcggcgtatccgccaccagggacattaagaaaccgcacgtgatgtcgctatgctctaacgatcacctcagttctccctcggattctgggaacagatgaaactttttgcatcgcttgagtcatttttatcacaataatcctactgtgaagctgtcgttgagaacttaggttggcacgtagcgtctcaaggtatgcgttctctcaaaggaaagctatgcatcgctgcttcgttgtctgattttgcttagattttgctttggttaggttgcgttttggggtttgcctttttttgttgtcgcttaaatgcaatttggttgtaaagatttgattcctttgtgttcatctgttccgcttctcagcggtccatctcagcgtctcccttcaggaaccgctgagtgtcctctcttaacatccaagccttttaatgaaatcgtactgaaatctgtatcagctaagagtcctccaatcctggtcccattaactccaagtgcctttttgacagtgacaacagacagtccctcgctttttgttgttgttggttttcttaacccctttaatggaactgcctggattttatacagttattaaaggatgtctcttttgctttaaactgcatgctgccaagtgccatttggggtcagcatcctcgtttcaacacagtgtgctctctagttatcatgtgtaacgtgggttctgtttagcgaagatagactagaggacacgttagagatgcccttccctgctccatccctgtggcaccattatggttttttggctgtttgtatatacggttacgtattaactctggaatcctatgggctcatcttgctcacccaatgtgggagtctggtttgagcaagcgagctgaatgtgactattaaaaaaaatttaaaaaaaaaaaagaaaatcttatgtactatccaaaagtgccagaatgactcttctgtgcattcttcttaaagagctgcttggttatccaaaaatgaaaattcaaaataaactctgaagaaaaggaaaactgtctttgtggtcatttgaattcattctgagtcattatctgtttcaaagttgttattaagactttgtcaggccaagcatggtgactcacacctgtaatcccagcactttgggaggccaaaggaggaggatcacttgagctcaggatcacttcagcccatctctgtgaaaaaaatttttttaattacctggttatagtggctcatgcctgtagtccccactacttgagaggctgaggtgggaggatggtactgctgcactccaacctgggtaagagagcagatcctgtctcaaaaaaaaaaaaaaaaaaaaaaaaaaaaaaaaaaaaagtctttgtcattgtttcc

SEQ ID NO: 7164 - DNA, 1222 bp, Homo sapiens
tttcagcaccccagggtgagcccagctcagactatcatccggaaagcccccaaaagtcccagcccagcgctgaagtaacgggaccatgcccagtcccaggccccggagcaggaaggctcgagggcgcccccaccccacccgcccaccctccccgcttctcgctaggtccctattggctggcgcgctccgcggctgggatggcagtgggaggggaccctctttcctaacggggttataaaaacagcgccctcggcggggtccagtcctctgccactctcgctccgaggtccccgcgccagagacgcagccgcgctcccaccacccacacccaccgcgccctcgttcgcctcttctccgggagccagtccgcgccaccgccgccgcccaggccatcgccaccctccgcagccatgtccaccaggtccgtgtcctcgtcctcctaccgcaggatgttcggcggcccgggcaccgcgagccggccgagctccagccggagctacgtgactacgtccacccgcacctacagcctgggcagcgcgctgcgccccagcaccagccgcagcctctacgcctcgtccccgggcggcgtgtatgccacgcgctcctctgccgtgcgcctgcggagcagcgtgcccggggtgcggctcctgcaggactcggtggacttctcgctggccgacgccatcaacaccgagttcaagaacacccgcaccaacgagaaggtggagctgcaggagctgaatgaccgcttcgccaactacatcgacaaggtgcgcttcctggagcagcagaataagatcctgctggccgagctcgagcagctcaagggccaaggcaagtcgcgcctgggggacctctacgaggaggagatgcgggagctgcgccggcaggtggaccagctaaccaacgacaaagcccgcgtcgaggtggagcgcgacaacctggccgaggacatcatgcgcctccgggagaagtaaggctgcgcccatgcaagtagctgggcctcgggagggggctggagggagaggggaacgcccccccggcccccgcgagagctgccacgcccttggggatgtggccggggggaggcctgccagggagacagcggagagcggggctgtggctgtggtggcgcagccccgcccagaacccagaccttgcagttcgcatttcctcctctgtccccacacattgcccaaggacgctccgtttcaagttacag

SEQ ID NO: 7165 - DNA, 1233 bp, Homo sapiens
gtgtcattaaagttcgatggaagtatcactatgcacaactattttgtgatctaataagggtgaaaaggagccatctgtccccttggctaaggggtattaatggtttctatgggcttcactatggaatgtagatacagacattctggcaaatgtggtggctctggacagaaataataggagtctttgtattcccagggaagctttgcaacaggctacattcttactgaatatgtaatgatgtaagcacggttctaattggacacaagtatttgctaacatccgttatctaatatctggcccagacttgagaagtaggtaatgtaaaaagtttttaaagctacaagcatacctcacattttaaaagtcctttcttgattgggttcttgtgttctttagcactcttgccataaaaaataataacagtaataaacccaaggctgaaaaactgaattttaactaaagggtttttgtgcgtgttttttttttttttcaccaaaattagatggacttacagaatttttaacttaaaattggaatccaaaagccagaagatccccattatagtttatagttgtattccctggaatatttactgggattaactgcaaagcactctcagatgaatagtgtagtataacattttgaaactgaaatacatttaccaaattaatttaaccacagcaatgtgtgtggttcattttagtccttgagcatttttgattatcatacctgtcatgttttctgcagtgtagtgagttaacataaaacaacatcaatacaaaagatcctctgtttcgagattaagcaaaattcctcattctcttcaatgtgatagaataccacattgatctttctttggaggttagtaaaatatcttttatgtatttttcagggcttaacaagtaaaaatcaatgttttcatcaagtctgatctttttgtcacccactcttcattcatttttccactaaggtgatagaaaagtctcaacagtttaagaccgtaaggctatgaactccaaatataattgctgacaagataagcaatcctcacgcatccttttgagaggaaataaaatcttagttgcaagattacatattctgatttggaatgctgagctttttaaatggaaatatagaaggacggctgaatcagcaaaaatcctttatgtagtttcattctttgcaagcttgaccagtcattctgaaacaggctaactgaactgatacagtggc

SEQ ID NO: 7166 - DNA, 1167 bp, Homo sapiens
tgggagctagtctctagtggaaacatctttttttctctctctctctattgctctgctagctaggtttctttttgttaggttaaaaaaaaaagaatgatgttcttattttttaaaaactaggtactgcgctgagaattacagattggggtttgatcgcaagctctgccaaagctgtgaattgaagcaaatcacatcagcactttgaacatctttgttgttcgaagagccaagcaaatattgaatattgagtgctagtaggtaggtattgtgctgggtgcattgtctgtctgaacttttatcagcaggcatctttcaagctcccgctgagtgtgaataaagtactaggctaggtagtgtggggcacaaaagaataaaaaataagatccccgctcccaagagcttatttatcaacacacgaatagcctcttttaggagggtcagccagtgtctgagccgtgtagagaaaggtcacggtcactgagtgctcagtcaactgaaatccctcaaatctccagtatgttcctgctcagagcataggcgtcccctactgttgcaaacctaagactgcaatccaataaaggagaccagcaattccagttcctgatggtacttagacataccagatactgggacaggcagggctgggcagtgggccagcagctgcaaggttatgtcctggcgttagaggctggttcatgactgagacacgttctctcactaggggagacacaggctcttccaccttggtccgaggctgtcggggaacatggctggggtcttcgtctctgatgtgctttgtgctgaatggaggtgtctgggtcacttttcttatttaagatatcttaaaatgagaatagagaaagcagttttggtaggaatggaaaaagatgtagccactgcagaaaacagtatggcagttcctcagcatattaagcataaaattaccatgtgatcagcaattccacttttgggtatacacccaagagaactgaaagcagggaccgagagagagatttgtacagccataacctagcagcattattcacaatagccaaaaagatggaggcaacccaactgtccatcagcaaatgaaagatgagcaaatcgtggtctgtacatacatggaataattttcagctttaggaaggtatttctcacacatgaaga

SEQ ID NO: 7167 - DNA, 1450 bp, Homo sapiens
ttttcttagtgattctgtatcaagtagaggataagtgtagtttaacttagtttttaatataacccataatcaagaacatgagcgaaaagcagacataaatcgatatggatggtttgtggtgtgtgtgggatgtgggggaattaagaaaatgccatttacctaagcacagtttgcctgaatttctgcttggttgtgttgtttaccgtaagtactgagggtagtttccctaagtctgtcctgagaaaaagcatacttagtactcctgtatttgttcttatgaaatgactatctgccttcttgtatctagtaagattggctggctcaattttcttctgtcaaattatatggttattttttatattaccacatcagcattatattaaaagtgtttttaatagttgattgtattttgccaactactagtatagactcaaatttgctatttaatttttaaaatacaatttattttgtaaatcctttaaaaaatatttggttagttttggattagaaatgatttatgttagccatgtgttgaagatgaaattggcatcagtgtagacggtgctgattgggaaaagttcatgattaggaaattcatgtaagactttttaagagtattttttaggttttcactcaatctttcctgtcacagtaacgtgaaaactgattattctttactccaagagaatgttttaacccaagcaagtatctaatactagagcattggttctgacattcattgtaaatcagtgaactgtaagatactgtctaaaaaatgtacatttgtaattagtgcctttattcatattttgaaataagttcttagttttatattatacctgttctttagaagtcatgttagcagctaattatttcagtgatgaaataatttgtgttttatatcccccttcacctccatgtattggttagcacagtttatagtaagtgaaaagcaagggacccacctacattaccttcaggagactgttctaccttttaatttgaaaacaaggaaattaaattttaacagaaatcttttaagtatgttataaccaaagtgttcaattatccttgcaagttcaaatacagcatttttcttaattttgagcgtgtcatgtccttcatctttaaacccatcattcttattgaagcccatttgagaactcttagaattaatagaaccttttataagggaatatatggaatattttttattgttaatgtaacttaattccttaaaacctggaatattaatatatataatctattaaaagctgaagattaaatatgtaatttttgcttttagtttcttgtgttagtatgcttaaaggtatcaatacttttattctatattcattagaagaaaggtaataaatttaagtttcattgctgaaaaattttaaatgagtgccaccccatagccatagtcattttgattaagcataattta

SEQ ID NO: 7168 - DNA, 1145 bp, Homo sapiens
aagatacagcatggtgtcttgtatctagtagaatattgtgctagccatctaaaaaagtggatttgagccttaatttggccgtttctcaattgtctagttgaccttagacaattagtgtccatggctttccttttgtttttcccatactgaggaacttaaactacagctctaaaatgtcttttggttttaaaattctgaatgcttatatactactattaaaaattaaaaatccctcaaatagtagggcaatacaggtaatatgaaattaaatgtatttttatccattatttgattcccacctgttattttatttagaatacgaatacaaccaagtagggaaaaacgtatcagtaactgctattcaacttaaattcagcgaattaatagctgaatagaaatagctaatgacaatgcaaaagagaaaacaagccatattgctaagaaaaggatagtaagctgcttagaaagaaccagcctgtgttggaaataattctcttctagataatttaccttattttcttggcttgtactaattgaatggaagtggttaatttgttcagagtttattgccgtttgatgccaccccagtctatagttctgtgtgactttccatattgaaagagtagggttagtagccaggttgtcagtcttttacaaatgtctacataaatgtctacataaatctgaaagtggtttatattcaaggttagtttttcagtagcgtctcctccttattcattcacttttactgtgaagactgaaatccaaaagccaggttccccaaaaaagtatttttaaaaaattttaggggaccaaaataaatagaggaagaccaatataaaaaaatatgttcaactattccattttaaatttaaagcagaaaaaaaaattgtgcccctcagacctaaaggcagctttaaatgtatatagtttggtgaaacatttgggaaatattaatttggaggtttagaagcatacgaaaaacaaattcaaagcacttgaaagtaaagacaatatcatgaggtcgaaaaaacttcaaaaggatattaggtaagagaaaatgtgaatgaaagcagtgaatttctgcctctcctcgtatttagggtacttaaaattactaaaaaatactgtctttttaccataca

SEQ ID NO: 7169 - DNA, 1161 bp, Homo sapiens
taaaaaaaaagaatcgtgagacatcatgtaatccaacctcttaatgttacagataagtaaactgaggcccaaagagatatagtaatagtcccagtgtcagtaaactgggtcttgaacttaaatgtttgtttcagttctcattgccttcatctcttaattgtcggcacttaaggccaaccaagcagcttagacagcgcagtccactcaacggtaactttatttgctatattgacaatctgctctgttctgtaatatagaacattggatcaatctttatctttttgctgacttaaggaggctgctattgttgcaatatccagagatttcaagttctagccattgcggggtctttgtggtgttttcaatttctcctctctccacccctgcccccatctgtggccatctaagttagcaatacaatttattttggccatttaaaatttttctgcctttgttttatttcttcccaaatatatttgaaaatgaatgatctatatagctgattttctgaccacatatataattgcaatttttatttgctcttcaaactattacaacatttttgtccttataaggttttttgggcagataatgcgaggtctgtggtgttaccttttatatactcctattaccttatgtttgtgaagcattttacattttacagagcactttgattcatctccctatttgttcatttatttaactgttcagttcactgaaatatttattgaacacctactggaaccaagtgactgtgctagtaacttgtgatatacagtagtgagagtccaggcatgtaaccgatcattataatacaataacatccctaaaccagactttacaagtagataggatcaacaatactctatcaattttcaactccaattttctattctacttaaaatgggaactagaaactgtttgcctgaagaatgtgtctgaaacataatatatcactgcatgtctgtgctgtagacctgttaattttatctgtgagaaaaaaagttactcaaaattctccctgacctaagaatactttctagttcactgcagtcttactgaccagatgcaacagttgaagtttgatttctcgacccaatatttctattgggttttgaattattaatatcactgttttgaggtattcagaaacaccagtgt

SEQ ID NO: 7170 - DNA, 1119 bp, Homo sapiens
gtttttcaggaactccaggcagtgtaaagtcatcttctggaagttcagtgcagtctccccaggatttcctgagctttacagactcagatctgcgtaatgacagttactctcactcccaacagtcatcagcaaccaaagatgtacataaaggagagtctggaagccaggaagggggggtaaatagttttagtaccttaattggcctcccttcaacctcagctgttacttcacagcctaaaagctttgaaaattcacctggagatttgggtaattccagccttcctacagcaggatataagcgggctcaaacttctggcatagaagaagaaactgtaaaggaaaagaaaaggaaaggaaataaacaaagtaagcatgggcctggcagacccaaaggaaacaaaaatcaagagaatgtttctcatctctcagtttcttctgcttcaccaacatcatctgtagcatcagctgcaggaagcataacaagctctagtctgcagaaatctcctacattgctcaggaatggaagtttacagagcctcagtgttggctcatctccagttggttcaggtaggggtttgcctattattatttttctccttcactcccaccacctcccttcttctgtcccaaaacgttttcaactgttgttacgataatacttgaaattaataaatgacatttaattaaagtgaaatttctcagtttttaaattttctaatggaaaatacaaaaatatcttaaagtcttagatgatttggtgtttgggaaagatgttcggcactaatttgattttacttaattaaatgtaggctaaacaatctattggtcattcattacttacaaaacacttagaatttatttcctatttttgtttcacctgcacagtattttttttttaatgcagaatttatatttagggtgtgagagtttttaccctttggtttttgttttgttttgagctccctttctctaaacttcaattttagtaatcattttctaaacgactcctcacacagatactacttgaattaccctatcctgagacatttttatatcagtgataaatgattttaatttatggaatccagcagtcacattttatttcaggagatatctgaa

SEQ ID NO: 7171 - DNA, 1172 bp, Homo sapiens
tacttaaatgtctaatgatctcgttattgatttaaagcgatggtattcaatatagatttttttttcttatttaaatcagtcttaggaatagcaagactagatatttaagtggttttgatacgggcttcagcataagctttttaataagcctttaatcttacacataatgtaatttaatagggtaaataggtttctttttgtcttttattattctagctcctactactgattccttgaacagcagtaagagccctcatataggaaacagctttttacctgataattctcttcctgtattaaatcaggtaatttttgtatggttattttcatctatgttgatttacttgtgaataatagtatattaaatggtttaaaattattttaaacagttttgcagtgttctttaaacttagtttctcttctttcttacgctgggacttaatgtccagtggacttagtttctcttctttcttacgctaggacttaacctccagtggacaaagtaccagcagctcatcagctctttctaccccacctcctgctgggcagagtccggctcaacaaggctcaggagtgagtggagttcagcaggtcaatggcgtgacagtgggggcactagctagtggaatgcagcctgtaacttccaccattcctgccgtgtctgcagtgggtggaataattggagctttgccaggtaaccaactggcaattaatggcattgtaggagctttaaatggggttatgcagactcctgtcacaatgtcccagaaccctacccctctcacccacacaaccgtaccacctaatgcaacacatccaatgccagctacactgactaacaggtaagaaacttaagtatgttttgggttttttagtataacagagtaccggtgttgtctatgccttagattggggctttcaatgtgttcctttgtagatacaccttaagaagtctgccaaaaattttaagtatattatacagagtacatttatttttgaaacttaagtaatttagattaaaattaagttacttttagtaacagcattatgttctgtgctgaaaattagtcttaatctgtgatgtctgtttttaaatactagtttttcttatttctttgtatactgtatcataaattctgaagaaagatatcgtagtggagataacatgaata

SEQ ID NO: 7172 - DNA, 1588 bp, Homo sapiens
tgcagagacttagtgataaaactgggcctgtagctcaagagaaaagttgacacctgagaaacatctagaaattgcctatcctgctgttctagcacttcatctggctgcctttgcagtccttttactacagctatgaagaaacgcaacaagaaactcaatgcacaacaaaggattaattgctgcaaggacattcttgtaaggctttgattagttttcttgttgctttgttgcactgaaatggaattcccatgcccctaccccttaccccagttttttgaacatggaaagaaaatttaataactttttaaagtgacataatttacatgcaatatgtttatcaactcaagaatttaatatagttggtacacaactagttttgtttataaattggagatgcaaatagcaaaactaaatacttgctccatttacaaactacttgattttattgtacaagttgaaatatgctcttttgtttgggttacagtatgcttgctctaagtcaaattccaaggaactaatttcttctcctggagttgcattgattcagtattacaaatatatagcacatcacctgggacttggcaatctttgttaaaaaaaaatttcctttctaatgggatttggccaattttggtaatgaagttaggatggtaatgtctgcatctgctaaaggtaattttcttttgagaattgctttctttagtgttaagacctactcatattttgaagaaatcttgagttaagtgagttctgaggctgctgggggaaccagatcaattcaaagctaaatacttctttcagaaaggggccactgtggaaagtgctggtggggtttgcccttgatcaagtgcctccattgtgctgcaagggctgtagacagcagggtgggacagtcagtcctccgagcagcaggaatcatcccgtcacctgcagccttcccatgcttccgcctttattcagaactttctgtgccactgtagatagctcaggcaaaactattacctgggtatttatccactaatgagtcacaagaaaaggagtggatttggtaagaatagagatttgttttatttaaaccacttcccattactgaccattaaaagctcaccactagagttcctgaaacaggtgaaacctgtatgacagcccttccactttggggagccacgcttttgatgtgacagtaccgcagagtgattcccccactgaggatgtcatcatcaaactcttctttggtgtgtgaattattagtggaaaagacccagctgtaattagacctccactgtgtacttagctggaagaacatgttaattctgcaatatgtttcttggttaaacattgcacagttcttacctcatttctgtaaataaagttttgtgaatctgttttgtattgtgacaaattcataagataacattgatattttgatttgtaatatttctaattggtagatttaattgaaaagtaaaattaatttatttttatatgttcaggggaattttaaagtcaaatcttttgtagataatttaaaaaatcagtgtggtttattttacttatttaacccactggttgttattctgtaacagtt

SEQ ID NO: 7173 - DNA, 1221 bp, Homo sapiens
ctctcaattctcctgttaccaaatgcagatctgaattataagatgtttatgtttgaccattgtttcaacaatgggattttgttacgaattatccctttaactgaaaccctcagttttactgtttacattattaggaaaacagggatatcttttgaatctaaaaatttgatgtacagcatgtgatttttgaagtttacatgtaaagtcacagtataggtgaaataacgtttgtcatattttgagacgtatcctgcagccatgtttttacgtgagtgttttagtcaaagtacatggtagacagtctttcacaataaaaggaaaaggatttttttttcctccaaatgtacatttatcaacctaatgattgatttttttaaaaagagatttcgccccagtctggtttatgaaagttcattgccctaaactgtgctgattgtttttaatcaagttataaatttccaacctagatcatgtatctaccaactctcctgcattttccaaaaggcattgagcttaaatattagtcttgcttagagtaggttatccacttacatgctgcgctaaagccatgcctttgaaactccttgtttaaaacatgatatgatttttgtgggcagtttcagaaaagaaaacaaacaaacaaaaatcgaccctttaattattacttgcaactcaacagatctccctgccgtactgccttttccaggaactttacttcagggctgtccagattgcagctgtgccccgtgtatgtggatctagttcacagagtctttggaagccagcagtcgtgccctccgtatactgtccactcattttatgtagatttggtatcctcagcagccagtgttaacaccactgtcacgtagtgtacagattcatcttttatgtatttaaagtaatccatactatgatttggtttttccctgcaccattaattctggcatcagatcagtttttgtgttgtgaagttctactgtggtttgacccaagaccacaaccatgagaccctgaagtaaagataaggtacacatacattatttgagtaactgtttccttgggggccaatctgtgtatgcttttagaagtttacagaatgcttttatttttgtctataacaaacagtctgtcatttatttctgttgataaaccatttggacagagtgaggacgtttgccctgttatctcctagtgctaacaatacactccagtcatgagccg

SEQ ID NO: 7174 - DNA, 1161 bp, Homo sapiens
aatgtttctcatgctaaatattaagtacaggaatgtctcctgctttacctagggttcaagtgtgtttataaaccctgctctttgtgaggtgtcatggagattgaaaaatatttatgtgattcctcatgaaaatgggttaaaaaatggaaaatgtggttaatgctacaattaaattaattagaaaatagttcacaaaaacttggggacagatgaggggacagagcaactattcattctggtgggagagtttacatctttaggatggatttcactagagggataaattatatctctcttttacctagaatgatttgcattacagtgatagctattttagcttcatgcaccatttgttaaaaacaatacaaaggatcaaaggtagggatagatatattccttaagttgttatggtcatttcaagagtcagccaaataataccgtgctttactgaaattgcatctttgaaccgagtgaaattgtgataatacactggtctgaaatttaagaattgtgttctagatcgaatgtcctaactcactctttaccttgggaaaataacataaaggaaaggcatgagactagagaatctctcagattctagctttcaacatttaaatgtgtagaataaaaggtgggatgcaagtgagctattttttgcctcttgcttaaaaaaaggaaatgtaaaaaaatcttcacacctcagagttggttgctgtggacaaaagaaaatgtcagtacacgttttttcaaaacagactttatattttagagcagctttaggttcatagcaaaactgagtagagggtacagagccttcacatacacccctgtcctgacacatgcatagcgtctcccattagcaacgttctccaccaaatcgataccttgattaaaatcaatgaacctacattgacacatcattctcacccagagtttatcttaggcttcacccttcgttgtttcacattctctggattggaataaatgtataatgacatgtagccactattacagcatcatacagaatagcctcgctaccctaaaaatcctttgtgcaccatctattcctccatctctccccccaactcttgacaacaactgatcttcttactgtctccatagttctgcctttcccagaatgtcatgtagttggaatcgcat

SEQ ID NO: 7175 - DNA, 1697 bp, Homo sapiens
agtaactgtggaatgtgtccccccacctatatcatacagcaatatttttttgatctacaaagcacaccatatacttcactatttattctgctgaggggaaatgggtgagactgccagatttctatgagaattacagggttttcaagtcattatggagaaaatgattgaggttcagtgtcattggaaaaagcatattcttaatttgtctataatttttcctttaattggtagtttggctccattttcaaagtacttttgaagctttcttttccaatttggcatcaaagttatttttctaagtgccattcaatttgggacttattttctattttgattgacataaaatatgtcattctgaaaggaaaaatatcaacacagtttttgagtaagaaactcagtaacattgaacttagtaatcacctccctaggagtgaaatttcatggtcatatatattgaaaaaacctcacaatataaccaacatgctatctgaatcttgattgagattccacatcataagtgctaatttcagttctgactataaccaatttgttagtttatacttactctttactaaaggaaagaagagtaggaataggatggtgcggtggctcacacctgtaattctagcactttgggaggccgaggtgggtagatcacatgaacccaggagttcaagaccagcgtgggcaacgtggcaaaaccccatctctgcaaaaaattataataattagccaggcgtggtggcatgtacttgtagtcccaggtactggagaggctgaggtggaaggatcacctgagcctggggaggttgaggctgcagtgtgtcgagattgtgccactgcacttcagcctgggtgacagagtgagaccctgtcttaaaaaaaaaaaagagtgagaataatgaaactgtgcacacgcaggccttttaataaactttccccctgtacgcagcccattctagctatatatatttcttggtcccagcctcttcaaataaaaattgttttattcaaaagtatgacctagccttatacaagataagatagcccacttaaaagtggcataaaaggccacttttatgcatctccattttaggttggttacaagaggcacagagagaccaaagcccatgggatgctcgtgagagtaggaaattgggtgggaagggtggactcgggagacaacctgacatctctctacttgaagcctagcaataaggttcaaaggttcctcatgccttgttttcccttctctctacatgattaagatcccattcctgtaacagatagcaatgtgtttatgcagtaaaattagataagggagattactagggaagtcactactcagttagggatgtcagtggtgctcactgcaggtccaggttagtaataagaactctggactagtagctaggagtgcttgaatctagattagttctactttctaactcgatgtgtgacattttttccacttaatttttttggccttggttatcttattggaaaaaatattcaagttgcacaaataactaaatgatgcctgagttttcattcagttctaaaacttctcaactgagcaatctgttgttgaaaggagagtacgagttctaaaagctactctagggagctctgcattcaccaagccgctccatcattgttgggaagaaaatactaaggttgactcattgtcaaagcca

SEQ ID NO: 7176 - DNA, 1636 bp, Homo sapiens
tttttgtatttttagtagagacagggtttcaccatattggccaggctggtctggaactcctgaccttgtgatccgtccgcctcagcctctcaaagtgctgggattacaggcatgagccaccacacccagccaagtccagctaattaaaaaaaaaataaaaatcgtagagatggggtctccccgtgttgcccaagctggtgtcaaattcctgacctcaagcaatcctcccacctcggcctcccaaagctctatgattatagatgtgagctgccatgcctggccttaaatttttcaaaagcttttaaaccaatcttaaaatgttttatcctcttagaatcatgtccctagttttatagcttggaaattcttgctcttttcaaattgctctttaactctggcctgattggaaggtggcagcttttcaaatacaggtcatggcagcgctcaacctggattcctcagttgcagaagactgcttttgctagactgctgaatttacttccaacttttcagatgtttctgaggttgaccctggtgtggttcccactcaaagtggagcaagcaggtgggtggcaggtctcttcttagcggcttcctagagggaagcctcgtgagtgggatgggggacaggttgccctgggggagcccaggaatggggagacaaggccacctgctatgcagatgatatagtttggctgtgtacccacccacttctcatcttgaattgtagttcccataatccccacatgttgtgggaggaacctggtgggaggtaattgaatcatgggggcggttttccccatgctattttcataatagtgagtgagttctcatgaaagctgatggttttataaggggctttccctttcactgggcactcattcttctccttgctgctgccatgtgaagaaggacgtgtttgcttccccttcaaccatgattgtaagtttcctgaggcctccccagccctgcagaactgtgagtcaattaaacctctttcctttataaattacccaatctcaggtttgtcctaatcgcagcatgagaatggcctaatacagtaggttttcctgagtcctctctctgactcaccctctgacgggcaaaagacagtggcagcactgccagcaatcagctgggaacttctcccctgtgatagaaagcagtgcttgctggcttccctttgtgatgcttttggacagcagctctatggacctatgccttttgtcctttgaggacggacgcacagtctgtgcagctcgaggacgccgtcatgggtgagatgctgtggagtgtgatgacgccacctcttaggctgtgtgtgaaagtagcgaggagaggcagggtctgcatgagccactttggagcaggccaaaacactgtggagaagcacattacagccacagtggcggtgtaaagggtcagactgaccactggcttctggaaagtcttcatttctgaaagactgtcaggtagaagatggatgagagttactctgtgaggccggaaacctagaactcagaccattgtgtgcagaccagggagaggcagtgtttggagtgagataagcaggaattttgaaattacacagacccggttttgaatttactcatgagctgtgtggcttagagaaagc

SEQ ID NO: 7177 - DNA, 1150 bp, Homo sapiens
cctacatgcttcccccattgtttcttacatgggacaaagtgacaagggtgaagctcatgccatacttcctcctccaaggacagctcagaatctggccctgaactcttttagatatcttggtaactaggctgacatgtagcattcctggggaatgtataggaaggaggtgaatggcacctatcatttattgagagccttttatgagccaagcactatgtgaagtggtttctatacattatatgatgtaatcatcatgacaacccagtgagatatgtactatcatcatctcctttttacagatggagaaactgaggctcagagaggttaagtaacttgcccgaggccacaaagccagtaggtggcataaaatgtccaggactattaaagaattctacatattccatgctgtttaccactgtgcagtattctgccttgcaaatgagaactataagccccacctccacacaacagagaagttaattcaggagtgaattctaaacatttcaaccagaattcttcaaaaattgtttcaggactagatgctaagtaactgctcctaaaggatatttacaatcataaacacagtagaatttgcataattatgctgctaaatatacacatgccattttaaatataactgccctagctagtatattagcacaattatgcagaaataggggaagaaagaggacagcattcttggtagacttcatttttttaaatgcatctgagtactatgtcaaagaaaaatgttaaaaacaggaacatcagaaacaattaccgaagcacaaaattataatccattgtctcatctataccatgatgttatttagaaatgcttaatctgtgtaagtattgttaaagaattttcaaccccttaaagcttaacttcatgagcacagggtcgtataaagaaccaatccaatttctgttgcaatttcataatattaaaaagcaaataaatatgagagtgtttttcatatgagagtctcaagtgacattttacatcgaagatgtgaagctgcaaaaacaccagtgggaggctgagaaatcggtggctgtgctttctgttggcactgctgggttcttatgctgttctgaagagcacttcaatatagtagcccaaataactgtgggatgttagaaatca

SEQ ID NO: 7178 - DNA, 2080 bp, Homo sapiens
catcgattgcttctaaccctctcagcccccaaacaggaccacctgctcactctgcctccctcatcccttctgtctctaatggctctttgaagtttcagagcctcactcatacaggtaaaggtcaccatctttcattctcaccgcagagtcaaaatggccgagcaccccctcctttgtcattttcctcctcccctccttctcctgcctcctccgtctcactgaatcaaggtgccaagggcaccaggaccatccatactcccagcctcaccagctacaaggcacagaatggaagttcaagcaaagccaccccatccacagcaaaagaaacctcttaaaggtcaaatcctattaggcacaagtcggagttacatttaaaaaaaattaacagtctacaacaactgttttcacaagagaatgtaacatattgctgtatcgtttgaggcttaatgctaaatatgtgctaaatactggattaatagatttcagtaaagctcgttcgttttgtttggttttctttttacctagttgctatagtgtctacagtctatactcaatacctataaaatgcagtaagcatgtgttacagaaagaggttctggtgggagagaaaggtgcgtgtgagacaggagaattgtcttaagcatataaaacatgtatgattccagaattttagtatgttttgtataaaactatttttcattacggagactagaagtgaacagagaattacacaagtgtgactatacaaattgtaaaacagatactataatatttccttttattttagtgttatttagctttattacagatttctatttttgtcaaaacttcatggttcctttcaagatcttttttgccaaaacattttgatactatagcattgtacatttgaaagtagtgttctagactataaaaccaatgaacttctacatgagccctacagacaggcatgtgtagaaggcaatttatcaaacctattgcactgccatgaaaagtgtgtataataatttgctagcccaagcaagctagttttctttgcttgcttcttttctttcttttttccttccttttttttttttttttcttttttaacatgttgagattctctagttgttttctttggcgtatctaaccccttcttttgttttctgagacctggtaacccacgctcttgcattgtggattttaaaatgtatactctgtacggttctgtaaaccgaaaaacttttgtaaatatataaatatacatagacataaaaatactgtatgtgacagcacatagagtagttttcccacaccaaagttaatttttatgcatgctttaaaagtatatatcgggaccggcagaaatggaagtatccatacatttttaaaaagcaacaagtttgcacagctagagtgtttttgtaaataaatgtatttgtataacacagtcatgtaatatacagaactataagcagagactttgcaaaactaaataaagggctgcatgcttattattttttgtaccttgtcactataactacttcctagtcaaagaacgaaatgtaactgttaccgagttaaatgtttttccgctttgagggatgtaaccacatccactcagaggacactacttttctgaaagctctggggtgactaatgatgagttcctaataaattaattgcaagtgtggtgccttggatgtggcctgttggctcgctttcttctctgtggcttatcaaggtgtagatgacagaaagcaaacctggatacagagtttccaccctcagttcctggaggggctcttattattttctctctttttaaaaaacttccagtagaagtaaagtggaaataaaatgtctttatcacttggctttttttcttttgagtcctcaacttaaaaaattattgttggcctagagggaaatacgcttacaccatatgttttcatttgttaaaatgggaagaagccaggcacggtggcttatgctttgtaatctcagcattttgggaggctgaggcaggaggatcacttgaggccaggagttccagaccagcctgcgcaatataatgagaccccatctctaccaaaaa

SEQ ID NO: 7179 - DNA, 1313 bp, Homo sapiens
ctgtctgaaaccccaggcagtaaagcagagtttcatccctgtctttaaactgggggtatgtccactctagcaagtaaaaaaactactgttacacgttccagtaactctgtcaatattttcttgtatcagaattgttattatgcagccttcatttgggctggtttcatcattttgcactgtgaaatagctttacagtgcattactacagccagaagaacatatatatatatatatatatttaaaaatatatcggatagttgtatacaaatgagcaaggtatttgttgcaacttactacatagcatatacccaaaatcactgaagaaaatcgctggcatcagtgtgcagcaaatttgttcttttggtttcatcactaacaaaagtgcctcatcataaaaatacagttggtttttagggtgccatattgttaaaattagataacttacttacattgaataaacgaatgcgttttattggtaacagatatcattacatttaccagttttaacacaggtggatacagaacttccattctttagtcattccaggtggatctgagttttatattcaaacttttaatacagtttttgagttttgtgtgacttgaatttttaatctttctgtaaaatacgtaacttaaatgaacatattaaatgtgtatcttttcttcagataccagatttgatataatgttgtaacataggtgtgtagatagtggatcctggatggaactggcttctttatcgagaagaatataattctgcatgaggacttaatgaatccaaacctgtgtcatgcctgtgtgcatacccaattaaacactggaaataaaaattgttttggtgaattttgcatggcttgaaacttattctgatatatttttagatgtcatccatttataactaccttacatgattaattggtcctgactttaaaaaggtgcctactatatttatacattccatcttctcctctttcttgctgtggtgggtagagactctttcttacagatgcttacattagcctaacctcacttgttgactgatagtgtttaactcttctaggtaaagtaatgtatgttatgttaatgttcttttcgtgagtgaaacgaacatgagtttggagtcagtccagctctacctaggtatgtgaacttgaacacattatttaacttctctgaatttgttttctcatataaacagttagttacagtaacactacctattataagggtgattagatttaaatgagatactgttccacttacagtgcctgccacacactagtttcaaaatagaacaaagctattgttgg

SEQ ID NO: 7180 - DNA, 1153 bp, Homo sapiens
taatttttttatttttaatagagatgaggtttcgccatgttttccaggctgatcttgaacctctgacctcaggtgatccatccacctcggcctcccaaagtgctaggattacaggcgtgagcctctgcacctggctagggccagtgtttttaaccctcctcaaattccattttggactacaactaatgtgtatctcacactgtccaaattaaagatgtactctgtccttcactctcctttggatgtgtacggttagggtgacgatgtttgaaaatcaacacataactgaaatccaggatgaaacagtaagcagaactacttagaagtgaatacagaaatgatctatttcaagaggaaggttttccaaaattaagagtacttgagtagtctcaataggagtgtatttgtagacagcagtttccctatattatttggagtcaattcttacgtaatttgttgtttatttcttcagtgaacattgtctttttctggcagctgaaactgcacacaactgatacacatatttaatttgtattcctttgtagtaatacattttaaccatgatttatgtttgtgaatttactggatgttttctttctgaattaaagattgtcaagaccaattagtgtaatggactactgtcaaccacaagatggcattcctaacataatttgtctttgataacattcagtttcattttctgggagaacaacctccataaagaaatatattgaaagttgtaatgaaaacattttaatagtttaataagcaagagaaatttgttttaatttttttaaaattaaaccaattatatattaacaccagatctctggcttagcttctaaaaaggaggttctaaaaccaaaaattgaaaatcaggagcagttataggaaaaaaatggaagattcaaagttacgtttgttcatgtatgtctttattattttatcatttacttttaaggatatttcagtagatgatatatttagaaactgcctctaaatattcactatacataagaatgcattattttgcttggcatggtggctcacacctgtaatcccagcactttgggaggctgaggcaggcggatcacctgaagtcaggagttcgagaccagcctgaccaacatggagaaaccctgtctctactaaa

SEQ ID NO: 7181 - DNA, 1221 bp, Homo sapiens
atgggctggaacttccttcaagaacagattgcaaaaggcagccgaccagggcgtgtcaggtcactgccaagggaagcagcagcggaaaccgtcgcctccggcttaggctgcggagcgggaaccccattctctgagttatgtttctgcctaaacacgcagaacaaaagagttcgtggctgcaagggtggcgcgcggtagtatttcttgctaataaaaggtccccacagggacatttttgctatgactgcaggcgtggccagtctccctgcacagcttccgggaagaggtggggataggaggctcgccccggggaaggttacgctcggggtccccagaccaggtctccgcacgcccctgccccgtcgcctcccgggagcggctgcagtccccgttggctgcagacgggcagacacccgaagtgtccgcgccggcagccggaccgcaagcgaggaagagcgaaccgcgctcccgggcctggccgaagcgcttcctgtgccaggtttccggctccgggtcccgggaggaggatcgcgggccagaggcggagccgccgccctgccgcgactttcagactccgaccatggcctcgcgctggtggcggtggcggcgcggctgctcctggaagccggcggcgcggagccccgggcccggctcccccggccgtgcgggaccgttggggccgagcgccgctgccgaagtccgcgcgcaggtgaggttgggaggcgcgcgcccggcggggctcagaggtcacggctccaatgacagcagtgggcggaatgaatgggagcggggagcacgtgcgtcgcgacgcgggggcgcgcggggtagctccggggtagctccggggtgggactccggagctgaggggtgctcgcggtgggacggagccgcgcgttggactgaagtaggggcgccctacacggggttgcagaaagcggtgtcctggggaccccgggagcgttttggggggtggagaaagcggtgggatccgtgtcctgggggaagcgcaggagcgatcagattgaccgctgctatatggacaaggttaagcctggagagcgactgcagctatttactttggagttagaggaagacagatcttgcctgaaattttagagccaaagtgctcagagctctctccgagaaacggaggatcgaatcggcctcggaatagtccgaaaaggtcttgtggagaatgcagggctggtgctagggtggacc

SEQ ID NO: 7182 - DNA, 1111 bp, Homo sapiens
atttttgcagattcaaaatctgcaatggttatttacaagtcaatctactgaattccttttttaaataatcttttgaaactaagaaaatgtgtcaaattgtgtgcattcattctgtaggtaaaattcttaaggattgccatgtcagtccttcagttgtacagtgaactgttgtacactggttcaatgaaaggaagttaaaagtaccttttacatattgtaaaagtggatacagttgatttgtgagtaggcactctttaatccattacctggcactagcaacattagaattttaaaataaaataattgggaaagaaggtgggtcatgtattaatcagtgaacagagatttacctaaccaacagacttggattgtcttttgacataatcaaaatgcaacacatgcactttgtgtgtctcctcttaattgaagggagggctgagggatgttttctcttcttgtcttgtgtataattctctattgcttaggatattaaagtagagcactcaagtgtgggtttctgtgttattgaggatttgtttggaattcaaattacagttatgtactggatgctacagacttataacagcatagtgaatggtaagactagtgcaaaacagttatttctgaaaattaaagaccattattgctaccaaatcaatgtgactatttcatatgcattttgcctttgttaattttaaacaaacaaagtatcattagtgatcagctagctaccttctactttccatttttcaagtggattgttctcttaatttgtatataacctgttgtctaaattttatgtacagtcttttataataaaccattctcctatatgaaattttggatactgttaaaatataactcatgtggacttcaatgcagacttcacatttttctgacctttactcctacggtaaatcaagacaaaccatttgaattttaacattggttatttatttgtgtaatggccttacatgtggatattaacagtgtaaacaataccacatataaccatcaagataccttgattataatttataggactagaatgacagattcaggtggtttattaattacatttaaaaagttttctgaaaaaacttttgcaata

SEQ ID NO: 7183 - DNA, 1198 bp, Homo sapiens
tggtttactgaatggctatgcagctttctttgcctgataattattttgaaaagccggtgctttgcatatgataggcacttggtatttgaatgaattgaaacatctaataaattctaaaattcagagagctttcttaaagtgattgacagaacctattgatgtattcagtctaatcagattgtcatttggctctaagattaagccaatgatttaagtacatggttggccactgacctacttatattgatagatacaaaaattaagaaatcttcataaaaatagttttgctgtgctatatatttaattgtctttgtcttaaaattcaagtaaattttggatatagtgcactcatgtgatatttcaactgttttttccatagttgttgcaatatatgattatacaaaagacaaggatgatgagctgtcatttatggagggtgcaatcatttatgttataaagaagaatgatgatggctggtatgaaggagtctgcaatcgagtgactggtctgttccctgggaactatgttgaatcaatcatgcactatactgattaatttttttttttcttttgaagtagattcttattactcagtcatactgtgggactattatggttaacagaactgtcttaatatgttttaaaatgtgcccatattttcagaacatgctgttttattggtaaattgaatgtctacctgtaagcataaatctttgaggcagtttatgtattgctgaatagcaatttatacaagaagctgtccataactgattatgcttatgtacttacttacacatttttaactttatgaccagcctaaatattctgggggaagtggggtataatatttaacgaatcatgattcagattgtaccattacatgtttcagtgcagcatggttactaacgctatgtcagactaatattaaaatcagaaaatttaaatgctggtgctggtcagactttttttgttagattctctcatttaaaaaaaatactgtttgtttaaagcatgcataaaaatttatgtattgaaatatacttaaaaattcaagatgcttcccatttgtgtaatatttacctggaggactcgtacttaggtgtcttaacgtgaattgagtctccaaggtctccatgtgaaacaagcaaaaagagaattatctgtaatgttgtaatttgtacctaagttttttaatgagt

SEQ ID NO: 7184 - DNA, 1195 bp, Homo sapiens
ttccctgaaatatttttgatctatggttgattgaatccagggatgaggaacccatggatatggagggctgactgtatttgcctcgcatactagtcaagaatgacatttattatttcaagagcaaaccagtattgtacgatactccagctggagaatcagtgtctataaaggtgaattatgtttctaagagttttaatgttgctttacaggccagtatctactctggtgtttgcttattttgtgactttactacatttatctatgatattcaatatatatttcagtaaaatgcaataaatgtaaaataaaattaagataggaaagttacttttagaaagcatgaaaatttaagaaatccttggagagcattgaattagccccttgatttttagtaaatgaaatggagactttttatattgttaaaaatgtatatttttaaagtatgataatgaaaaatgttaggaaagaaattcttagcttttcaagcatatttttgaaaaaggagaaaaagccacttataaacataggcatatttgatagttaaggcaggtataaactcggtagcctctttatgtacaaaattcatactcatttgagcatgctttacatgggggtatcttttttctttttcttcccgatacattgtactttcttgctgtttcaaaatgttgagttttcttttcttgtactctgacctgaattataaactattttattagaaaacatttctgtccctcctccttctggagctccaccagcaccacctctggcaccacttctcccagtgagcactgtgataggtgagattgcatagccattggagccattgaactcactttacataattcataataaactcctctgtgctagtagagtgctggcttttatagttattaggttgcaggtgataatacaaagtttaaagtattaaatctaatatcactaacttctggtgaaaggcttctgcacttatacagtaaacaaatataaaacaactttttctataatatgaaatgcttggtttataaccaacttaatgtgtttttaatttgttgtttgtttagatttttctagtctaatcccccctgccccgcacaagtgaaacttaatttggaactctctggtatatacaacagtcaaaggatcagggtgaaggtggggacaggaggagaaaaattgaaaggcaaacgatatg

SEQ ID NO: 7185 - DNA, 1229 bp, Homo sapiens
tgagtaataaatgaaattattaaagctgcagtagtttcagagatagctgtatcaattcattaaactatacatgtttcctataagggcagcttttatgtctaaagtatttccagatgaaattcagagaaaaagtgactaaactatggctcagaatagctagctattttcttttttcccttggaatgtgaggtgttttttttttttggtttttttttgagacaagagttttgccctttttgcctaggctggagtggagtggcacaatcttggcttactgcaacctccacctcccgggttcaagtgattcttctgcctcagccttctgaatagctgggattacaggtgcatgccaccatgcccagctaatttttgtatttttagtagagatggggtttcaccatgttggccaggatggtctccaactcctgtccttaggtgatctgcctgccccagcctcccaaagtgctgggattacaggcatgagccaacgcacccagttggaatgtgagttctttgtgaagagctttcttttacctgttttagacttattagcgttgtgttctctttttacattagccgttgatccagaaattatagctcgaggtactgttggcttttccggagcagagttggagaatcttgtgaaccaggctgcattaaaagcagctgttgatggaaaagaaatggttaccatgaaggagctggagttttccaaagacaaaattctaatgggtaggtttcctttcttttttttctgtcttttacttttcattgtgttagataattcatttaggggcaaatactctattcaaacagctaaagccatggctatgttgaatctaatcttactctaaaacttcagtgtctgggttttcaagatttgtaataaatgattttacaaaattcccaacttaacatcaaacaaatgccattaaactgtaacattttcttgacaataatcttgtcagtgatacagaactgattttatagtgtaccacatttattagttttgtctctttcttagaaaacctttttttctgactggaaagctttaaaaagtgatgggaacatgaaaatatatacttgacaacaccacaatttggcatcttacgaaacaaatatattctagttgcttatgtaattatatagttaaactggtagtggggagatgaggcacgtatacatttcctcttgtcagacattgctgcgaaaaaggatactttattctg

SEQ ID NO: 7186 - DNA, 1104 bp, Homo sapiens
ataaacataataaccttatcccaccaaaggaaattatgcctatttccttaatatcatgtactctcagtcttgtttaaatgttttcaccagatgtctctagaattttttgttctttatgaaaaagcatcaaatcaggattcactaattacatttggttgtttagtcttttaatctatttttacatgaattttatcttatttagtgataaatgggtttatatttttttgcctcaagattctccctgtcatgtctcttgttgatatggaaacaatatttatataatacaggaacattaattttggacaagattctgaagtgaaccattagcagagacaagtacggtttgctgtgtttcaaaatattggttattggtgtgacctcagcctgaaaattatataaatgaataattatttattttataggttcatatcgagggattttttaaaaatactttgaatcattctcgttttcattttcttttaggaattcttttagttggacccccagggactggaaagacacttcttgcccgagctgtggcgggagaagctgatgttcctttttattatgcttctggatccgaatttgatgagatgtttgtgggtgtgggagccagccgtatcagaaatctttttagtacgttttggtgtatctttgatgcagtgctaaattttgttaagggaagtgtgtatcttaccctttctttgctaattactttttttcttcctttttttaatttctattttttggggcctccagctttgcatgctaattagttttgattgatagttaaaatagccattgtgggaccttggtttgggtaacttactatatgaattatcggaagagctagtggaagtgcaagatgaagttggaggctaccaaaaatctcttagtgttttttcattttattcatcaattttgtagtatggaattaaggagtaattagcttcaaacctgattgtatatatttgtatagctggaaagaatgaatgaatgcccaactgttttgttttatatcatttctttggtatagttttttcccccctgaagatactatttttaagtcagtaaaaaatgacgtccttttctttcagtgaatat

SEQ ID NO: 7187 - DNA, 1204 bp, Homo sapiens
ttcaaaggtaccattgtgataatgagatcaaatttataagttattatttttaattttctaaattaaataaaagaaagaatgcaaaccaggagtgaatttcaaatgagatgtaatcgactttatatcttagtcacggagttgccatggcatgtagtagaaaaccacaggaagaatggtcatattcactttgtgggctgcccataatctttcttgggcattcacaactcttgagtttggtgttcaggcatcattattaaaaagtggagtcctatgtaccagactgagtttttacaaatgatttgcaggctagacataacccactgatggaaatggtgaagaatgagcttcatgtaggtttaaaagtgtattctgagcctgtagatgattaatcaggtttttattcaatcatataaatgtattcctttgtaatcatttttgtttaactgaggatatctagtgtctgcttcatagggtgctttgaaatataaaatgaaaacttatttatactgtttttacaacagtcaaaaaggaaacacacgaaaatcacttttctgcaactgatgaactatatagactggactcttaacctcttagtgcctcagtttttccttcggggtatactattttagatacacctacttcacaggagtactggagggatttgcaagctaacgggccaaatgcttccataggaataaggcatgcccagctaacagaaatttaagtccctcttccccacctctctcatctagaccaaaaagaagactacaatttagatccttggagacttttcctgtatgccttccaaaacttcctgctcacttagatgtaccttgtgctttgaagatttctttgatgcagtctttgtaacaaataatttttttttttaaatggagtttctctcttgttgcccaggctggagggcaatggcgtgatcttggctcactgcaacttccacctcctgggttcaagtgattctcctgcctcactcccaagtagctgggattacaggcatgcaccaccatgcctggctaattttgtatttttagtagagacggggtttctccatgttggtaaggctgatctcaaactcccaacctcaggtgatctgcctgcctcggcctcccaaagtgctgggattagaggcgtgagccactgcacctggcctgtagcaaataatttttaagcattctcaagatgtatg

SEQ ID NO: 7188 - DNA, 2146 bp, Homo sapiens
cacagggaagaaggccaaggaggaggagcctgtggtggttattgctctgtgttataaactctgggaaattccatctcttgcatatttgatcagatagtgacatctttctgtatataaactctttaactgctattttagggaccttgcagtttgcacataattgttttatatcatagcagtaaatatttgcaagaaatcccactcatcgaccccgggtaaaatgttatggtaagcatgcacagtttgcagtctacagtttttttatgtagcacaaaataggtgtacctttataagtacattcaattttatgatttacatttatcatgtaatttttaaaaaaatccatctatctaggatatgttgatacaaagtctgcttttgctattctttttgcttaaatactcctatcattttctgaattacttggtatttagaactcctagcaccacggggaagaatagaggtatcatcaaacgtggcaaattttctttcaggaataataaagagcatgattccacagcttttctgggatgtttgagattcttttttagtactaagcaaaattctcatcacagaatgtagcccaggccaatttataactaaatctctatttgttcagatgatgcttctaaaacagcattgataggttaaagaagcttggtatttttaatttacttcaatgattagctcagttgcttaactggagttttaatcctgtgatatgtacattggattcatgactgtgcagcatttttagttatgtggtgtttggcagaatgacaataaggttttcccccattttggtttcaggaggacatgaatagtgtgtttattgtaactcctcatacacttttaaaaccaacatcttttttcataaatgttggtagtgtttgtccaggtaccttaactgtagcttgtgtaatgttgatgaatatctgtatcttacggcttccataatggctagttgatattcaaaaacctatttctgtgttttgaggggtggggaaaaaaaacactaagtgataatttgaaaaaggcatattgcttccagattctgatgtgtgagggaaaatactgtcacaatgaaaatcttgacaatttacttaacaagtaaccagtagttcatcaaaaccaacttgtacagactaataaatctttttcacagtattcagttttctcacctcttgctattgtatattgtagatttttttcattcatgtgttatttaatttacactgatctctgctattttaaccccccaaataagttatttgtcctttaaggttggttactataatacccctcagtaagattccagtattaatttctgggcagtttgttctctgtatacaattgcaaatgataagcatttttgtgagtgaccacctttgcaatatgtttgttaatttacttcatgttgggttctttctgaaatgtacatctttacatataaaaacctcacattctacttgatttacacttcctagtctacattacatgtggttgaaggttttatacattctatatgcttttactaaatatacaagatttactactagaaatttggagaaagaacactaacacatgtacttgtgatttgttcatgttatattaaaacttgagatttgtgtatttatgtagagtctgtattgacaagactgttgttttttgctccttgagctatataataatctgtgtattggattgttgtcttgatttggtctaaatttgaatatatatgagttacttgaatataacaaaaatgaattttgtttgatagatttatattgtaacctttttctagttcttgaataaatatagcctgctttccctagatgcatttgtgtaggaagtatatacatttccctattactctcatcagctgaagaatatgtactattgtgttactcaaattatgtggctttcattttgttgttttgttgcaagcttagtgttttgtagtggaggttttgtaaatgaaacagttgtaatatctaaggtcaggcacctagtaacagggttttgttaattcttttcagaatcattgaagcagtcttaaagggtcttttgcagatggtacaaattagaacaattagaatatagtattttgagttctagtagtactgagattgacccaaacaaataa

SEQ ID NO: 7189 - DNA, 1294 bp, Homo sapiens
gaaatcttgcattttcaaaaattcagtgcaagcgccaggcgatttgtgtctaaggatacgattttgaaccatatgggcagtgtacaaaatatgaaacaactgtttccacacttgcacctgatcaagagcagtgcttctccatttgttttgcagagaaatgtttttcatttcccgtgtgtttccatttccttctgaaattctgattttatccatttttttaaggctcctctttatctcctttcttaaggcactgttgctatggcacttttctataaccttttcattcctgtgtacagtagcttaaaattgcagtgattgagcataacctacttgtttgtataaattattgaaatccatttgcaccctgttaagaatggacttaaaagtactgctggacaggcatgtgtgctcaaagtacattgattgctcaaatataaggaaatggcccaatgaacgtggttgtgggaggggaaagaggaaacagagctagtcagatgtgaattgtatctgttgtaataaacatgttaaaacaaacaaaaattgttatttttcttttccttcggtcagtgcacattagcatttgaactacctggggattctttatcagaactgttcttgttgaatatttatacttaattgaaataattccttaagggaggttttgtttaaaacgtattaacaggaaattgtgtatgagatatttaatgaaataagaaattcaacaagaatgattaagtcacttcccaagtggttgtcatttgttaaaccctggtttacctgtcttgctattatgacatttcatttggaaggatgtttgtgttgtagctaactgttcaagtctggtgctgactgctgttcttagccatcacaaaacgctaaatttgtgtaattggagcttcctgctgttatctggaaatagcaggaaagcgcagctttgtatattgtttcctaaagtatattaaaataaaaaaagaaactattgctactataaaattaccttgactttttttttcctttgctgaaatattagtcacatagccttagcttcacactgccagtaatgtatcaaatcacaagggtttccgcatgaaaaaaatcttttcttcccccacaaaaaaacctttaccatcaaaatcttgccatctgatttagaaaggtgtttcttcttcttcttcttttttttctttaaattggtttagggttttttggtgattttttttttttttttttttctgttggggcagataagtgcttccaaaactggcagcaccaagggcttattttttatgttaga

SEQ ID NO: 7190 - DNA, 1907 bp, Homo sapiens
tgacaatttttgctgccgtatcaactagaattaccaaaaaacatagttttatctttgtatgtgtgtggggatctaccctgagaccatgcttttcttcccaccctgccaccccacccctttaaagaaatacgtatttttatctagaatgatcttgaattagtctctgcatatttttagaaagtgcttggggacattatatatatgccattacaaaagcattatgaggcctatgtattctactgtgtttaatactgcattaacctgcacaaagtttatgcattttttcatgcatttttttccttctttctaagtaaggtattcctgacaactaacattccctaaatcatttcccctccctccctccctccctcccttcctttcttccttccttctgtcctccctcccttgctacctcttgccctccttccttcaccctgtcctccttttcccttttattttttccccttctctttcattttattttcttttagagaaaccaccttatctatttttagacatttcgaattcctaaaatgtgaaccgttgggtgatctgtcctttggccctaaaacggctggccgggctgtcccggcctgttctcatctgtaccgtatgattttatttcataataactttatgtatttggactgtaacaaacaaaacagaacctaagtcgccccgaaaaatctttccaagccttttcaaaacacttatctgcagtccagaattcagctcttatgaaaagtgagagtgcactccagttttcacagcagcaataagtgcgggaaacaaaaagatcctcttcccaggaaaagttgagtggggaagagttcagacactgttgtagctggtgaatcattgaagtcacctggtagtaccaaataagggctgaggcgcctggaggtctttgtggggtcttccctctttaaatgcaaacgtaagaaggtatatgtgtatatacatttatatacgtgcacatgtatactcgtacatgtatgcacacatacccatacatgtatatgaactccgttctgatttcctctgaaattttgttgataccatctaaatacctctttgaatcaaaataacttaattttagctcattcctcaagagaaagagaaggatccccaaggaagaaaaactgttgtaccttctgtgattctcaaaccaaaatgtgatgcgcttctgttttgttatcttaaattgttgtatcatatctttctgaaaccattctgaattaagttgaaattttcaacatttatactttaactgttctaaatttaagcctacatgtaaatcttttttggggggaaggtaacttgaaaagtttaacttgaaaatttgacctttaaactttcatattctaaggtaaataatagcctataaccaacaacagctttcccagaggtcttgaatttaacactaattgtttagttattgtttctatttctcatacatacataacttcgttttttgtggctggaagaaaaagtttctatattttgtatttgtctttgttcttctcatgcacacaatttactgttggtgtttaataatttggagctcataaaattaaaagttgtaattttgaccatttgggctaaaaattatatgagggattacatatgcaatggattagtatttcttgatttgcaaaagaagggaaaatgatggtaatttagctcaaattgcctttctttgaagaaaatttctgaatgactgaaaaccaaatatctatattatcactttcaacctcatgtttctgcaaagtacagaaaaactcctcactgacagtgcacccagcccctgactgggttttcaggattatgtccatgtgcataactgcttggatttcttcttttaaagtccctaaaacatgaatctgttctttgagatcctggtttcc

SEQ ID NO: 7191 - DNA, 1246 bp, Homo sapiens
agcctgggcaacaaagcaagaaggaaagaaagaaagaaaggggaagggagggaagggaagggaaggccagagtaactcattttaacagagagagaaaaatgaaatgaagcaaagtctcaaagaagtggtttggcaggattctctgttacaactaactttcggttttgtatttattttcaccaaatagttattttcaattccaaccccatttcggcttagttggcattaagacatacacggtgaccccgcaacttttgtgaagatagttttccagcgaatcagaccttttcgaagaagaaaaaactcttcatagacttggccattaaaaccctgtgtctgtttctgagttccagagggaactggatatcccactgtgcttcagcagctgtgaggtcagtgtccatgacagccccagaacaagtccctgaaattttaagaaaggtgaatctgcacatttatattctcagtgtctgctgccattgaaattccagatcataattcaggagaatgaagtcactttaaagtgcgaggatgggagggagagaaaggctgagggaatgctctctaaactccagatgatcattctgcggtcagggaatgagttggcctgaggttcacatcaccctattgtgtgagcacgtgcatgctgctgtttgaacccaggcacaaaatacttgaaggtgattgcgatgccctgaccaggctcttctcttccagtactctgccatgttccctgtttgttttaacctgcaggaagaaggaggagttgcggatgatagtgccatttctaatctgctttgggtaagcctgactctaacacaggtgtcctctcgatggtggccagaattacacttcgcgtgggtaatcctgatcctgggtggttccttcgtgcaccctccctggtgcttttcttatctccagaccagacacagcctttgtccggagtggagagctgagcccgtgcccttaaactattttttaatcatgtaatgaagatactttaaagaagatgatattttctgtttaatgttaaaactgtcaatgaaagtcatggttcctctctctgtaactgacaatcttctataaattaactcatttaattactgcacaaagctgactcaggtatatttaccgcgcttgtgtggatttactttagcattagcattcaagggaggactctcttgaaaagagaactgaaattgcaatgagtaaattaacattctgttagaaaaatcattgttttgtc

SEQ ID NO: 7192 - DNA, 1190 bp, Homo sapiens
tcatgtccaacaccaccgcaccagggaaatggatatatatttttggactggtgtttttcacaaagtatttttcaatcagagttttcagaacctgacattgttaaacatactgcttgtcccggagttgtgtattttgtaaatgttcaagggaactatttggaaacttctttccaccattcagcagattatcagaattgataagagtatgttatgtgcacttaagccgcagctgctatagatagcagtgccttcttcttccagctagacaatgcttttttttttttgaagcagttctctttataaaatgttattttgatagtttgtggattctaaaatatatgtatatatttatataaacaccatataagtcaaatatgtatttaacaaagcaatatgtattcattcactttcaagattttttttggtgtcaaaataatatgaaaaggtagatggagttgcttctgttgaattagctctgccaccaagacgtatcttcatacacgtttggaaacgtttcctgcagcattaggtatgacttgttctaagtactgcttccggtgctaaaatgaacaacaaatttgtacttaatggcacggaccctggagaatttatgcgaatcaacctttctaccttaatatctccccctaaatgccttgtttttatgtacagtttatatacagaaaagtttgctctgcatcttccatgatggtttggaacattatctacagttttactctcaaataaccaaaataaaaacatctcaatttctaatacctgttgtaaacattacacatcattttgtgatacaggacttttgtcttgtgcgtttggaaataaaaacatcagaataaacataacaattaatttattagttcaaattaaattaaattccaagcatgttcctttctggaaatctttttttttttttttttggtaaatgttaacctagcaccaatattgtatcattaaatattaatggctatatatttgaatttcgtttagggcaagattttatacaagttcataagattaaataaagagctatttgccccataaaattattactcagtactatattgaagacatatttttgcaaatcatcactcaacagaagttcttttgcttttggttttttttttttttttttttttttttttgagacggagtcacactcttgtcgcccaggctgg

SEQ ID NO: 7193 - DNA, 1114 bp, Homo sapiens
acaagcaggtaagggttctaaaacccacatcctgtgcagaatgtttgaaggacctaggtatatttaacctatataagagaagtttaagaatacatatagcagctcttgatccatttgaaggtttgacttgagaagaaaagttacacttgttctgtgtggcatcaggacaaactaggatagggaaataggcatcatagctatttttttggctcaaactcagcctgtctcttagtagaattgcctttttaaaaagtgactagcatttgttgagagcatactaagagttttgctatataatctcatatgacccctataacagtccaatgagaatgtatctgcatttgcacattgaaaaactaaggcttggacaggttaagaaaatactatgtgatggagccaggatttgaacccaaatccatggacctcaacagaaccagacaggaccatcttgtgcagggctgtccagcaggtcctaactccccttttattaaagaagctcaagcagagattagctggtgtcaagaatgatatgaaatgaactcttcattgaaaaggaggctgtactacaagggtttcttaaatctcttccaattcttatatatgattcttcaaataatcatatttattagaaaatataactcacatgtttaaactatagcattgaagttactattaagcaatttttagtagggcttaaattgattcctcactgctttcattttaattcttaaaaagagcaggagatggagagttttattttgatactaagtagacaaatcagtgtcatcacatctcatcattcaacaattagccattcactcatccaaaaaaggtttaatgagcatctttgcaacctgtactttgatgggtgcaagggataaatggcaaacaagcctcagaggctcctgccttactgaagcttatagtctgtaacctttaaattataaattagtgaactataacttaaaactcaaaggaaacattaggtttgtaggaaaatattccatttagctcggtgctttcaaaattttctaccaaagtatccctaacagccaaggagaataaatgccttttaccccacagagtctagggaagcagcttgagggaagcctct

SEQ ID NO: 7194 - DNA, 1256 bp, Homo sapiens
cgcttctcacactctgggtcttattctcaacacatgaatcatcgctactcctactgtaagagagaagcggaagaacgtgacagcacagagcaggaagaggcagggcctgaaatcctctcgaatgagcacgtgggtgccagggcgtctccctcacagggcgactcggacgagagagagagtttgacaagggaagaggatgaagacagtgaaaaagaggaagaggaggaggataaagagatggaagaattgcaggaagaaaaagaatgtgaaaaaccacaaggggatgaggaagaggaggaggaggaggaagaagtggaagaagaagaggtagaagaggcagagaatgagggagaagaagcaaaaactgaaggtctgatgaaggatgacagggctgaaagtcaagcaagcagcttaggacaaaaagtaggcgagagtagtgagcaagtgtctgaagaaaagacaaatgaagcctaatcgtttttctagaaggaaaataaattctaattgataatgaatttcgttcaatattatccttgcttttcatggaaacacagtaacctgtatgctgtgattcctgttcactactgtgtaaagtaaaaactaaaaaaatacaaaatacaaaacacacacacacacacacacacacacacacacacacacacaaaataaatccgggtgtgcctgaacctcagacctagtaatttttcatgcagttttcaaagttaggaacaagtttgtaacatgcagcagattagaaaaccttaatgactcagagagcaacaatacaagaggttaaaggaagctgattaattagatatgcatctggcattgttttatcttatcagtattatcactcttatgttggtttattcttaagctgtacaattgggagaaattttataattttttattggtaaacatatgctaaatccgcttcagtattttattatgttttttaaaatgtgagaacttctgcactacaaaattcccttcacagagaagtataatgtagttccaacccgtgctaactaccttttataaattcagtctagaaggtagtaatttctaatatttagatgtcttagtagagcgtattatcatttaaagtgtattgttagccttaagaaagcagctgatagaagaactgaagtttcttactcacgtggtttaaaatggagttcaaaagattgccattgagttctgattgcagggactaacaatgttaatctgataaggacagcaaaatcatcagaatc

SEQ ID NO: 7195 - DNA, 1153 bp, Homo sapiens
cactgggacatttcatccttcaattcctcggtattgattttatgttgattgattttcagaatttctctacagaaacgaaagggaaattttctaatctgctttatccatgtacttgcatttcagacatggacatgctattgttatttggctcataactgtttccaaatgttagttattatggacccaatttattaacaacattagctgatttttacctatcagtattattttatttcttttagtttatagatctgtgcaacatttttgtactgtatgtcttcaaacctggcagtattaatacccttcttactgacatatgtacttttagttttagaaaacttttatatttatgtgtcttatttttatatttctttatttattacacagtgtagtgtataatactgtagtttgtattaatacaataatatattttagtatgaaaatttggaaagttgataagatttaaagtagagatgcaattggttctcctgcattgagatttgatttaacagtgttatgttaacatttatacttgccttggactgtagaacagaacttaaatgggaatgtattagttttacaactacaatcaagtcattttacctttacccagtttttaatataaaacttaaattttgaaattcactgtgtgactaatagcatgatgctctgcagttttattaagaaatcagcctaaccatacaactctcatttccttagtaagccaaattaggattaacttctataaacagtgttgggaacaatgtttaacattttgtgccaatttgttcctgtattcatgtatgtaagttacagatctgactcttcatttttaagttccttgttacatcatggtcattttctagttttttaccagactcccatctcacaataaaatgcatcaacaagcctgaactgctgtcattcttttcatcattatcagtattttctttggaaaactgtgaaatggggtacattgtcatcctgcatttgattcatcttgagctgaatttgggtaacactaaatgttttagacattctccactaaattatggattttcttgtggctaaatgtttctggagaggtcagagttgacaaaacctcttcacaggttgctccttcttcctgaaatccttaatcctccgcatttca

SEQ ID NO: 7196 - DNA, 2233 bp, Homo sapiens
attcttactgaagacaacctgtggaatagaagctggattccatcagatttcaaatgtttatacacaatgtattttattttttggaccaagcagtgactctttgattttgcactttttttttgagggatcagaagggaaggggagagtcgagatgtgtgttaggccctcatatttgctgctttgttgcaagttgatataactgcgtgtaattatgaattcattttatcctgaatgtttgcatttcatactctgaatttcagtaaaaatcaaaacttaaaattctaaccagtcatatacactggataatttggtaagaaaactgtattttttttccctgaaattggataatgtactttcttctcaagattcatgacttgatagaacaatactttcagttatgttgcaaaggctcttgggcattttaaacaaaatgaagtatatccattttgaaacctgtgtatttctttttcggggtttctgcatgcagtggcagtcttaagtgccaaaattcattataaccccaaaataaccccttgatgaaggcttgctgtcttttactgtgttacacagcatccttactggatatcttagttgcttgtttgggcagcacactaatattacttaaaacactgtgatatactggagttttagttagcggaagtcagttcagggcattttagggctgtcttgctatactgaattgtagctaacaatcctaattatatctagtaccatactgagttattggtatgaccctgtggaaacacacattattttatgtaaatataggctaaagacttaatgtcctttagcttgtgtatataattgtgttgtatagtctcagagtacattctaaccctacatttctaatcattgttattggtaatcttttctgtgaatattaggtttcctccagaaatagtccgttatttgggaaagttaactgtgtgcacttttagatattaactacatttacaggcaaatcactgtaatgagaatggtactggaaaaatactgaatagacttgctaaatggcacatgcactacaagaggaaccttttgggttatttaatatgtacagaaaacattagaaaaaatttattacagaattctaattccagtatgaatagtggaaacccatctgtaaattagatggatgttggatggaaaatgacattgctaaatttgagaatttctttttacctactaatgtagattgctttgtataataaaacacagggtttggaaggttttgttacagggagcatggtctgttgaagatttttaaaatgtatttttctagattaacttctgtacatgaaatgtctaataaaactataagaggtttagagatttttccattggaaatgtgcattttggtttctaatttttttgttttttcatttactggcatactgttatacctcatttttaaaaatcaactgaatccaatatttcctgtggcaaataacactttcctcatttcataccttttctcctctcttccatgccaacatttctccacccacaacgtacactttttatttctccatcaatatttgaaagcgagtgatttgtgaccaggatttttttttcttagggttgcatttataatttacagattgccttccttgggaacaagtatttttttgtatgatctgtctaaaaacctctcacctgaattttgtggtagaaagtctgtatttgttgttgtgagcgtgttaaattgataacaaaccaaactacttgatagctaaagcagattgtttcgggtggggagaaaaagccctaaatcagaatgtttatatttgcctaaagatgtccttaataatacaatatgctttagatcttgcttatttagtgattgtataccaggaaaacaattagactcaaatcagtgatgttcttgttcttggtgttcatgaacatatatcaaagattaaaattgtcctgtgtttcttgtttcaaggtacgtgtgtgtgtgtgtgtgtgtgtgtgtgtgtgtgtgtgaagtcttaaatgttttattagtctacagctaatcagtttattgtaatattgtatgtacagtgagattaatgtcttgcgttttcatcctttgtgaattaaaaattctcacttgttttgtaataacaaagctagtaatattttcctgtcttgacagcttggttttatagtagaaaatatattaaaagctgaaataaattatcagtggaattttatttgttagtaa

SEQ ID NO: 7197 - DNA, 1538 bp, Homo sapiens
caaacaggtgggaactggctcatgctgtagtgatgtgaggatgcagtgatcatttaaacccgtaatgccgtgttctaggaggtgatcatttaaacccgtaatgccgtgttctaggaggtactaaaatattttggaattgttatagaaatgaaagtaaatgcatattagttattagtgagcctttctaagaaggtgaaggaggtttgagggagtaatgaaaggaaggaaagttcttctcaactcttgtgtctacctggttagtgtatatttactgttccagttatcggcttttgttttggtcataagtgactgaaaaatgtagattacaattagaatgaaagtgtttttaatgtggcagtgcatatgatagtagacacatgtttgctttttggggtttgagatttgaagtaatgttctttaaatggcctatactatatgatgcttgtgagtaaatacgaaatccagattgcattaacttttttcttcattctctttctccatttaaataaaacagctatattcatccaacaagccataaagccataatgtggtataacatcctttttgagaggtgaatattattgaatgaaaatggctgacagaagtgggaagattattccaggacaagtgtatattgaggtggaatatgattatgaatatgaagcaaaggacagaaagattgtgataaaacaaggggagaggtacatcttggtgaaaaagaccaatgatgactggtggcaagtcaagccagatgaaaactccaaagcgttttatgtgccagcccagtatgtgaaggaggtcacgcgcaaagctctcatgccacctgttaagcaggtagctggtctgccaaataactccacgaaaataatgcagagtttgcatcttcagagatcaacagaaaatgtgaacaaattgcctgagctttcaagtttcggaaagccatcgtcatctgttcaaggaacaggtcttattcgtgatgccaatcagaattttggacccagttataatcaaggtcagactgtcaacctaagcctggacctgacccataataacggaaagtttaacaatgactcacattctcctaaagtttccagccagaataggacacgctcatttggtcattttcccggtccagagttcttggatgtagagaaaactagcttctcccaggaacaatcttgtgattccgcaggagaaggctctgaaagaatacatcaagattctgaatctggtgatgaacttagcagcagctccactgaacagataagggtaagattaaaaatagaatgaggaaacactgtaccaccctagtgaaaatattagttatagttttaattgaaatatttgtaagagttaagacttgttttgctttgtattttcagagtacatgggttctatcctgatttagagatctagaaaatatgtgaaataacttgtggagttcataaagggtcactttggttttcataattattcttataccatgacaggactagatctactttaagtgaggaaactttttttcccttttctctatt

SEQ ID NO: 7198 - DNA, 3025 bp, Homo sapiens
aattcataaatcagcttacccatagctttatttgggagaataaaaacaaagggagggctgacctccctttaaacattactgcttctaaacagttctacttaggtagtatataaaaggaaaccaaatcatttaatattgccatccttctaattttggggaaagtagccacagatgttggctaaaatgtttataataaactgttggcatattttattttgttttattcttcatgattatctcaaacaccaattttgtaaaactaaacatatttactctatgctttctcccatttttaggtgttaaaaagtaatcgaagtacgaagaggacatggtatcaagcagtcattcaatgactataacctctactcccttgggattgtagaattataacttttaaaaaaaatgtataaattatacctggcctgtacagctgtttcctacctactcttcttgtaaactctgctgcttcccaacacaactagagtgcaattttggcatcttaggagggaaaaaggacagtttacaactgtggccctatttattacacagtttgtctatcgtgtcttaaatttagtctttactgtgccaagctaactgtaccttataggactgtactttttgtattttttgtgtatgtttattttttaatctcagtttaaattacctagctgctactgcttcttgtttttcttttcctattaaaacgtcttcctttttttttcttaagagaaaatggaacatttaggttaaatgtctttaaattttaccacttaacaacactacatgcccataaaatatatccagtcagtactgtattttaaaatcccttgaaatgatgatatcagggttaaaattacttgtattgtttctgaagtttgctcctgaaaactactgtttgagcactgaaacgttacaaatgcctaataggcatttgagactgagcaaggctacttgttatctcatgaaatgcctgttgccgagttattttgaatagaaatattttaaagtatcaaaagcagatcttagtttaagggagtttggaaaaggaattatatttctctttttcctgattctgtactcaacaagtcttgatggaattaaaatactctgctttattctggtgagcctgctagctaatataagtattggacaggtaataatttgtcatctttaatattagtaaaatgaattaagatattataggattaaacataattttatacggttagtactttattggccgacctaaatttatagcgtgtggaaattgagaaaaatgaagaaacaggacagatatatgatgaattaaaaatatatataggtcaattttggtctgaaatccctgaggtgtttttaacctgctacactaatttgtacactaatttatttctttagtctagaaatagtaaattgtttgcaagtcactaataatcattagataaattattttcttggccatagccgataattttgtaatcagtactaagtgtatacgtatttttgccactttttcctcagatgattaaagtaagtcaacagcttattttaggaaactgtaaaagtaatagggaaagagatttcactatttgcttcatcagtggtaggggggcggtgactgcaactgtgttagcagaaattcacagagaatggggatttaaggttagcagagaaacttggaaagttctgtgttaggatcttgctggcagaattaactttttgcaaaagttttatacacagatatttgtattaaatttggagccatagtcagaagactcagatcataattggcttatttttctatttccgtaactattgtaatttccacttttgtaataattttgatttaaaatataaatttatttatttatttttttaatagtcaaaaatctttgctgttgtagtctgcaacctctaaaatgattgtgttgcttttaggattgatcagaagaaacactccaaaaattgagatgaaatgttggtgcagccagttataagtaatatagttaacaagcaaaaaaagtgctgccaccttttatgatgattttctaaatggagaaacatttggctgcatccacatagacctttatgttttgttttcagttgaaaacttgcctcctttggcaacattcgtaaatgaagcagaatttttttttctcttttttccaaatatgttagttttgttcttgtaagatgtatcatgggtattggtgctgtgtaatgaacaacgaattttaattagcatgtggttcagaatatacaatgttaggtttttaaaaagtatcttgatggttcttttctatttataatttcagactttcataaagtgtaccaagaatttcataaatttgttttcagtgaactgctttttgctatggtaggtcattaaacacagcacttactcttaaaaatgaaaatttctgatcatctaggatattgacacatttcaatttgcagtgtctttttgactggatatattaacgttcctctgaatggcattgatagatggttcagaagagaaactcaatgaaataaagagaatatttattcatggcgattaattaaattatttgcctaacttaagaaaactactgtgcgtaactctcagtttgtgcttaactccatttgacatgaggtgacagaagagagtctgagtctacctgtggaatatgttggtttattttcagtgcttgaagatacattcacaaatacttggtttgggaagacaccgtttaattttaagttaacttgcatgttgtaaatgcgttttatgtttaaataaagaggaaaattttttgaaatgtaatgactttcttaaaacttaagtgttaggttgattttacatggctgagttcaggccttctgtcttgacagaatagtgactgatatgtcattatatttatgtatattttgtttcctaatgtcttgcagccttttggaccgcagatattaaatgtataggctaaagagctagaaatgaatgaccagtctcacatataaaacttttttttttttttttttttttttt

SEQ ID NO: 7199 - DNA, 1161 bp, Homo sapiens
cctggcccaaatctaaatttttaagcaactcttgtagaatgccattttcctttattacattaatttgcatgtgactgcagtcgatctctcctagccaacttctccatgaatgaatactctttcctgtattactaagcactttatctgtcctgtccctctcttatggttctgaccttctatcttgtactgcacttattcatgtgcctatcttctcttctactgtgttccttaaacacagtctttgattttctttctgccttgcagcatccagcacagtgcctgcacatagttgacatttagtaaatctgtttaatgaataaatgttgccacactgaataccatccatatttcactccatttgttcttgacaaatggtgaagcttcatgggtgttttttaaaacctgtatacttttggggaaaataaattattttctgtcctatagcttttggcatctaccagaagggatcaagacaatatgcaagctgagctgaatcgccttcaagcagaaaatgatgcctctaaagaagaagtgaaagaagttttacaggccctagaagaacttgctgtcaattatgatcagaagtctcaggaagttgaagacaaaactaaggaatatgaattgcttagtgatgaattgaatcagaaatcggtaggatatagttttattttcttttttaatgctttagtacaagtattcttaacctaaaaactacttaaataacttacttttctatgtaagtcaaatatcgataacatcaattttcaaggactcgggtttcaacttcatttctttctgtatatgaagccttagaggtggaggaagacagttattttagttcctaaaggtctgttaatatctaatttaaatgctgttttagaggatgtttgctactcctaattttaatttttttaatttagtatatagcatgtagaatctaatgttactactaatgttaaaggaaaaataatttaaagctgctagttgcccaataaagctattagatgattgttcaaacaataaattaaatatgcagtacaaattaaaatgctatttaatcaactgtgaattatttggaatagatgtaaggatatgtaacttaacataatttatgttttacttactgttacatttccactacgtggaacagtgcctttttag

SEQ ID NO: 7200 - DNA, 1183 bp, Homo sapiens
acagataaaatttgatgtctctctaatcaaactcttaagagtagtactcaagaaatggtggtatgcttggcaaataagatcatgaagcttttcatgttcttttttcttttttactggttattgatgacatatgaacattttagaaaatgtaaagaaaattataaacttgtaattttgtttcattcttttgaaatcttatgtataggttagtaaaactggagctgaaggtgctgtgctggatgaagctaaaaacatcaacaagtcactttctgctcttggaaatgttatttctgctttggctgagggtagtgtgagtatacatgtcttctatctccctgttaccttatggggcattatttaaatataggtgtatatgtgtgcctgggtgtgtatgagagagagagagagaaagagagattgagattcaatgtgtttgaatcagtatgtgtaagttagttgtcttttgggagtttattttataataacattttattatactggtcttgttttctttctttgtttttgtatgcagacatatgttccatatcgagatagtaaaatgacaagaatccttcaagattcattaggtggcaactgtagaaccactattgtaatttgctgctctccatcatcatacaatgagtctgaaacaaaatctacactcttatttggccaaaggtttgttgttaagaaagtacaaaacctaaatttagatagaccttttgtttataaaatgtaggaaaatgtgagctgttattccaacctgtacatactgttttgtgctagacacactcagtttgaattgatgacagataatacaaggtgggtctgatttttagactgcttggtttaagttttagtacacattaaagtcagatgtaattttagtcaaatttgtgtgacaagctgtaatttggtattaaagaaaataagcatttgaatcaaataatgaggtcaaagcctggcaaacataatcctctgttaagcctgtagacatgcatgacaggttaatataatctgtatgagatgattaggaaaatcagtaatgatgattccgtctttgactttcaacagtaatttcttaattcagccttgcaaacaaattggaaaaatataggcctttgtcttttatttttagtggtttgttgatttttttttttttaaagctattcacagattttgg

SEQ ID NO: 7201 - DNA, 1850 bp, Homo sapiens
gaatccacgatgacagcacattctgtgccatggagaacattcttaaatcaagcctccagtggaggaaggactcaagaatgaaatagcaccagataacggggcatcattagacttgtaaagcaaagcttccattttctatttttatataaaccattattaatgcctttaaaacaactgtgatatctggacaaataaaatagaaatgacttcttaagatgattgcaacttttagtcttgatttataaaaattattctacataattttagtagggtaactgataatttttctcactttttttttgttgtagggtgaaaatcctatttataagagtgccgtaacaactgtggtcaatccgaagtatgagggaaaatgagtactgcccgtgcaaatcccacaacactgaatgcaaagtagcaatttccatagtcacagttaggtagctttagggcaatattgccatggttttactcatgtgcaggttttgaaaatgtacaatatgtataatttttaaaatgttttattattttgaaaataatgttgtaattcatgccagggactgacaaaagacttgagacaggatggttactcttgtcagctaaggtcacattgtgcctttttgaccttttcttcctggactattgaaatcaagcttattggattaagtgatatttctatagcgattgaaagggcaatagttaaagtaatgagcatgatgagagtttctgttaatcatgtattaaaactgatttttagctttacaaatatgtcagtttgcagttatgcagaatccaaagtaaatgtcctgctagctagttaaggattgttttaaatctgttattttgctatttgcctgttagacatgactgatgacatatctgaaagacaagtatgttgagagttgctggtgtaaaatacgtttgaaatagttgatctacaaaggccatgggaaaaattcagagagttaggaaggaaaaaccaatagctttaaaacctgtgtgccattttaagagttacttaatgtttggtaacttttatgccttcactttacaaattcaagccttagataaaagaaccgagcaattttctgctaaaaagtccttgatttagcactatttacatacaggccatactttacaaagtatttgctgaatggggaccttttgagttgaatttattttattatttttattttgtttaatgtctggtgctttctgtcacctcttctaatcttttaatgtatttgtttgcaattttggggtaagactttttttatgagtactttttctttgaagttttagcggtcaatttgcctttttaatgaacatgtgaagttatactgtggctatgcaacagctctcacctacgcgagtcttactttgagttagtgccataacagaccactgtatgtttacttctcaccatttgagttgcccatcttgtttcacactagtcacattcttgttttaagtgcctttagttttaacagttcactttttacagtgctatttactgaagttatttattaaatatgcctaaaatacttaaatcggatgtcttgactctgatgtattttatcaggttgtgtgcatgaaatttttatagattaaagaagttgaggaaaagcatttctggttggtgggtagttcacttatgaagctaaaacataattctttaaaaaaatgtactagggacataaggagagtggtatggtgaaatacagacttgaagactgtccttgggctctctgaatcatggtggatagatccttacttatcctgctacgctgggagagaggtttcatcccaatattaagcagaattaactttatgaacatcttagagccattagt

SEQ ID NO: 7202 - DNA, 1094 bp, Homo sapiens
ggaatatctctccatttattcagtctgaaagatttctttttatcagtatttagtaattcttaacatgcaaatcttgcatatattttgttagacttatatgtaagtttttcatgctttttcattctgtagtaaatattactgtttaaaaacttatattttcaatatgtagaaataaattatatatatagaaaaatacatgatttttgttcattgatcatgtatcctgcaaccttgtaaactcacttgttagttctaagagctattttatagattctttgggatagtgtgcgttcactctcttgggtgtttattcctgtatgttttttataagacactgcacagctctttgtggtgctcattattaccttcttattttccagagtgtcccactggtccagacatcattccaattgtagctggtgtggttgctggaattgttcttattggccttgcattactgctgatatggaagcttttaatgataattcatgacagaagggagtttgctaaatttgaaaaggagaaaatgaatgccaaatgggacacggtaagttacaaaacatccaaaaagcaaagtggcttataaagtaaatgtaatactcctaagacttatgtattagctgtcaggctgattattaaagtcctttctaagtattttattcccccaaaagtttcttactcaaggaatttgcatttagtgaaaaacagaaagcatcctaaatatatcccattgaaacaaaacattgattataagcatgtatattctggttactgtggccagtatttttatttctttaatagttttgatcctaaatctgccttttcatctaatgtgaagtagaatcctaaataatgttatctgtgtagcaagctattcaatggaaagctgcttctttctttaaaacaaacaaacaaaaaaaaccttcagtgaaagccagattcaaaaggttatataccaagcttgtccaactcgcagctcgtcggccaggacatgcagcccagaatagctttgaatgtggccccaacacaaatttgtaaactttcttagaaattgtaattattattattatttttttttggtaacttttttttaa

SEQ ID NO: 7203 - DNA, 1190 bp, Homo sapiens
gtgctagcagtgagcgaggctccatgggtgtgggaccctctgagctgggcatgggaccctctgagccaggcgcgggatataatcttctggtgttccgttttctaagagcattggaaaagcgcagtattagtgtgggagtgtcctgattttccaggtaccgtctgtcacagcttcccttggctaggaaagggaattccttgaccccttgtgcttcccgggtgaggcgatgccccgccctgcttcggctcacactccatgggctgcacctactgtccagcaagccccagtgagatgaacccagtacctcagttggaaatgcagaaaccacctgtcttctgtgtcgctcacgctgggagctgtagactagagctgttcctgtttggccatcttggaacctcttaaattatttttgttttgtgtgattgcaattttggcatgtttcttcaggtgcaatgaagggcgtgttggtagacattgtgaatgcagcacagatgaagttaacagtgaagacatggatgcttactgcaggaaagaaaacagttcagaaatctgcagtaacaatggagagtgcgtctgcggacagtgtgtttgtaggaagagggataatacaaatgaaatttattctggcaaattctgcgagtgtgataatttcaactgtgatagatccaatggcttaatttgtggaggtaagtaaagggcctgaagtggttgtaagatgtgatcccatctaatgccacgaaaaatcttgagtttagttggtgcataagtagaaaaggggtagcttgagggtcagtctcgcccctaggtatactttctcacatgttgttgcttattttacttttcagtcaatactgtgattgtatatttttaccattttgagaaatgatatgcttaattgcaggaaatggtgtttgcaagtgtcgtgtgtgtgagtgcaaccccaactacactggcagtgcatgtgactgttctttggatactagtacttgtgaagccagcaacggacagatctgcaatggccggggcatctgcgagtgtggtgtctgtaagtgtacagatccgaagtttcaagggcaaacgtgtgagatgtgtcagacctgccttggtgtctgtgctgagcataagtaagtatttcctaattgcttgaaatagttgatacttcctcttggctctcctaagcctgtattgtt

SEQ ID NO: 7204 - DNA, 1183 bp, Homo sapiens
gtgtggtttggttttgctccctgcactgcagtgcccagaaagccaaggtgatggtggggcaccccttctttttttccttttctcaggggttacagtcttagccatcttggtccccagttcctgctgaaaatagttgtttcctatttttgactagttttctagttgcttatagtaggaagttaattctggactactgtatcttcttattgctggaagtggaaatctcttaaaatatatttgaacaactgttctgccaaaggcttctaccatctctttacctcattcttactcttaaaccccttaaaatgggcttcagcccctctctactgaagaaaattcttttcaggtgacaaaattgccaaatctggaggccatcaggaaaatgtgtccacatttgacttataggacacccttcttccttggtcactagtgctctcctgtgtcttcactgctgatccccaccttttggggagttcatttgtccctgttgtgattctcacgtgcctacacccttgtctatgtttctccctgtcacgtcttcagctgtcactggtatgatttccattgacactgtagtagtgccgctctgtggcacacaccaagcctggctctgcacacatgtctctgggcatcctgacagcatcacgaactcaacggggacagatctggtggggtctttattatccagaccgtggctgccactgtgtaccatctctctgctcttttcaccagcaccctgtccatctcctgtgctcttcttgcttctccgtccttagccctcatacctagttccggagtgttattgattctatttctatactttttctcagatcagttcttctccacacattccttgttttgttttgttttgttttgttttgttttgttttgtttcagggatgtattaccccttgtctggcataatgaagtcacagcatttacgtgtccacacctgtctcagcccccttgatccctcttagtcctgtctgttacctttctaaattctagtcagggtggcctcactcaccctctccaaagaacgacggcagaatcaagtccaacttacttggcgtggcattctcattctagggaagcactgctgactcaatccccagtatttatcctcattgaaactagtcacctagggctctttcccatcccatattgcgtcaagcattttcct

SEQ ID NO: 7205 - DNA, 1229 bp, Homo sapiens
ccaataacaacagtgtttattgatttgcacagtatctaggcgcatagatattcctcagactgtttggttaatgattgtcttctatatgtttggaatcactcctttgtagacattagtggaggttgaggtatttacttcatgatctgctatgatacaaaaggaactttgtattgaaattctggctgattaccttagggagttattaattttatgttaacaggttgaattttcatatggagtaatcccctatgtaggactctaggctaaacggagctttgaggctttgtgatgcattcctatgtgaacacatccctggcgaaaggcttttaaaagatacaccccaaaaggaagagcctttagagttgaaaggatgtcagatgtcatcagtcacactttcccatttaacagatgaggaactaagtcctgatatcccatgatgttttttgttttactttgtttttggctatttcctttttctaaaaatagccctctctggggaatgctgagatcttcattctttattagtatcaatttataattatctacatctgtaagcagttattcgaaagtctccagatcttattctatcctggcacccatggtgactaaaaaaatcaaagacgttaaatctttgaaagcagccttcaaaccacatactccagccaacttaccttatatgtcggggagttatggagcaaatacattaattaacttgacagaagttgcacactttctgtacttctgaaccaaaatttggatgcatgtttttctttatcatgagtcacacctgattaggatttccttagcttttgttggggtcagacaggattgtgaccaaaggcaagatttctctgtcatctcttttgacagaatttccacaatcatggattttgtaatagtcctggacattcatcagaaagtaacctgtagtggggctgcctacataggattcttcctttgaaaagccttaaacatttttctaatggttggtctctcttaactaacaataaaaaacagcaacaatgcagctgggcacagtggcttatgcctgtaatcccagcactttgggaggcccaggcaggtggatcaactgaggtcaggagtttaagaccagcctggccaacatgtgaaaccctgtctctacgaaaaatacaaaaattagccggatgttgtgttgcacacccgtagtcccacctactggggaggctgaggcaggagaattgcttaaa

SEQ ID NO: 7206 - DNA, 1195 bp, Homo sapiens
ctccattttactacttttgcatgtacttgagaagacctgcattgtgaggcttagctgtacttttgttaatgtgactgttttgtagtttaatgttttcagaagattgcgtttctttttttttcttacctttcaataagcgttctcaggttgaaagagtgcatatctcaatgatggtatgtaatgttttcatcgaatagccctttggcagccggccttttaaagttagagacagggaaaacaccctgctgtcatatatttttcaagaaaagattaatagctgtgattcattctgcaaatagctattctttttgagagttagtcttgcaaaatttcttcccttccttttattgttgtcctatcaattctgagaaactgagaaaaatgagccttgggattatttctcattatacttgtctcactgaatttagtgggcttatttcttcactcctctcttgtaaatatttgcagactcattacagcatttgcctttcctgtgatttaaattaaaaataaagattttggtaagctgtatgtggcatgatgaaaaaactaggagactgtggaagaaggaattaggagatgggaatgttggatattgctattcaactactatttgattgtgaaaaaaattacttcttgatttttgaacttcaacttttctcaattgttggtgacctctagagtctttgcaatccctttaagttctgtgattttaatggcaaataagtacttttattttacgacctcaaaagtgtggtcattttatgagaaactttataggacatgtagctataggtttttgtgttgctttcagacaaacttggaatgatagttcaggtaatgtgctaatcactacaaatttgtctagtcagcgctagagcagcaagtgtaacttttatagctgtccatgtcagtggattgtgtaaagactaataagacttgaaaagactaagaggtagtgaacagctctccaaatgagttgattgaagtctgtaggcaactgagggtctcatatcagaatacattttctttgcatacattttatgccatgcaagttgaaactcaggcctgctctgtagaagaattcctaaaagaagatgtcttaattttatattttgactttttttctgatttggaagatcattataaaggtgagagaaaacagcgtaaaaaaattgctcatagcgtattcaac

SEQ ID NO: 7207 - DNA, 1174 bp, Homo sapiens
gttttcaccatcaccccaggtcacagcaaattgatgctgtgtgctactggaggcacagctttctcttgtcatcaggccatttacagtgggtattttgttactgcggcatttgtaaaaaaaaatgtggttgctttttcaaaatggggtgatggaaaagttacgcactttggtgtttcataaaaattaaaatgtcaaactctaggcaatgagcttgactcttattttatcaaaaagtagtgtatatagaatagtaggaccagaaaatagcttattcccaaacataaactgcttaagattctggcagatgtaaaagtagaaaataattgggttttttcctgtttgtttgaacaaaagaattatttttctcttaaatttggtaatctataatataaaagttatgagagtggaggcttttttgcttggtcattaatttagcagaattgcttgcagcaaactcttatttaaagattttggtttttataaatataaatgttttatttttaaatgtaggaagatattgatgcagaatcttcgttttcattaaatatgaactttagcagtaaaagaacaaaatttaaaattactacatcaatgcagaaagacacaccacaagtaagtgcttttaatgtcaagttttttttgagggggaaacatttaagcattggactttacaagtgtttacattgagattgtgcaaaactttgcacagcaaaattaataatgggatatgtcttttctggtttgttgttggcatttattaaccttacagtcaaacagaaatctctacttgtattttagttttttctaaggaaaagggtatggttttgttgtatttgctcttaaaccattagaatgtgtaactatgcattctctccgaaaattcccacattgagaagtaataaaatttcatatttttcatttgtaaaataagggaaagttctccagttcatttttttttttttttttgagacggagtcttgctctctcgcccaggctggagtgcagtggtgtgatctcggctcactgcaagctctgcctcccgggttcacgccattctcctgcctcagcctcctgagtagctgggactacaggcgcccaccactatgcctggctaattttgttttttgtacttttagtatagacggggtttcactgtgttagccagggtggtctc

SEQ ID NO: 7208 - DNA, 1252 bp, Homo sapiens
agacagagtctcgctctgtcacccgtgctggagtgcagtggtgtgatcttggcttgctgcaacctccgcctcccaggttcaagtgattttcctgcctcagcctcccaagtggctaggattacaagcatgagccaccatgcctggctaatttttgtacttttagtaaagatggggttttactatgttgaccaggctggtctcgagctcctgacctaaagtgatctgtctgcctcggcctcccacagtgctgggattacaggcgtgagccgctgcgcctggccttaaagactgttttaacctactggtgaagttatgatagttttactgatttataccatatactcaaaactaatagacttccatcctcacctccccaagaaacaaaatgactaccttgttaacagcagtggctttacaacaatttaataaaattattggttcactctttccgaagaaaatgtctgaaataaagtaaatttgaaatgtttctttgaatggtcaattcactgtcagtttttgttttaattgtaggtgaagttaaaatgaactatttgggcaaaccatatgtagccatggttacaacataccaaatggcagttcttcttgcctttaacaacagtgaaactgtcagttataaagagcttcaggacagcactcagatgaatgaaaaggaactgacaaaaacaatcaaatcattacttgatgtgaaaatgattaaccatgattcagaaaaggtatgtagtaatattccaaagaatttaagcatcatcagcattaaagctttttcatgagatgtttgcagttttaaaataaggctgtaattgttattgtgctctggaaagcacttgtattcactacgttactgtacgctccatagagctgcgagcgttaaggcatcacagagcatgctgtgtgagttggtgccatgtgccgtttatagtttgattttatttgtcctatactgttacagcttattgaataattgtaaaagaattgccatctggaagattttgattaattgagattttgaaactagcctttaaagactttccaggtttttggttttataaatgtgcttaatttcatggttctataacaggaaatgacagcctgttgatgtctgtttgtacacatatttaatatgtgtaactccattccaagtgttcttaatgtcagcactcaattaactgtcatctgtttttaaccaccatatatttttaatatctgtcacaagaataacaagccattagta

SEQ ID NO: 7209 - DNA, 1456 bp, Homo sapiens
tctaagagtgtgagtcacttgcatatgtaatgctttgggtttttgcatattttcttaggtcacagtgacaggtttctgagttgtttcccttttcaagtctctgggaggccagtggcagcagcaggtctgtgtttcaccttcttcccatgtgagcttggaaaactttggcatcttaattagtcttgaatcatacacctgatccccaaacattgcctgctctcaatgaaacatgctttggaaatggaagggactcagaaagtcgaaatcccaagaactccaagccaaaagtgttaggttttagtgaaatttgtgtcaggtataagcatacctgtttgggccagaattattatcacagcctttctgacccaaactttcaaaagcaaataaacagcatataaaacgttaattatctttccattgtaattgtgatgatctactctgtatgggtaccaaaatcaccttctctcttcaagtcaaagttgaatttagaactttgaatacaggtcaaaaaatgtagaaaatatcattttatattccctaatctatatagctgaaaaagggttgtattttcttagctgaatatgaatacctcttaaacataaattagttcctctccagtgaagtatcttattttaccaatccatttcaggaaagaggttctgctgccgtaaaggcagaaattttatttttatcccttttatttgaatgagagatttgaaaatcgaattatgtaaatatttcaatgcatctgctattattttgtggagtttattaaactactttaaaaaaattgtatagtctatttattgtatgtatgtacatacagtctgatacctaaaatttaaagtggattccataaaaccagactcaagtcttgtttagactactgaatactgttttagcctgtgccctggattctacctctgtataggaaaattttccatattcattaattagtgttgatctgtattaattggttatgtttcttgcactaaggatgtttaaaactccgctgtaagtgtagattttagttttactggcaggatgaatcacttgacacataggtagatacttgaggttcattttcttttctttttctacatgatgatgaatagttatgttttcttctctgatttgttcaaagtttgccaaaagaaaacacaaaaccagtacagtacttactgataaatcgtagtgactgtaatttgtttgtaaggcgaattaatgctctacaattaaagctggattactattgaggaacacattgtcttagtgtagtttttgaatggaaagtttttgtcattaaggatgaaggaaacgacacaatttgttactttaattttatatttgatttaaacaacaaataaagtcattgggacaataaatatatatcccgatgaatctttttgatttgttttacttttcttatttttttttttttaactagaaaaaggga

SEQ ID NO: 7210 - DNA, 1266 bp, Homo sapiens
tgtgagaagaaaaaacaaatgtttcaacacaaaatctctgttttgtgagaatactgcactatggaataattgacaaattgaaatctcatatttgtcccaaaagttgttttgagttagttctacctggtgcccatgttctgattgtgtgtgggattgcatggtgtcctgattgcatctaggtggagcggatggaatgtgctgggccactgttgggtggagagcagcacattcttacagaggagatggagcgttatgagcatagtatgtggataggtatcttcacctgcccgcccctgagtcagcctccttgacttgatagcttgaagaatccttttccactgaaatagaggataattaattgacacatctgaaatccccaatcaatcaatcaagagaaaggtagaactaaaaactccttaacttactgttgcttacacccctgaaagtctgtttttaagcaaatgggtaatagtagaaaataggttagaatctatggcttgattaaaaatatgttattacattatcatgttcaggattaggattagtagtcagttgctgtaaactattttgaacaaacagaaaagaacacggaaacatttttaacagagcatttaattatgttggaatacaggatcctagctctgtctgggaacattagtttatttgagccagctctatcagggtcttcccatggtggttcagaatagatgagcatagcatggttttgtttgtttttgctttcaattttctaatttggcatggatccatatgtatttactatcctttttctaatatattaatatatgctacatttgtatttgcattactataatactttgagttgaaaaagagtttcattgtggagagaaaaagcaaatggtatgccacaagatcactctgatttgagaaaagggaggaggggaagatagtctgaatggaaatctgaaatacggaatgttttagagaaatatgtcacttgcatatagaatgttttaattgaggtataaattaatgagacaaagtgaaaaagaaattatattcagataggactgcactacattatttgtcacacatggatctgttaccatcaggtcaattcctagtatgcataaattttttaacccttttaaaagagacctatgttgaaaacccctgaaaattcactgaagaaaaatcattactctttttctcagtaaatcatatcatctgaaatattacaaatttcaaatttctaggtgctatattaattcaatattacaataactc

SEQ ID NO: 7211 - DNA, 1207 bp, Homo sapiens
ctcaggtgggatggaagcagggcctaggagagggtacaaaacaaatcaaacaggagctcccaggtaattgtactcccaagctattatttacaatctcaggtggaggacagctcctgtcccattgttcagctgtaactgagtgactgccttgtgccaggcctgtgctcagccctggaggcacaaagatggagccagtctgtcctgtgtctaggggtcttctcatcaggagaagaaggccagacactggaagggtcaagagatcagctgagcaacgaaccggcaaagctcctgggagtgaggtggaggccaaggcagagttggctaagaagtgcatgtggcgtcacaggccaagatgcacctgccagctaggagcaggccaggtcctggcacacaggaagccagtggagcaggagaccctccctaagtaccagcctgtttggttggttggtttgcttttgaaagttattacaatattatttaaggccttttcggataagttcacttttaaagtaggtgttatcaatctaatttctgaacgttatgggtcagaaaaatcactagcaagtggctcagaaaaagggaaaaggtacacttctgcaatcagctgaggagttcacacctttttttctaaatcaacatcatatttgctgttcagaggcaatctgaaaagctgcaaattcagctcacctcaaccccataatttcaaacgttagaggctggtctctgtggtttcctactggttcctgtggggagctcccgctttctttctacatagagcttagggtatttctcatatgccccattggctacctagtgtctcaggtaataaacgtatccgaagataaagcaaagattgctatgggagagtgttgtctcctaaaataggactgtcttgccaggccaggcctcaagaaccagagagaataataaacagcacaggatgaaatcagcatgattgcaaaaggactggactcaggaaaaacaagtttgtttgcccagaacaaattaccagaagggatcaaaaacatcttgtttttctttggtgataaccatatgctaccggattggaatgtttaccagaaaatggaataaagaccttcccactggcaaaatagagccagggttcacccaggatacatctggccccttagtcccatggaaacaaggcccaaagcttatccagtctgaccagatgatttgtggagga

SEQ ID NO: 7212 - DNA, 1213 bp, Homo sapiens
gaaaaaccctatcagtgtgatgagtgtggccggtgtttcagccagagctcccaccttattcaacatcagagaacccacactggggagaaaccctaccagtgcagtgaatgtggcaaatgtttcagtcagagctctcatctgaggcagcacatgaaggtgcataaagaagagaagcctcgtaaaacccggggcaaaaatatcagggtgaagactcacttaccctcttggaaagctggtacaggaaggaagtctgtggctggtctccgttaagtatagggctttttgacagctttttgagacctcttaagaaaaaataaaaagtaaaaaatgaaaggaatcttttttagaaatagagatgctttatagtagatcacttaaatactggatcttttgctagtgtgaaaacattgggaatttaatgacattattgagctgaaagaaattacatgagtccagctaccctcatttcttttttatgtgacatggagcacaaagaactgaaaatatgttttgagggagcatgacatccttgacctcatttgaaattacttccattttcaaaaaccatcatgttttgtagatacattttgagaaaaaccatcatgttttgaggatacatttgtgaaagtgcaggcatgccaatgactactcagttttaggactttctgtggaagaaaaaagggagaagaaatcaattccactacttttgaagttctgcaacagatgagattttgtttgtaaagttttgtagtatattaaccattggtttatcactctagattcaacatattaaaatgtattcaagctcacagatttttaatcagtaaggcctatctatattagttgtcttttatttcttctccttgtggacagttgttaatgaaaggagtaaggatttccctttttttgttttgtttgttttgttttttttaaccaaattcttagagatactatagaatccaaatgagaactgaattggacctcaagtcttctattcctactaatagagttctttgtgatggtaactgctgtgtcgtttgttttccacaagttgggatggattcatgtcgatacatccccatgcccttgacctcttctggcattctcctgtgctctgacaaactgagccagccttttagatctacatgaataaacaaactattttaccaagaaaaatctcagcttgcttactgcttaattaaaaacctacaat

SEQ ID NO: 7213 - DNA, 1962 bp, Homo sapiens
acggtgtgggcttaatagcagcaggctttgtcctcctgtctcctccaagccagtgtctgattccttggcaacacaggtcttagtctgtggagtggctctgctgtggccttcctctggccgggcaggcactgtccagccatagccagctcctgagaataggtcagcctctcctttctgtctcccagggcacatccagcccgtgcctgtgttcactgtgccccgaagtgcaattacccataccccttctcagcctggggaccccaggcaaccacagactgtccactcaggggagctgaatcccaggtcagccctgccaatgtcccttaggaactgcccaggcaaggcccctggttttgtatacttgttcctgccacccagcagtagatgagtgtttcaggtgaagaccaggatagattttctaagtgtgaatccccacttcacatatggaaccccttatgctgaacttgaaaagcaccaagacttcctgtagacaagaaagtgcttaggtagggacagcccctgggcatcccacccaatgtagctggcaccccactatggcaaaggtgccttgataactgagccctgtatccctcccatgcccagccagattctcatgggaagccctctcccttcttttctgcctaacaccatctcatcgtttctggcctcactgtggacaatccacacacattcttctttcctctcctggcggggcacagagccacccccttgccttttcttttcttgaaggttctagttcagctcctgattcatcagacccttctagccccctgcatctagcagtgaagcatgaagcctggtggggatgtggtactcccatctggtgtggccaccagctctgccaatgttcctgtagccttggaaaacttgctctctcggttcttttgggtgctgtgtactccccagcttccccccttccccccccattttgcacctgggtttagtgaaaggatggcatttggttgacccatatagaaacccagaatgaggtctcagggccaggaggcctggtatttgtaggccagggaaggggaagaggcaagtggtctggggtatcaccagccagccctctctgatttggcctctactccccataagtcacagtaccataagcaggcttctggcctcagcaatttggtctttgtgcccaagtttattgtgagaatttcctgaaaactctataaaaggtctcttcctactgtaggcctctaatgtttctcccctttttgcttcagtccactcttcagtcttgtaggcctagttttcaaacctgcacatgtgtcctacctggccacaggcatgcaggcctcaggcagctgggccagtttgggagcctcgggtgatgtctgcacgatctggggctgcctctgcacccctgctgtgggcttcagggttggagaagggctgggaccaaccgggtgagatccacaagtctctggatgtggctgaaggcaaatacacaattgaagtactttctgttttgaagtgctttcccttttgaatctggtttgaaacatgcagcttctgtctctagcccaaggaaagaccaaaacatagggaaataaaagcatttatctttgtcttggaagtaattgttgaagttgtgcagttgatcagtgcacagttagatgcaatgtttatagaaattgattgttaaaccaaatttacactggcatgtgtggtgtagtttctaaaaggcacttcacatttgaaatttttcttaccttagaaagtttctagtgatctaaatgtctagttttgtattcttttgtgtgtgttcactgtttctcagtattaccacttgaataattctctgtacaggggggtttgtgctatacactgggatgtctaattgcagcaataaagcctttctttaaaaaggagttttgccatgagagtgttttgctgcagggaggctggggacgttggcaggcactccgg

SEQ ID NO: 7214 - DNA, 1130 bp, Homo sapiens
gagcaagcatgggcccagtctctggaccagacgcccccaggtgccttagtcctgtggggccaaactccacttgtcacatgggaattcaaaatgcagggttcctgctgataagtgtgagagagagggcactctgaggccagcagccaccatcccatggtgcttctgtggagctgagaggctggatttttggtggaggtgtctctgggttgagagcccagggcctgtcctgagtctgagctgcccttggatgggcttgagctggtgtcttcagacgagccccacagtctggtgcatttcacatcttacccttttgcctgcctgcttgggcctttggagctgtgcccagtgccccgggctaccttccctgtcccacgccacctgacacaaagcctctcacattgggaaaggcacggaacaaagaaatatgccaagccttgcacaacactgactcttaagacctaaggcaagacataaagttgtaggcagtgccacctaccagctccagacattaacacagctttcttgtttgccagtgaaatgcacccaaaacctccacagctactttgcagagagactctactatgccatgaaggtaactgtcctgtcttcttcttcctgacgctcaccctacatagcaccaagtgcaaagccaaggagctcaaagccaccacgatcctccacacgggggagttatcttacccaaacctgtcgtggatcagaaaggttttagttctcggaggtgaaattgagtctgggaaagggacgctgcatctccagaggtgaataattccctgaaactaaaaccattgcccgttttctctgattgatggttgctgatatcccctgaagttagttccacacccgaaacccaagccctctggccacttctgcccaggaaatgagagagggcatgcgattcccttggccatgtggccccagctgacatgagactggtcagggatgaaggtgagcaggaaggccctgcctgtgaaattcctggctgagctgattgctgccattgctctagtaggaagtcttgttcctggagcagtgagtattttgtgtctagaatctgatgtggcaaaccaaacatactgcagtttggagcacttggcatcataaaggaagag

SEQ ID NO: 7215 - DNA, 1130 bp, Homo sapiens; identical to SEQ ID NO: 7214

SEQ ID NO: 7216 - DNA, 1175 bp, Homo sapiens
accgtactcagatgaagaggtttggtgtgaaggtaaagtatcctttcatggaagaggatgctttgactgaagtataatagatggacctttaaatgagacagttacataagtgatgtctgttaaggaaggtatggttatattctgggtcattttttaagcagtatatctggaagttcaagtgtaataggaagtagaattagatttggtctaaatatacaacagcttttatttatttctaaattttattttttccagtcttgcagccttacagtcatttgtaatggttacctcagattcccctgctgtggttaacgttaaacctaggaggtcagatgctctaagtgaacatgtttagtgctgtgcctgacaaaagcaagcaatcaaaatgggacttccttgagggcaggcctgtcttgcatctgtttctccaccacctagcctggaatatagtaagtgttcaataaaagtcggattgatgaaaagctctttgtaattgataatatttaaaatcaagccttaaaaaaaaccgtaatgttctccataaagttttggaagcttcatgcaactgtcgcatcagatggctaaatggtcagttcatgtacattatctgttatgatgacatgggcttttgaatcacgtgtaggtcattcactgtcctaaaataaaatcttgtctaaatatttttttaatatgataaataaagtaggttgtggagtgtgtgtttctgtgtatgtgctagtttatgtgtgtccgtgtgtgtgcatgtacgtaatccacacacaggcactcataaactggtatttcagtaggggtctaaaatgattgcatttataattttgtgaatattatttgaaagttttttggtgactcttattgtggaaaattgaggacaaaaccacataaatgttttattagaaatatttctaatattttagaaatgtttacttgaaatgtttggttttaagttctaacttgtattaacacaattggtacaaaatatgagcctaaaactcaaaataattgatttatcgaagttaaagctcttttccacttactaaatacagtttagcgtttgttttgtatttgaaagaatatgaaatgagttaactaatgagtttcttattatttgctgtaaagtggaaatgaagaaataagaaaataatacttttttaaga

SEQ ID NO: 7217 - DNA, 2519 bp, Homo sapiens
tgggccatcggggggtgggagggatggggagtcggttagtcattgatagaactactttgaaaacaattcagtggtcttatttttgggtgatttttcaaaaaatgtagaattcattttgtagtaaagtagtttattttttttaatttcaagtgatgtaatttaaaacctaagttgtgtttcaaaacagcaacaaaactgtattgtattttttttgctgtaattaactgtataatgtaaacctaattattttatcatggtttaaattttttgcatatttgctttatcttatgctgctgatttttttaactgaatttgtaagattttgtttatcaaagcaactattatgtggtgacttgcctatatcatgaattatttaagatttttatagttttttttaattagaatttatttcagatgttttgttcatgatactatccttcagggttatgtgcttatcaatgaaataaccccagaggagtgagggaaaataacttgtagccagttatattcaggaataactactgtaaatgatgaacgtgttaggagacctccaatatttgctacttgccaatcctaatttagttacaagaattggtaggcaatcctacttaattttggcaaaagccccgtcatctaaatggcagaataactcagagcatgtctttgaagatgctgggcgtctaccaccaccttatgtccccaccctacccaacaaaaataagtaaaaagaatatggtgtattctacaaatttgtggcatgctcaaagtttatgatcacataaaggcaagaggatacttcatgaataatacatttcaatgcaaataaacagatggttcacttctactagctatgagcctgtttttgtatacactgagttaatctactcaggctgtaggtcccagcaatgttctagagtctggtctttccctttcctgcagcttcgggtccttggacctttcctgtttcctattacttggagtgtctgtcagttgagcaccagttgttctggtgtttcatttgattctacttgtagcataatcatttatacgagctattgggaggttccaaaccctacctagatttgtgtaggtgatgtatcaaatgagcaatataccgttcatctgaaaatagtagcacacagccatatataggatatcattttctaaggactgtttcttcacattgagcagagcaggcataaatggtggttatttagtctaagtcttttatttttttatacctgattttcaacataacacgcaatgtggatgtcgagtagtgttaagaatggtgctgctcctgacaagtgtatgttaactgtttacattttctatctgtagaattatttctctattactgaacttttcctaagtaaaatgtctttgaagtctcgttatttctgaaatacgttgtctgtaatagacccaggcaccttttaaattatctctggaacaagagggatttcatgtaatgaactaggaaatgcatactcacataagcaacaaggttctaggcagaaagccccttggaatttgtgaccaacaggagcaagaacaggtgcggctcaacatgcaatgtctgaaaatttgcttggcattttattcatatatttagtgcaaaattatttttgagtgagatattttacatcactgttaatgtgcaatatttaagattaaaatacattagcttttttatatactttgaagtagcaagtttgttttcgatggcttagagtcatgatttccagcttcccagcctttttatcagtcccttttctaatacaacaaggtgcattaatttgattaggcaaattagagttctaagacacttcttgaattgtagacagaaaatattggattcacaatttcagcagaaatttgagaatgagtgtgtttatattaatttcacaattagctgtattttctgtagcatagattatgtcactgttgcactttcacagcagacatgctttcagaaggttctcatattttatgtttgattgctgataagccatctctattgatacagattttggttaagtaaggaaaaccaggtgtgtgtctgtatcatttattgtaaatgccagctgccacttgccaaccatcatgttcagttcaattcaaagaaaacaaactctcattacttagtgtaaactaaaatacttaacaaattatatcctaaaaacaaggtctctttgttaaatgttgcatgccctaggttttaaattactacatccaaatacagttttcgtcttaaatttgttaagctaaatatatgttggttctttttattttggaatcctttaagcatcttaaacattttttttttgaagagaagttacaaataacatttctatcaggtagtacttgtatgaaaccacctttcttattctataattttgatttttcaattttatatacttaatatactcactgtcttactatcagaaagttattttgaccaagatttttattatcttcatagattcagaaagagatgctaattctgtaccaatgtc

SEQ ID NO: 7218 - DNA, 1213 bp, Homo sapiens
cagaaaagcatacaagtcataagtgtacagttcagtgaattttctcaagaggaacataactgggtaagcagtgctgggggagagacacagtgttaccaggaccccagaagcctttgagccccttccagtcactgacccaccaagggaaccatgtcccggcctaacagcacagatgcgtttgacctgtttttaactttacatacatggagtcatgcagtgtgcactctggggtttggcttcttttgtttctgatgattttttttgtcttctaatttttaaaacatttcataaaatacacttagcataaaatttcctgtcttcatttttaaagcacacagttcagcagcattacattcatttcaattatcgtgcaaccatcagcactatccatctccagaacactttccatcttgcaaagctgagactctgtgcccattcaattctaacttgccatctcccctgtccccagctccttgcagccaccattctactttctgtctgtgaatttgaatactccaggttcttcatataaggggaataacacagtatttgtccttttgtgaatgatttacttcacataatgttctcaggttcacccatattttatcacttgtctgaatttccctcctttttaagggaattcaggcttaaggctgaatcaagttctactgtatgcaaataccacgtcttggtactccattcattgatggacacatggcttgcttccgcatttcagctactgtgaataatgctgctgtgaacatgggtgtgcaagtatctctttgagaccttgcttttaattcttttaggtatatacccaggggagggattattggtaattctggttttaattttttgaggaactgccatactgttttccacagcaactacaccatcttatcatcctgccagcagtgcacaaggaagggttccagtttctccacatccttgccaacacttgttactatctgatcttttgatagtagccatcctagtgggtgtgaggtggtatcagatagtggtttggatttgcattttcctaataatgattgatgctgagtcacgactatggttttcacattactatgtcatctgtcttgtccagtgagctgtgcctcatttattctcattgctgcactgtgttccatggtaagaatagaacacaggagatctgctgttgatgggcactggatggcttctcatttggaatgac

SEQ ID NO: 7219 - DNA, 1257 bp, Homo sapiens
cagatgcgtgccccctgcagtcccggagtgagggcagcggttggggggcggctaggccccgccttccccttagcttgtctctcctcctccaggtatgttggccgggacccagcggctgcaccagccacaggaaacaggaacactcacctggtgtcactgaagaagtttctggatactgccttcaatctccaggcctttgagggcaagacattttagagctgggcaaaacctgtgtaggtctcgctgtgggtttgctggggaccaagggggtgatgaaaaggggaggggcggagctcctgcccaggagaggggctgtggggccccaggataaaacagacacagtgacagggccaagagccagcactgctggccttggtgtcatgccagaatctaccaggactgagggagccagaggagtcctataggcaggctactgtgctggagcatcccccagctgctcccatcttgctggaatttcttgggcggcttctccacctgtatctcaagacagacacccgggggcctgtgtctgtggccgctcccatcccggcagccctggctgctgctcgccccaccctcgcttatctgtagattcaaagcgatgttctcttctgtgctcttagaagtagggagttcagcagtaacagccaggtgaagcgaacctgctgggtgatttgtttgcgctctgttttatggggcattcctgcgagatgtgtcagcttctgtgtgaaatgcagccacagctcatgtgtaccaaagtagaaaaccaaatcacagagaaataaaaacatgcttcagagagatttgctgttttcatttcatgttgtaaaactgggggagggataggcagttgagagaaggtagggaatggggagaaagttaaaaaaatggagagaagaaaatatctgcctccatggatatttttttgagacggagtttggctcttgtcacccaggctggagtggagtggtgcgatcttggctcactgcaacctccgcctcccagattcaagtgattctcttgcctcagcctcctgagtagctgggattacaggcatgcgccactatgcccggctaatttttttgtattattaatagacggggtttcaccatgttggccaggctggtctcaaactcctgacctcaagtgatccgcctgccttggcctcccaaagtgctgggatgacaggtgtgagccactacgccagattttcatttgagcaccaggtagtgtctgttggcttctccactctggcct

SEQ ID NO: 7220 - DNA, 1177 bp, Homo sapiens
cctggtgagcgagcagtgtgtggctcagagggactcccctgggccttgaggtcttgcactgggatcaggactggaatggccctgggtgacagctgtcattgcctagtctagaggctgcaggctctatcactgagtccccaaagctgcgtggggccgattcctgcaagtcaaggatagcattgccctctgagcatggatggccaggtgctcactgaaaagggagggcatagccaggtgggagaggaagccctgggcactggatgcttggggccagggtgctcagagggcctccctggggggcagggttagaagagctgttaccctggggcccagaggtgggtgttgggcctgtgggggagttgcagctgtggctgtccagctgtcccaggtcccaagggtgggctcagggtgagtccgagtgccggtggagtttgggaagccatgggccactcagtcctggggaggcaggctggccagggggatcagaacccaccactgacacagtgtggacagagcctctctccctctcaggcttcttcaacgtagatggggagcccaagagcatgacatgcccagccacggggatccctgaggacatgctcacccacatcggcagtgtggccagctctgtgcccctggaggactttaagatccacactggtgaggttgctggacaggctgcagcccaggctgctggccccaccccaacactgtgcctcgaagggagattggttgggatgcaagagagatggtgtgtcgcattcctgctcagtctgtagtgggtccacgtagctctcggcaccatgtctgtgcccgtgacagtagctcttttcagggtgggcgtggcgagctgggcagctccagatgccacactcccagctgggtaccagtgactagtcttaggttggggaccttggattttccaaatgcctttgccggggcgtccctgggtcaggcagaagagcaggaaagcaagggctcccatacaggggctggaacgcagcctggaacgtgggcagaattctgcagctgaaaggacggtggcttgccggggcctggaccaatgaccgagggcagcccccccactccggggtgagactagaatgtgggtggtcaccgactgcatcccttggctggggccactgtgacctttgcctgggaagtccggagggtcccc

SEQ ID NO: 7221 - DNA, 1225 bp, Homo sapiens
ctgagaagccccactgtcctgtttctcagacctgccagcgctcatccagtgtgcttgctacctcaggagcaaagtgtataacgagggctgccatgacagtgcataacgagggtgcatggacagtgtaccatggatagcctgttgttatcatgagcaaagaagttgtttctttaaagagtgttaaaaatcttgtttaatttatgttgggaaagcctttcaggcatatgaaattcatgctgtattttcaaaagccaagtctgagcatatgccatttagattaagataaaactggagtgttctttctaaggttttttcaattacatactttaatgtgcctctggtctgaccttttgctctccaggagatgtgtataagctgttgctacgatactacaatgaagaatgcagaaactgttccacccctggaccagacatcaagctttatccattcatataccatgctgtcgagtcctgtgcagagaccgctgaccattcagggcaaaggacagggacctgaggagccgagcgaatagcatctcctcccacctcccaccagagacgtcctgtttgagctgtcaggtgtaatatatgaattgacttaagttaatataaatgtgtacataatccacatttgtagtcaaggacgcaatctcttccacacatgtgcagttgtcagttggtacatctaaactccctccatcctgactcacgtggacttagatatgttttgtttctattttcttctatttcagtttttcattctttgatgtttatttcttttgtccatcagatctcttgtgaaatcccatggaaggttgtgctcagcctgtcgggtctctttcttcctgcccatatattataccagttgcttctgcagcccgcagatgccagcgatgccaggaaacaagttgaaatccaggaatctctttaactgattttgctaaaaatctccctgtgagccttccactcaactcttaatatgcttgcattgtttaagtttttaaattctgaaaattaataattagggtttttttcatatgtgttgcataatgcaaacctcctaggttaaaatagtttctttatttaagatagaataatttccagaaattgtacttttgaggtatcatttttatctgtaatggtttgtctgtcttttttcctctgatcagtatttttttataccagttttggagactggctgagatgaaaggaaatgtggaataaaa

SEQ ID NO: 7222 - DNA, 1135 bp, Homo sapiens
ttgcaaatgcaaagcagactacggaagatgaacacgccagagaagccaaaagccaccagaagtgcagcaagtcttgccatcctggggaagactgtgcaagttgtcagcaagatgagatagacgtggtgccaaagagtccattgtcagatgttggctctgaggatgttggtactgggtcaaaaaatgacaacaaattgattagacaagaaagttgcctaggaaattctcctccatttgagaaggaaagtgaacccgaatcaccgatggatgtggataattctaaaaatagttgtcaagactcagaagcagatgaggagacaagtccaggttttgatgaacaagaagatggtagttcctcccaaacagcaaataaaccttcaaggttccaagcaagagacgctgacattgaattcaggaaacggtactctactaagggcggtgaagttagattacatttccaatttgaaggaggagagagtcacactggaatgaatgatttaaatgctaaactacctggaaatatttctagcctgaatgtagaatgcagaaattctaagcaacatggaaaaaaggattctaaaatcacagatcatttcatgagactgcccaaagcagaggacagaaggtaattttctgtcaggagtatctctccaatagcataatatgctttatagttttgtaagggagtttaacgaagctatgatttctagtaaagcaaagaaatggttttgtttcttgttaactacttatgctaaatttaaacctaggctccaaagtttaaactctaaaaaggctagaaacagaaaacaagaaataaaataaatattagaaatcagatttttagtttcatgagtttccttttggtatttatgggaattactagaacatgaaaatactaggttgatagtagctactgtttcttcagccagacattcttctagaccattgtatattacacttttttttttttaacactttgtttaatgccgtgacaggcagacagatggtattatactcactaaatgagataactgagatttgggtaagagaattcactggaatcatgtaccttctgagtggtaatgctgggatttaaatccaggtgtgtcctattacaaagcttatattttgccgt

SEQ ID NO: 7223 - DNA, 1156 bp, Homo sapiens
aaatcatgagaagctctgtgaggtcagagagcccagctgtctagatttgagttcaaagaaaagtcttaagcatgagctttcttcaagactgatgcactaagtttaatacttagtttaaatacaacttagtttaacaaatataagtttgattttactccccatgttttataatctaaattgccattggacttttttttctttttttgagacagagtctcgctctgtcccccaggctggagtgcagtggcacgatctccgttcactgcaagctctgcctcctgggttcactccattctcctgcctcagcctcccgagtagctgggactacaggctcccgccaccacgcccggctaattttcttgtatttttagtagagacggggtttcaccatgttagcaaggatggtcttgatctgctgatctcgtgattcacccgcctcggcctcccaaagtgctgggattataggtatgagccactgcgcctggcctggagttttaatatatattttatgttttaaggaccagtggaatattcctgcttcacagacccacttagcatctgacagcaggtctaaaggagaacccagggattctgggaccctccagagccaggaggccaaggctgtgaaaaagaccagtctctttgaggaagacgaagaagatgatctttttgccattgccaaggacaggtgagatagtcattggaaggagtccctcactccgttaccgtggtaacaagaaaaggaatctgatgcacaatctagttcatcgggtgattgctaatcatggatcacatagtgattgtgccagtgagaatgtctttgcttttcaatggcaccatcttttccctcagtacccggaaatgtttgtctttgtggatccttatctgatttcttccccaatcattattttttaaccatattctttttctttgtttgtcagggatttgagtatcttttgtttgtgatttttctctgggctactctaaagtatgtcaggtttggtcaggattacttaaaagttactttaggccaggcacgttggctcatgcctgtaatcccagcactttgggaggccgaggtgggcggatcacgatgtcaggagttcaagaccagcctggccaatatggtgaaaccctgtctctactaaaaaaatat

SEQ ID NO: 7224 - DNA, 1156 bp, Homo sapiens; identical to SEQ ID NO: 7223

SEQ ID NO: 7225 - DNA, 1184 bp, Homo sapiens
tgatgcagactcctatccagggtggaattccagctccagggccaataccagctgcagttcccggagctggtcctggttccttaactcctggaggagcaatgcagccccaacttggaatgccaggggttggcccagtgcctttagagcggggacaagtgcagatgtcagatcctagagctcctatacctcgcggacccgtgactcctggtggtctgcctcctcgaggactgttaggagatgctccaaatgacccacgtggagggactttgctttcagtcactggagaagtggagcccagaggttatctgggtccaccccatcagggtccccccatgcatcatgcctctggtcatgacactcgtggcccttcctcacatgagatgaggggagggccattaggagatcccagactgctaattggagagcccagaggccccatgatagatcaaaggggtctacctatggatggtagaggtggtagagattctcgagcgatggagactcgtgccatggaaactgaggtcttagagacacgtgtaatggagaggagaggaatggagacctgtgcgatggaaaccagagggatggaagcaaggggcatggatgcaagaggattggagatgaggggccctgtccccagttcaagaggccctatgactggtggaattcagggtcctggtcccattaatataggggcaggtggccctcctcagggacccagacaggtcccaggcatttcaggggtggggaatcctggagctggtatgcagggtacaggcatacaaggaacaggcatgcagggagcaggcatacaaggaggagggatgcagggggcaggcatacaaggagtcagtatacaaggaggaggtatacaaggaggaggtatacagggggcaagcaagcaaggtggaagccagcctagcagttttagtcctgggcagagccaggtcactccacaggatcaggagaaggcagctttgatcatgcaggttcttcaactgactgcagatcagattgccatgctgccccctgagcaaaggcagagtatcctgattttaaaggaacaaatccagaaatccactggagcgtcttgaaaggttttagaaaatatttggctgtagtctcaaattttattctgtagcatggagaatgggtgcaaaaagctgacttctgtatccccacac

SEQ ID NO: 7226 - DNA, 1317 bp, Homo sapiens
ctccagtccctaataatgaaaaaccctagagtagaccgaggcatccagccctctgccctgagtcctttctcagctattccaagactctgccccaaggctggtgctcagcgccaggagggatcccaaggcccagcattcttccccttccttgcatatctccctggcttccttcacatcttgactcaaatgatttctcttcagtgagacactccctatttaaaatttcagctcttttctcaaactccttatccactagccctgctgattttccttttggcacgtattaccaccgtgtgccctccatgcacgccattcctggttgcaggctgtggacccttcaggcccttgtgtaaactctggtcaaggcaagactctcaatactatatatactgatatacacatccacatttgtttgtgtacacacacgaactgtagaactagcaccacaagaaactgcaatttcctgtgtttccttgcccctccagggtcctggctgaggtggcaggcatcttggaacctgtaggcctgcaggaggaggcagaactgccagccaagatcctggttgagtttgtggtggtatgtacaagatgagagcgagcctttcagaagccagggtctggtcctggctcctcttactgagatacagggcagcactggcagagagcagacttaaggaaacctgtaaggaggtaaggatgttccctgtctctgccctccctctgagcaggactctcagaagaaagacaagctgctctgcagccagcttcaggtagcggatttcctgcagaacatcctggctcaggaggacactgctaagggtctcgaccccttggcttctgaagacacgagccgtgagtaggcaggggattgtagtagcagctgacctgagtggggaaggaaggaggatttcagttaggtctcccatttggctgatgggaaggaggcccagtgttgcagggaggcaggctagcaggccaccctcactcatgtactcattcctggtggctcatctcaggacagaaggcaattgcagctaaggaacaatggaaagagctgaaggccacctacagggagcacgtagaggccatcaaaattggcctcaccaaggccctgactcagatggaggaagcccagaggaaacggacacaactccgggaagcctttgagcagctccaggccaaggtacacccaggggtcttgagtacagggagggaagggcagttagaaaggaagagggaaagagtgagcaagctgagttgtgccagcttgcaatctcccaaaattctagccagaaaaaatagacttctcttggtcttt

SEQ ID NO: 7227 - DNA, 1102 bp, Homo sapiens
gttgcctttggaggccaggcttcttagttcattcaaaaatattccttggatttatgccatgtattaagcatttttagcccccagtattacaactgtgaaccaaacggataaggccctaaccattttcagcattctctttggatggggtgggattggggacttaattaaaatagagatatagaaaaataggcatctaaataagataataagtgtggggttgaaatgaagcatctaacaatagttgaagttagaagtaatattttacagtattgtaacctctatttaagtttgggtattagttacagatagcataaaaaagccttaatttttcactttccttgctggcaaaggtacatttatttagactgtccatttaaagtaatgtttaacataaacattactgtgaaaaacattccattacatattcccaagcaaatgagctgcatcttctttactgtattttacaatttagtacaacagttttaggcctcaatcttaacatcactggtattttaaatttggcaatgaatatgaaattacttttgacttacagattgattatattattactttgaaaatgcattaatttcttagaaaagtttggagcctctatctttttttgagttaatacttaaattctcattacttatattaatagcctgtactaagtgaaaatattatttatgcaagtaaacaagtcactataggcttttaagacttttctttaattttagattttgtcatcaaagtttaaattttttacctactgtccacttaaatataatttaacagtttgtaaagtgaaatagttttaagtatgatgtatgatgcacctgcatataaatgaaaatggcgtgcacaaagacactttactatgggaactgtactggaagatttatgaaagcatgtgaaattgcacctaaaattgtgttattagtgactataagcagcaatgctaaatttattgtacttgatgaatgaatgtatttagtcacagttactttggtttaaatgtataaatgtctttagggtttttttttaaatgtgtttgtaatttgtactattgtgggggtatacttggactgcaggggttattgtcaat

SEQ ID NO: 7228 - DNA, 1405 bp, Homo sapiens
cccaccaccttaaaaaaaaatcaactagttatttgtcatttaaaacatttaaaactttgagtcttcaaatacatttgatgttaatgctgccattacttgcacttccattcactaataacatttctaggtagttatcagttttgtcatattcctggaaaatattttggggttgtaaattctttctcctctttttcttctggagttacaaattgaatttttaaatccgagcacctttattgtggtgtggagaaaattatcacaattttatgtttattttaccttctcagccttctctgagggcactttgcaaatacctgagtccaaacagaagtaccaactaaatgctctatgaactctatccttagtaaatctattaaacctgaataatttaaaagatcatgttcattttgtaatagcaaaatttgattttaattttttatttagaattggtgtatttatcatagggacttccaatttttcttcactttttgaatggatattggctatagttttatgttttaacgggaatgaatttcaagtcataataatcagaatttttagttttacttttttcttttacaatatggattttgttgttatttggatagtggttcaataaatcttaagctcagataattaaacactattttgaatcttaacaagatactgaggctttttttgtatgggatgatatcaacctatgtacaatgaatttaataaacttaagtattgtcagattttttgcacattttagctcaataaaatcttaatgttcaagatttttttatctgcatttggaaatacaattttgtaaaatcaatgtcttacctttttgatacaatagatcatgttttgtttttaataaagcaagaagcccttttatctgttgtttttcagggaagggattaacatttaattctgtttgtttacatttgttatcattgttatccaatgctcattttatgttgctttataagtaggcttaggtataacagaataagtatctgtttatctaatctacatgtgactatcttagtctctctcggtcacttaatattatgctgaaatttaccactgtggggatgaatgatcgctattcaccaagtatatttgaacatgtaaatgcttaagaaataagcataatgcggatatagtttgggttaataggattctcatagttttttttcccctatgaaacataagtaatgattttagtgtatttcttatggaatacactcatttaaaaaggactttaagaaattgtggatgtgaataatacctttctctaataaaaatttaaattgtataatagttttataatatttacattaattgatattttaatatggatagacattgcatagattcaaataaattaaaatcaatgataaatgctaaatatttt

SEQ ID NO: 7229 - DNA, 1148 bp, Homo sapiens
aaataaaaagcaagattcgtgtttttcctttgaaactggtgagacttgaatgtatatttgacaattatcatcatttggataggtttaccctttcttaatctgtacttctgttatattactctgtgggaaggatttattcctattactaattttaaatgaatcaatttttaaaaattattaaaatactaagagttctgctgaaacatatggcataaattgtattcacaaggggaatgcattctggaaaagcttttgaaatgatcccattgcctttttaatattgttggaaacctcgtatctgctgtcttttgcttgtggttgaatttatttaattcacctcctgcaagagcttctctgtgatgtttatacttgttataaatttgttgtttaggttttttttttaggtagagttaagaataattattgactttacatttattttaacttttttctctgttttaggattttctcatcttgtttttccctggcaagtacttgagtagtaatatgtttgcctattactaattaatatttttctttaataacagatttatacctaaaactggaagatgtgacccataaatttaataagccctgtataatggatgtaaagatagggcaaaaaagctatgatccttttgcctcatctgagaagattcagcaacaggtcagcaagtacccattaatggaagagattgggttcttggtgcttggcatgagggtaagagtgcttattagtataatatgcacatttctctgtacatgttcttcccttgaaaattatggatgtcattgtagtactaatatatcagaaaataatgtattttggaattgagttgtctgtaactccccaatgtgaaaagtgagggcaaggattaaaaaattttttttttttgttcactgatatatggtcagtttctctggttcgggaacatagtagggtgattgataaataaatggatggatggctgaatctcaggactataattctggtaattttgttttaaagaagtcttaaatttaggtgcaagcaaatattaaatgtaaatgtgatattgtttatgattttcccatgagaaaagtgctaaatatatatattcagtcatttttctgcattttcaaaatataaaagaaatttaaaatgtggt

SEQ ID NO: 7230 - DNA, 1318 bp, Homo sapiens
ctcaccgcaacttcccctcccaggttcaagcctcagcctcctgagtagctgggattatgcgcactcgccaccatgcctggctaatttttgtatttttagtagagacagggtttcaccatgttggccaggctggtcttgaactcttgacctcaaatgatccacccacctcaacctcccaaagtgttgagattacaggcatgagccatcgcgcctggccgcaaattgattttaaataaatgaacttaaactcttagaagtaaataggcaatggacatgttcactagaaaggaatgtaactaatatataaacataagaaaggccttcaacactcatcacaatcacactgaaattcaataaatgatgtgtgtattatgcacaagtcaatttcttcatcttactaagtagcatatgtagtttacatatgctgtttaagaaagcctatataagatagccaagaaaatctttatgttatatgaattaagcatcaccttccactctgccgagcataatactgattttgagattagatgtttcacattcattctttctcttcctagttcccattctgtgatggggctcacacaaaacataacgaagagactggagacaatgtgggccctctgatcatcaagaaaaaagaaacttaaatggacacttttgatgctgcaaatcagcttgtcgtgaagttacctgattgtttaattagaatgactaccacctctgtctgattcaccttcgctggattctaaatgtggtatattgcaaactgcagctttcacatttatggcatttgtcttgttgaaacatcgtggtgcacatttgtttaaacaaaaaaaaaaaaaaaaaggaaaaaccaacctgcatggcctgtgggttattttggtcttgtaaggatccatttctttaaaatactgacatatagagttgtaccttatatagaatatagttgtatcttgaagtcaacatattaaattattctcaaaattatgtatttgcagattgtacttgtaagtttcaaagaaaaattaccatcttttcatattgacctggaaactaaataggatgtgattcagctacattaatttcttaatacaatctaggaaagacctgttgtagccttgattttcttgacattggtaatgacactgagaaaatatggcttctgtttttcaccgttttcaatcaaaatgattgataaatgttattctgtttaatttcataagtcaggtcaataataaaggggtggtaacttcctcatatttatcttcacagatatttaatgaagatggatccattaaaggagccaatagtgaaaatt

SEQ ID NO: 7231 - DNA, 1141 bp, Homo sapiens
gcaaatgtactttaattcacaggcttaaagaggttctgtatttggagacatttctgatgatcgtttgacatctttctattgaaatagctctagtcaactggataaggagatcagggcctgaactgtaagcccatgaaatgtttatttacagacaaaccaaatacagcttatatatccttttagaggcaacatgaaaaatgcaatccagtaagaatcactgtcttgttttaggaattttgaggtaaagattgttgtgtcatgttaattaattgccagttgagccaggagttttgaaataatgctttcacaggctttggactcaataatttaaattttgggctgtaagtcagccgcttgcatggactgtttaatgtcctttacacacaaccagtggggtatgtattatatctattatggagatttagatcttctgactgttgaagctagaaaacaacaaagcatttttagtctggtcagcgtaattttttagggaatatttactgcattgcgtcatattaagttttatggtaaatatggcagttctcacttgtttgcttttattctcctctcttcagattggcctgttacccttctgggagccaggagattaatgcaggccccttctcttacattcccttctttgtttccttttatttgtttactttgtttgaattaggctgcctcatctacttttagattttaagtcccctagaggcagggattgtgtctaggttggttttatggagaacactcagcatattgtgggggtgttataaacatgccatctgtggcaatttaaaattcagtttcagacctttcagtacttttctttgtgtctcgttgtttatagaaatctgaactagaatagaggtgcttagcaatgtaaggctatataaatccattaaatatacatttttgtggctttattgtaagtgcttttatagttctagtcatgatataaaggcactatcctttaatttactgatcattaatatcttatatttttattttaaaatttagatacttctagctagtttttttatttgaatattaatcacattagaatagaaaattgcttcattggcacagactacttttttgtggaacatactttcaccagtttgatgatatttattgcttg

SEQ ID NO: 7232 - DNA, 1552 bp, Homo sapiens
ttgcaatttgtagataatgctccttcaggattggcttttgtaaatttctgttagaagctggtttctgcattttgatttttgtgtatttggatacattttcatataggttgcagagaaatccatgagttaaaaaattatttttcctgttttatttctgcatgaacctaagtcacattgacccagtaattgatatatgtgtgattattgcaattaagtataagaaggtagaatatatagttttattagacagatgcttctgaaatattaattttgtatgtttttactatatcctttttgtgtatctacagatacaacagacatgcaagagaatggactcagaaatatgcaatgtaaaaatcaaaaacattttcatatataccagagtactgtaaaatctaggtttttttcaacattagcagtaaattgagcactgtttactgtttcattgtaccatgaaaccatttgatttttacccattttaaatgtgtttctgaagcaagacaaaacaaacttccaaaaatacccttaagactgtgatgagagcatttatcattttgtatgcattgagaaagacatttattatggtttttaagatacttggacatctgcatcttcagcttacaagatctacaatgcagctgaaaagcaaccaaattattttttgctgaaactagatgtttttacatgagaaatactgtatgtgttgtctaagatgtcagttttataaatctgtattcagatttcattctttgttagctcactttataatttgtatttttttactgtatagactaaatatattctatttacatgtatgtcaactcattacttttttcctgtgaacagtattgaaaaaccccaacggctgataattaagtgaattaactgtgtctcccttgtcttaggatattctgtagattgattgcagatttcttaaatctgaaatgatctttacactgtaattctcagcatactgattatggagaaacacttgttttgattttgttatacttgacttaactttattgcaatgtgaattaattgcactgctaagtaggaagatgtgtaacttttatttgttgctattcacatttgaattttttcctgtataggcaatattatattgacaccttttacagatcttactgtagctttttccatataaataaaatgctttttctactatttgtcttgattacttaaaaaaataaaaatataagtaaggatcaaaactctaaaattttgcatgaaaattacatccaaattgtgaaaatcagatctattttgtttgccattagtcaccattagttatataaattttattgttttaggttagtatctctttactaaattgtcagtctataagataatatatgttgatcccttgctgtagaggagaatttagagtaatttggggtttgtcttggattatatctaaatggattatttgttaaaagtactgaaatgagtataaggcagtatcacccatccaaaagaaaggtctttatagacctgcacagtcactagattaattcattaaaatgcccccacc

SEQ ID NO: 7233 - DNA, 1242 bp, Homo sapiens
acttctgccagcataatacttgctttggaaaacccagataaaggttcatgcaaactttattttgtgtttaggaactactgaggatcagagtaatccaagcaaatgtgaatcattttacctttgacaaaggtaaatcagactatgaagttttttttatacaggatgatgactatggaaagagtactcttgtttccttatattatggaggcaggagtttcgttttcaaaattgttacaaattgtagaagccacggtgttctgtgatataagtgtgtgtttttcataaagcaggcagaactcatctaggtaaattacagttcctaggtataattcacattgtattcagagttgatggttgtacatataagtgattgctggttttagttgcaactttgtataaaagggactgagaaatttataaacttttttcttactgtcttttttctaaagtaaaaacaaagaaattatgtgccagatttatgcatattattttatgttgcatagaataaaatttttaatctttaattttacatttcctaaatatattttaagacgaaacatttgttctatagcttttccctttttttaagtaaggaattttatttttttctgaattattttctctcgtgagtatattgatccagaaagaaaacttgtattatgtgtgttttaaaatgagaaatctaaaaaacgaaaagtctccaaagtctctggaatttgaaacactttgcataacgtataaaagcctgtttaagagacagccaactatggcctgtggatcaaatccagcctgctgcctgctttttatggcctgtgagctaggaattgtgtttataattttaaatgtttttttttaaagacttttatgatacttgaaaattaacatgaatatttagtgttcataaataaagtttgttgaaacacaaccaagatcattcttttacttgtctatggctgcttttctgtggcagagtagctgccacagaaactatagcccacaaagcctgatatttactgtctgtctgtttatggaaaaaatttatcaacccatggtctatagtatagtgtgatatgactactgttccaatgtattgaagtgttgggatagttttttcaaatgttttcagatgttcttgttttagaatcattgtcacctttaagaggaaaaaggtcatcactagataatctaaacaaattgttgcttctcagtgttagcaaggaaaataatctagtttcaaattac

SEQ ID NO: 7234 - DNA, 4278 bp, Homo sapiens
cttcgctgtttggtatttggtatttcagcagcagtgtgcaatttttgcttggcccagagcttcattctcctggcttttaggtttgtaaaagaaaaagggatatcttttttatatttttttccatgaatctgcagaaaattactgagctgttgttaccctcctctcattataatagtgtttaccaaacataccaataattcagcactacaattcagacctttgaaaatctggctttcagtgtagaacagaaagttagatgaatcagtgcccaagacatattttctgtttaacagaactttctacagatacattttttacaggttattttcattgtgttattgacatccatgtctctcgtaaaacagatggcccaaagtaatgaatcatgtggctgtaccttctccacataaatgggatggataattatcgtatattaagatgtgattctcttttttatccttaatgttaatctacttaacctggccccctctaacatgagtcgataaatgttgtcctactcaccggtggtttcaatggctaattagaatgtgttatttgatttctgctgcagaaggcagtgtgattgtaacaaaaacaatgcggcttccccctttcgtacttcatttgtgttctcttaaaatagagtttgaacaaatattttaaaggtgcaaaataccattagaaaatactatttgaaatggacattatcgcattatcttggcataatggccagaaaatattgtattgcttggcagaaaagaaaataaggtctaaaggaaagtagcacattagcattgatggctgttcatttcacccagtataagcaagtgcagtgtacaaagaagtatattctgaatacattatttccattcatttagcacaaataaatcatttggtttcactttgcagtggaacactgagtcactcttttcttaacacgtgcaacatcttaatttttgtttttcagcagttgctgttttgtactttggtagtaaagtgatttttaccacctgtgtttgcatatttatatatgctgtggatgaaaataacttactagagaatgtatattttatgacaagaatgtgtatctgttggatataatcagagaactgaaaagtaatttatcagtaatttttaagagtccatgttttgtgacaaccatctctaatagccaactctttattaaacacactcctaaaaataaggaaccatgacattgtagatatttaatattgtacagtatagaaacctccatttttgccttcgaatgcatatttaagagttaacagaatgaaaaaaaaaagtcttgttggataatagtgtttgactagcgttttaagaacttgagagtaaaagcaacaataagattttttcacctcttcctgcttccacccccaaactgagaacatcactcaattgtttggaagaaactgtaggtctatataaattttatttataatgtatgtgtaatatacataatcataatacagttctcagatgcagggaagaagtttggcatttaatcattgaggctttaggtttttgatgtgatcagactgggccatgtcaaacccggaattttcaccaacagttcactcaccctcctggtacattgccattccaaggaattctgagagtaggcaaacaaattttgccttcatggtacagttctcagtttttcttataggagaaatatggtatatgtttataagaatcttttatgagattatagatttcaatgctgtggatagtgtcttgcacccaaacaagaaagtccataatggaatgatcttccctcagcttcctatcgatttagttacctcttgaaagcacaaaaattaaaacattgccatatgttgaatttttaaaaagcacttggagtgagcgaacatttcctgataaatgccttttagagataggttcttgatattcagacatctgcagaaatgttctggttcccaaagtcatttcacttcgaaataaaacacagctccttcaaacagcactttttccacataaatctagttgcctctccctgtggacattcagaactgatagaacaaacactactcttttgaatttgatggttcgtgtcctttaaagtgtttgaggacctatgcagagcctgtaacacttgggtagtacctgctaggacaatttcttggcaattgtcttactactagggatcagtaagatttagattctgagcccataatggcaacagccccctcacctatgggaagctgacttccctcagtcgggcacttctcatgggggctgaacatggttcctgccattctgttacccactctcccaggtgagccctggattggctcccagaaggcctttgtaaaatcagtagccgtcctgcaggcaggtgggagcaacaggggcttcagtagcttcattttcctgtcttgcagacagagacccttggctaccactgtgctgctaataggataagtactctgttgccagattaccatgccttttatacaaaaccaaattaacttacctaatacctgacacctctttgggctctgaactgctttctctcatcaagcatgctagcactctagacagaattctagaaatttggcagatagtggaagcctttaattgaacttactccttcgttgactgaaaggagttttaaattctgagctcctgagatactgactagcaaccatggaatgaatgtgtgaccagaaagtggctttgacaccaagtgctactgtccctttgtaattggcttctaacagaattcaaccagaaataattgataatgtgaatttttgttaattgttcacttgtaggaaaatagaacatgtatcaccctttgttaggtagacatgaacttttcctgcacaaagccttgcttttagagaatgcccaataaggcaagaaaaagcatagtaacttgtgctttgagagctcaatatttgtatcttatcagtacagaagaaatatttctgtgtaacttgatcttctgtctagtacttgtcttataggtaaccaacactgaaaactttgtagtgatgactaccaaagaaatacatagtaaaacaaccttttatttccaaattgttaaagagccagccattgatgctgctacatgagttccatgctcaagagccattgtaagagattaaggggtttctaggtttttggtgattttttgtttgtttttttctttgttttttagggtttttttttcttctttaattttttgattaaaacatacacacagctgttagcataaagtcgtggggggcattttctggaatgctcagcagttctgattaactgccaagcccaggttgcctctcatgaggcaactgaaaaaatcctgtgtcttgatagcatgggtgctgtgtgtgtgcatgtgtgtgtctgcattcatgccttaactcgggttactgcacaactttagttcttgacttagtctgcaccgtcatctagattgtattgtacatctcggtctgaacttcatcctggcaaaaacaaagttgcaggcacaacagtttaagaatgcattcctccagaagagtatctggtcaggttgacccctgagccttctttggacttgatttggaacttagcctggaaagcgaaagtggactgtccaacagaaagatgtcaacaaggaaaagaggagagccaagcgctagcatgccttttgcctctgcatatctgtgcacactgtatgttgttcatgatagcttgtctacaacttgactaggttggagttctggtaatagtggcaatcttgacattcttggtcagagtttagagagatgtaagactttcaattaatgtcttatttactcctttatgttgattagtctttgatacatgtgctgaatcagaaacctaaataaagataattttttaaaatgtacctcttgagccttaaaccctatcttttttcatttcggtttttgggaataaaacattgtttctctgttgcttctgacagacatctaacttaaattgtaaactctaaaggctgccttagaaagtaaatttaaacaactgggtgcagtgacacaagcctgtagtcccagctactcaggagtctggggtgggaggatcacttgagccttgagagttcgaggctgtagtgagctaggattgcgccattgcactccagcctgggtgtcaaaggaagatcccatctccaaaaaaaaataaggaatgatggcacgaaaagggctggtatagttttgcttatttgtttttgacggagtctcactctgccacccaggctggagtgca

SEQ ID NO: 7235 - DNA, 1201 bp, Homo sapiens
ctggagcgagccccagtgcaatactgcccaagcccgggcggggtctctgttctctggcagaggaggtcccttggcagcgggaagcgccctctctttctctcgccgccgctccgagtctgcgccctggtgccaggcgctcagctcggcgctcccctgtgctcgcccggcgcccactcattcgcagcccggccttcgtcgccgccgcctccctgctgctcctcctcctttccccagcccgccgcggccatggcggacagcgccagcgagagcgacacggacggggcggggggcaacagcagcagctcggccgccatgcagtcgtcctgctcgtcgacctcgggcggcggcggtggcggcgggggaggcggcggcggtgggaagtcggggggcattgtcatctcgccgttccgcctggaggagctcaccaaccgcctggcctcgctgcagcaagagaacaaggtgctgaagatagagctggagacctacaaactgaagtgcaaggcactgcaggaggagaaccgcgacctgcgcaaagccagcgtgaccatcgtgagtgccccccggggacgcgccgcagcgccgacctccgcccgccccgggaggggctgcacccgaatccagccaccccccaagtcttccccagattcccggggaccctctgagagcacactccctgcggggacctgctggcttccgggaggagagggaggtatcccttcggggccacgcgggtctgtcctcctcgggggtctgaggacccttgcgcggtgcgggggaaggctactgtggcaaccattcatggtcccttttagcctctggagaggaggcccctccggggctgggctggaggctggcggcgtggctggggggcggggtaggacttttttcagccctagcatgtttgaggggtgcgtccagaatctggggaaccccagtcctggaagagggaggaagctgggatctcttactgggtcctggctcggagtgtgggggttcgcagctggactgggcactaagctggcatctggactgcgctagctggatcgcccggggagggggcgggagagagtggccgggaatccgggaagtggagttttctggccgggatcgagagggaagggcgggtacggcgctaatgctcccacctctgttggaagctctttgctttgggttgggagggtggacggtttacagcgaggag

SEQ ID NO: 7236 - DNA, 1193 bp, Homo sapiens
ttgatgtgttccaaggctctccaaccaagcaagttatagttcacataacttgctagtttcttacttaagccccaaactgaaatcctgtgtgtgagaaaaccagttttttttttaaatgtctgtttccttcccacatataatttcaagaacagtaatgaagaggtggttcttattttgtaatccatgtccattcaaacaagctgccctcatcgtgggtgaggtgaggtgaggaaaactataactgacataaaacatccacctttctagtcagctgaggcttacagggaagcaaagggatacgggtaatgttttcagatttgtatttaataccaggagttgtttccgctacttaaattcactcttgaaattgtgtactaacctttacctataccttttccttctaaatgagagtttcaaaaattatccaggtgataggggaaggtgaatatgagatattgggggatttgctgataaccaaaggagtgattttctccacagctgacactttcaaaagggaagcttttgatgtgggcttactctctacatctgcaggtgaagatgcaatgaccggggacacagacaaatatcttgggccacaggaccttaaggaattgggtgatgattccctgcctgcagagggttacatgggctttagtctcggagcgcgttctgccaggtacttcgttgttgctgtctttcatagttaatttaaaacaaccatgatttgtcataaatcaaaatcatgttcatttttcacattatcccaaaatgtgttctttggatgaagatgtgaatttagcgaaatgttctcgacgcaaatacacatgctctgctattttcttttgtggtttgcggttgttaatttcatgtgattgaacatgttaattgtgtgttctttttttttttcccactttgcagtcatgctgccagcacagtagcaaaagagctcactgacaaaactgggagaaccaatctgagtcacatatttcaaaattaagttttgttccatattgaaagaaagtattatttgctaataagtgagaaatatgtgtatagattgttcactattctctgttactgaaataataattcatgattaaaagagagcatttttgaaaaaaaattatgttgtttattaaagttgtccaccaagtgtttgagtatctcttctaaaactgttccattattttgtt

SEQ ID NO: 7237 - DNA, 1233 bp, Homo sapiens
tttttcagctagttattggtgtatagaaactattaatttttgtatgctgattttgattttgtatactgcaactttgttaatcagttctaagagtttttggtggagtcttttaagtttttctatatataagatcatctctgcacacagggacaatttgacttcttccttggcaatttggatgccctttatttctttctcatgtttcttattcatgttataatggtactgttagtaccatcttagcaagtaagcagtacctgcactttgttcagtgtcaccccaaatctattatcaatgggtttggtttttcagtggggggaagataaggctgtataactgtcttgatctttagtgatttgaaaagcaaaaaaatatttattatgcttttatctgttttgtcttctaatgaatagaacttagaaatgaaatatttatcttcaattttgtgtacctttaattgacttaaacaatattattggtggcagtcatacaacctttaaaggacagccctaataaaaatataaatgtttaagtgtaggtaattttatgcaccacatttattcattgtaaaaatttgctttttaataggtagtaacactctggtacagatctccagaagtattgctggggtcagctcgttactcaactccagttgacatttggagtataggcaccatatttgctgaactagcaactaagaaaccacttttccatggggattcagaaattgatcaactcttcaggattttcaggtagctattaaaaactgagataataaaggtaacatatatgtaacaatgagattacatttatgctttaagaaatttttaatttcctgttttttagagctttgggcactcccaataatgaagtgtggccagaagtggaatctttacaggactataagaatacatttcccaaatggaaaccaggaagcctagcatcccatgtcaaaaacttggatgaaaatggcttggatttgctctcggtaaggagtgcccttgatactgactttcaaattattgatgattctgaatatattcagttctttgttttgcctagaaaataggaagaacactaacatttttgagctaggtgtctgttatgtacattgtattatactagcttcattttagatatcaggaggcactagtggctttgagaggaggatttagcattagtttttgttttttatctgacaggtagctatggatattctgagggagaagccag

SEQ ID NO: 7238 - DNA, 1290 bp, Homo sapiens
tttctggcgcgtaaactaacatactaagttgtgtgactataattcatttagtgactcatttttagctatttttataacacattgtgctatggggggttttggaacttgctggaagctacatcagaaactgccatagttaattgccatttcaagaatgttgtaaataactcaggtggccgtttaattctcaatgtaaatataattaactagacgtctttcctatatttgtgtctcagttttaaagctatttctggatgcttgagtcttaccgtaattgataacaaaaagaggttattgagaatatctatgatttacagagtaagttattctagacctcaagagtgaaatgtaggggaggagacatttgtgtgttaaactaatggaaatgctcatttaatagatattcactgaaagtattagttttggtttattgctagaaaagttgaggttttatggagatttttgtaaaaaatggtttatttcctaaataaatatctctttttcttttttctcccagaaaatgttaatctatgatccagccaaacgaatttctggcaaaatggcactgaatcatccatattttaatgatttggacaatcagattaagaagatgtagctttctgacaaaaagtttccatatgttatatcaacagatagttgtgtttttattgttaactcttgtctatttttgtcttatatatatttctttgttatcaaacttcagctgtacttcgtcttctaatttcaaaaatataacttaaaaatgtaaatattctatatgaatttaaatataattctgtaaatgtgtgtaggtctcactgtaacaactatttgttactataataaaactataatattgatgtcaggaatcaggaaaaaatttgagttggcttaaatcatctcagtccttatggcagttttattttcctgtagttggaactactaaaatttaggaaaatgctaagttcaagtttcgtaatgctttgaagtatttttatgctctgaatgtttaaatgttctcatcagtttcttgccatgttgttaactatacaacctggctaaagatgaatatttttctactggtattttaatttttgacctaaatgtttaagcattcggaatgagaaaactatacagatttgagaaatgatgctaaatttataggagttttcagtaacttaaaaagctaacatgagagcatgccaaaatttgctaagtcttacaaagatcaagggctgtccgcaacagggaagaacagttttgaaaatttatgaactatcttatttttag

SEQ ID NO: 7239 - DNA, 3463 bp, Homo sapiens
ttccttctcgtctttttttttttttttttttttttttttattaaatggtattgcttttgtttgcaggtctttttgtttttgttttgtttttgaggctgactgactgtcctagttgttgtgtgtttgtaatttttccacatcttattttgagcagctttgggtggtaaagttattgtttacaaattgaagcaactgattctagtggaacaaatgaaaaagaaacagtcaagcacacaatagtgcaaagaacgttcctttgtagatccgcaacttaaggattttgttcctcataaatggcatagttgaaagagcttatacactgcttacccagccaaatgctttgctttgaagtattgggttctgtgaaaatattgagcattgtacttaccttatctaggctgtgaaactgtcctacataccagagaatcataaaaacaaaaacctcactggcagcaagctgccgaataacaacagagtctagaggacatatttgtgggctgcacagatattttaggaatttcagaaattagaacaggagccaaaatgatttacattggcgttggcactgattcctttaaatggtctgggaaagggggttgggaagaggatggagctcaactggccagaagaggagcagctgcagtcctgatagcttctctagcctcggtcttttgagtgataagtagtcatgttgttttcatccagttggtttcttgtcattcccaagaagaatctcccaggccacatctttggggataactgacatactggattagccttttcaaaagaaaagtcatcctatttggttttatggggtgtgagttttgtgtgtacacacacagaaacatgtaaggtggtttgggtcatgtttttaaccacctggcaatacagtccactttctggtttcttttattgtgggaagtaaatggtcaagctgctcaggcagtgaaaagatgtggagaatgtccgttgtcattcttgccactgtattccatttgctaccgagatataacattaaggtggacacattttctaactgtattaattaaaagtcaatggatacagagagtggattttctccccaagtcccatccctgctgaagaccgcttggatgaactccccaacccactgtgcccctcccgcaacactaccagtagactttagaaccatagttaactaagtcttttacctctgagatacttaattctgggaaaattggtgacaattttcaacttctaaataggtaactcgactgcaaaataatcaaaactgataacaatgaaactgcggctcttaaacaaagccatgcatgccgtgcatttgtattgaaatgtctccatgatatgaagccaaatattcaatgtaacatacttaatatccaaaggtggaaacaaaagaatgtagagatccagtgttaagagttccatttgcttcaattaattatttaccttcctgtggaataatatatatatatatatttaatagaaccatagatagactagtagaatttagattataaatgtgtgagtgcagattatcctgctattgcacaagctagaggggggaaaaatctcaattccagctggcaagatgctagccaggacacatataagaaagttgcactagattgaatggtcacagaatcggaggacatggaagaaaaaggaaacttcggtggttctgcagcagacatgggctaggtcatatgtggtttctatgagttcgtgtctcaaaaaaaaaaggagggggggcatctgtccccggtggagctcacctatttggaatatggggcatttgttttttccactgcaatgatttcagtctggtttcatcatgttggaattcgatcacaccattttcaaacaatgttaacatagtccagcttttgtttttctcatctcttctgagaggagactcactgtttctgtctgaggaagctcataccctcggcaaaacatcaggacaaataaagagaaatgggggtacgcattcccaacagaagcagtgtgttatttgttttaaaactctgaacagagatcttggaaatctttcaaaaagaccattgaattcttcattggctgagaacgacgttttaaaatgtcttaaataaggctttgtttgcattgtttgagttcaaggggccttattattgaatggaattgcacaagcctttctttgtgcaatcaaaccattgttattggtagttctgtaaaggaaactgtggaatcgaattggcagtggagtcataaatctatttactgagtgtggcttccaagaaatgttgcaattcaaaatgcactaagtctgtgatttattggagatttggagattctaaataatatttttaaaaaacttccatgcaacttctggtttaatgtttggcaactccacatgataaaaaaataaaaacagcccaaccgagtttcggaattaagtattcttctagtaagtgattcaaacttgtaatatttgccacaggactgacttatttatttactagctagaagctcttaagttcacttgtttatcagggcatatacagaagggtttgttaaaactcgatgttaactttacaactttctgacctggtgcatgaattctcaagtactgtatttcactgtgttggtgtgtctgatggaaatttcgaggtggtcccacaaaaatattttatgtagtgtgccttcaaagagaaccatttatttctcttcacttatcgtcccacaaagtcacatttggtggtggtcagccaagtcgcatctggtctagttttactcttgtcccaattttaaagagaaatgggaatgagtttgccctggtgagacccataccattgcaatgattatcttgagcacttaaagtccagtgttggctgttagtgtatttgatattctgcctgtctcctcatggttgaaatatgtctgaagaatagcagcataatctcttggctgtttatacttttttaaactttcctgtgttgtaaatattgtatacttttggtgattccagctatgtaacctctatgctctgtaaggtgattatttgtatatagcaacatggcccagtgatattatatagtttcccaatggagaggttattgagtaacctttgcattagtttaaacactaccagaagaatgctgagccaactataaacactcaattttgtatgttttccaaattgtacttattactgcttttgatactgtattacgtgccaatagtttcccaatcacatagcaggcaagagatattttgtactttttgatccactgtaatatttaataaaaaatgttactatctgtttccttttgggtgtgagtaatctgtcactcttcctgaggagcctgtggcctccccagaagactttccaccccatctgtccaaattgaatgataacagtaatgatggcaatgtctgtaattcactaaggacctagtgggtgcccatttggcaaatacctctt

SEQ ID NO: 7240 - DNA, 1111 bp, Homo sapiens
cctgagcgggcctgagtgtgattaaaactgtcatcaaagatgagctttgctgaaacataacactatagtctatgtaaagggttcaggttaaagcttaataaacatatttcctttgctacttcatttataacgtggctgaaagctgtcacagaaggttgccaaaagatacttaatagttgtctgatctcaagaaactagaccattataggtaactctggagccagaatgtcaataatctgtcaggatgactaatcccatttcaatgaatgagaatgacattgttgattggcactgggcttgtgagcttgggtttggaggtggggagaggtgacgcatgtaccacgtatttgccaggactaccaagggacctttttctgctttactccatagtcatatctaatttctaagtgttcattggccccatataggcttcaggaattcctagtactgccttccttggagtttactgtcattggatcgattagcaaagggtaaatgcatgaaactttccatttctctttatgcttgtgtctataatttgggtaagatggcaggtgatggtttggggatctaggctgaggtctcatgagctaagaggattggctgattaggagcacatcatgatacacttgtttcctttcataccttctctgtttctctctctctctctctctctctctctctcttttctaggcaccttgacctacttttgtccttaatcttgccaagcacgtttccccctcggcccttttaccaggtatgttcccccagtaatctctctcatctgttcaggttttttcaatgttatcttcttcattgacccctctctctgaagtgctaccccctccccaggccaatctcaattctctaatcttagtttatttttgcttcatggtgctgctcattactacagaatattatgttcaatagctctttatctatgtgcagattttctatcctcttcactagagtgcaagactttgagagcacagactttgcctgtttattgttgtatcccaatgcctagacgagtgcctgaacatagcaggtgttaggaaatgtttgttgaatgagtgaatggagtgttgaaagtaaggagacttttctaggc

SEQ ID NO: 7241 - DNA, 2964 bp, Homo sapiens
cccctagcctgggcgttggatctactggaatgagcagcagccgcttcctcggcagccttgggaagcacgggcgactggacagcagccgccgggcacggttatgggggcggggtgggcggggaggctagattgtttcctggtactgtcactgccactggggctttgatttggaggaatggggcaggggactatctgaagcgcttccatcctaaagccataatgaaaatatcttcctctcttccccattctatacaaaatactaagtggttttcttgctcccactccctaccccttagttaaatagggtttattttccactcatgcccttatgcctttttttcttatagttttttaacttattgactgtgcatgacccagtggtttgaattgtttttagttcaagtcattggtaaaaactaggtttaaggagatgagctactgtttaaagtgagctggcctgcctaattaattccttgtgaaaactaaatgattttttcagtttggggatcattctcacaacataactatgcatgtagaggacaagatttattttctttcctccctttgcccagtagccacatctggtttactcaggcagcatctactaagaaattcagcacctgcatatctctgtgacatggtcacttagagcttatcttccctatgaatctccagatctgtgagtcgagcagatttcatgttgcagattcacctttaatgcaaagactgtattatcctcacatgactttttttcttgtcttactgtaccttaaaaggtgatagagtaattctgtattttctaacgggaagattcaaaggagctgaatgtgttatgcttccaaacaactgaatgtaaaacactcctagccagttgttgcattccctatatttatttacttccaatattttactgtaaaagtagggagaaatattatgttgatagttgtttcatattctctcaggaactttaatgttcccgactcgggtgattccagctgtgttgctggcagtgttgtctcaaccctctccctaaaatgactgagccctgggttcatctaatgtggttttccttaggaagagatagaaggcacagaagatcacagctagagaattgagaattaactatactactagccattttagggcaccaaaacttgggattaaacacttcctacttcccactcccaactcctgaaatgaagtcttgctatctgtgactagttttatttttgtgcttttaatagtccgagcagtcttaccttgtttacacatgtattgacaccatttgcttcaggccatggagcactgtttctccctttttactatttataggattccgttttttcacaagacttttaataaaaagaaattgtagaaataaacacattaaaatttgcccagctgtcgtctaagccctcttgattgacttgcccaagtggcaatagagttctaatatctataataaagggagatttgctattattagtggaatgttgaccccgtatgtagagaaacagtacgtgcctttgcctctttatgcacacagagacccagggtgagggagtatttgttcccagtttttaagatagtataaaaaagcaaatacttggtgagtgatttaaaaataaaaccaaaacaaaacacaaaaagatattccacaggacatgccactttattataaaacctgacacaggcatagtaccaagtatttcctgcattgttgctaaaattgttttattgtagctccacattctggtgtagtttaaaatgcctttgggggcagtttgaagcagttcttcatgccacttagtttgaaaataaaattctagatatgcaaatgattttcttagaaaacttcacaaaataaaagatcttgtttttttttccatagcacagtaatgaatgtggttatcaatcacatacttttttggattatattgtagcaaaaagttgattagcttaccaagattattaatagcaatgtatgtgttataatacaacttagtacattaaagctacgaaaactcatcctggctgtaggatagtaataaaggaagaattatgacttcattatgaaaaaaagaagttttaaagttttcaattacgagcaatttggaagaaaaaacctaaggtgcttttcaaaagagtaactgaaattgttgcaggccaaaacagcaatatgatatctcagatttagttcaataagaacagtgaaacttttggttcactaataaattctgagtaaattagtggtgaagacaaaatataacttgttttagtgagccactgaggaaagaatatgcttattacaaagacaaaatgtggtgcagaaactatcttgcacctgtgtgcataaactgttagtcgtgactgacttggtgtgttgctattgtgtttctatatactccgtccaatatagataatgttttaataacaactgtgggataaaagttatcttccccttggaaagactaatgagcacaatgatattaatcacttttatggtgaataataaatgcaataattgcctcatgggtgagaaattgtctgtctaaatgcttctgaagcttttaaagtatctggttctgtcactggccagttatatcaatgcagagtattgtgtacctacttactattttatgagaattgatttttactaagcctgatttgaatgggttgcatttacaccaactgctatttattaatgaaagtggtagcctgctttttaagtaatatgtgttttggcaacaggagagggttttctgagcttttaacaccagtaaccctgaacttcttccaaaatccacaccttttattcccccttttccttgtctccttctaggtgcctcagtcctggcatctcgggaggactctgccattactcatctgttactgattctgaatcttgtgctctagctctacagcccagtgaagaagcaatatatctttaattcagggcttgcc

SEQ ID NO: 7242 - DNA, 1202 bp, Homo sapiens
gtcgaactgaagtgattagaaatatcaacatctctttcaggttaaaaatattttgtatcatgcagtcaaagaaatggtgagagccttgaagatacacgaggatgaagtagaggatatggaagaaaattaagtgtgatccagtttgatatttttaggttgttgaactgggattacttaaccttgaatgatgatatgtatgcacactgactttaagcttcataaaaccatcagtgccaagaaattctctttgtagtaattacttgttactgacaccacagcagtatagcatatgtcacagctcctgtgattcaatgttataaaacaagcagaattttaaaagcagcactatatagctgttttgtattatagtgtatatgatgtttgtgaaaatgccagatttaaaatgatgtatttatttttggtaaaaaataaaaaattctatgctatattgttgatcaagtgtaaatgtgaccttgtacagtttactaaaattactgatatttttcactacattgagacagttactgtgagaataggacacaaacaccagctattgcctgcatctgggaaattgctgaatcgcacagcagtcatgtcataatcagaaaattactgccaaataattgtaaaatttgtaaagtataaagtatataaagtagatactaaatacagacacttcaatattttgttgaagctattgactgtacaattaaacattttcaaaaggtgtaatttatttaaaattgtctcattttggtaaaatttatgtgaacttttaaagctaaatattaaacttaatatgctatgtaaatatatacatatatacatttaatgatgtatttttttaaaacattggcttgcttttgttaaagtgcaagtgttacatatggctttgtacattaaagttgaaaggggttttacattttccattaaaaggactttatcaaaaattgactttttccagagtactccctctgttgacaagcatgacactgggggcagagaagagcccgaagtcagtcatcctgggtataaatatgagttctgccacttactgtatgaccttagaaagttattttaattaatttgaagtcttggttttaatagctggctgctattgtcggttggttaaggctgacatattcccaaccctttaagttactggaaagatgtagctctccactgacacctgcaggatattg

SEQ ID NO: 7243 - DNA, 1099 bp, Homo sapiens
agattatttaactgattaaagagtcccttgaaattgatttttcaagtgttagaaggttagccatgtaaaggtatttatacttacctcaaaaaaggatcaataaatgtttatgaaatccatacatatgaatggtttggcttttggtaaaaaaaaaaaaaaaaaaaaaataccctgttcctcatccatgtgctatacttttgaaacagttataaggaaggaaaccagatagatggaaacttcatagtggaaggaggtggtgagaaggaagtagtaaactgttaagagcatttcagcattgctgtattgttttaatattctttggctttccaaattattgcagaatgttattttttaactgaagaagctcattcagttgttccattgattctgagaagaaaagatttgttattacaaataaaattgaaatttaactgaacaggatttaccatttccttacttaaattggagtgtctattttaattcatatttcagatttcaaaagaacaaggccttgaagttctaccagaacatgatccaatacgtgaccaaagttggtatgtgaacaaaaagctccgtcaaaggctgcttgaagaatatggagtcagaacctgtactcttattcagttccttggtgatgctattgttttgccagcgggagcacttcatcaggtatatacaaacttatttctaacatattttttactgactgaaagaactagttttgaaaaaaaaattgctcttagtatagatataaatggaagaagatgcaaataagagaattacctgcaccagtctgcctttattagaatgacatctcagtgcttgcagaaatctcacataatttccttaagattttaaattgttttaacatgagccagatttctatttgtatactgtctccgatttaatagatcgaaatctgatttttaagccctcctggtgacatgtatacctctgaatagtgaggcttaaaagcatggggggacacagtatacagactttttatcaggctttaagcatacctcctacctttcttcagcatgctagcatatcaggggcctgtctaaagaaagatggtatgtaatttatataactgttg

SEQ ID NO: 7244 - DNA, 1133 bp, Homo sapiens
aacaaatacaaagaggaacaccgtcgaattcttcaagaaagtattgatgttgctccctttacaactaaaatcaagggacttgagggtgagagagagaattattccagagtggcatcatcatcttccagtcctaaaagccatatcatcaaacaagatatggatgtagaacgctcagtatcagatctttataaaatgaagcactcagtgcctcagagtttaccccaaagtaactatttcactacattgtctaatagtgtggtcaatgaaccaccaagatcatacccatccaaagaagtttcaaatatttacggtgataaacagagtaatgcccttgcagcggcagcagctaatcctcaaactctgacttcatttataacatctctttcaaagcctccacctttgattaaacaccaaccagaaagtgaaggtttagtaggcaagataccagaacatcttccacatcagattgcatctcactcagtaacaaccttcagaaatgattgtaggagtcctacccatttgacagtttcttctacaaatacactccgcagtatgcctgcattacatagagcaccagtatttcacccaccaatccatcacagcctggaaagaaaggaaggcagctatagtagtctttcccctccaactttaactccggtgatgccagtaaatgctggtggtaaagttcaagaatcacagaagcctccaactctaatacccgaaccaaaagactcccaggcaaattttaagagttcttcagaacagagtttgacggagatgtggagacctaataataacctcagcaaagagaaaactgaatggcatgtggagaaaagcagcggaaagttacaggctgctatggcatctgtcattgtgcgtccatcttctagtacaaaaactgatagtatgccagcaatgcagttagcttctaaagatcgtgttagtgaaagatcttcagctggggcacataaaacagattgcctcaaactagcagaagccggagaaactggaagaatcattttgccaaatgtgaattcagacagtgttcacacaaaatctgaaaaaaactttcaggctgtctcacagggcagtgttcccagttcagtcatgtctgctgtaaatacgatgtgtaa

SEQ ID NO: 7245 - DNA, 1079 bp, Homo sapiens
aggatgtcagtgagtcagaatatagaaaaatccttaagcatgtagtcagatagctgtatgtctcgatgaagaggttgctgtcaccttatattcagtcatgagacaggcagcatattgatgtataaaattaactttattagacttctacacctccaagcttaatggtgcaaccttgtttatagcttagagtgaaatggggagtgcatttgggttttgaaatgtaattatctgccaattgtcagtaaattgttacattggaaaagttaaattttttgatgacaaaaattgacaaatgaatttggttataatttctatttctgatgaaatgtgttttaggaataatattctgtttttactgttagcaatatacttttgctgttagaatcaggaaatcatataaactaggttctgtatatggcatttatagtaaatttaaggcactgatttcaagatctgtttttagtaagatgacaataaattatttaatactgattatgatatggaaaaatctgtttaattatgttattatttgtctgaatatttctcataagatgtatttagaaaaagttacaagtttcccaaagaaactgctatttgaatgaactaataaaccaccaagatcatacccagttctactgtgacacggtgtttagctttttctagtaactgaaatctaggtgttttttttgttttgttttgttaatagaattctcccagtccttggctacatcagcccacccctgtgacctcagcagatggtattggattacttagtcacattcctgtcagaccttccagtgcagagcctcatcggcctcttaaaattacagcccattccagtccaccattgacaaaaactttagtagatcatcataaggagtaagttcaccagtgcttaaaaattataaataccttgttcataatttttcttaatttgccttttaaatagttaattttaagttaacacatatcttaagattaggctttgttctgttttgatatttcttcaaatttattatagtattagagtacatgcaaagatgtcttttactttcataatagaatgatattgcatagaa

SEQ ID NO: 7246 - DNA, 1187 bp, Homo sapiens
caactgctttttgaaaattactttctatttaaaaataaaaagtaatttaagaattgttggcatctgtattcttgattaatacccttgtttttcaagatgtacttgcagtaaatatatttgctttttaattcttggttagcagttgaaatggtgagtttcagaaggttaaaaaggtaattttgtcttaagtgaataaaacaaattattataacagcatcttataaattagggatcccaagctgatttctaaacatttctactgagtaaagaaattataccaaatatttgattagctcattctatttaatttttgtttttgttttgtatcatggattaggtactagaaccacagaatgtcgatccttctatggttcaaatgacctttctagatgatgttgttcactctttgttaaaaggtgaaaatattggcattacatcacgacgcaggtctcgtgccaatcaaaacgtcaacgctgttcacgtatgtatgttattagggatgaatttctgtaaaatatttttccttaggctagtagaaaccaggtagtaaacaattactgttaattggttatttttagagccattatacacgtgcccaagcaaatagtcccagaccagcaatgaactcccaagctgctgtaccaaaacagaatacacaccagcaacagcaacaaagaagtatccgtccaaataagaggaagggctcagatagcagtataccagatgaagagaagatgaaggaggaaaaatatgattatatatcacgaggaggtaggacccacttttttttttaagggaatgaaaacaaataaaacaaaaatacattttaaaatatgcttatttagtatgaaaaataagactcttctttctttaatcctacagaaaatcctaaaggtaaaaacaaacacttgatgaataaaagaaggaaacctgaggaggatgaaaagaaactaaatatgaaaagacttcgaactgacaatgtttcagacttttctgagagcagtgactcagaaaattcaaataagagaataatagataattcctcagaacagaagccagagaatgaattgaaaaataaaaatacttcaaaaataaatggagaagaaggaaaaccccataataatgagaaggcaggagaagagaccctaaaaaatagccagcctccctgggatcaaatacaggaagat

SEQ ID NO: 7247 - DNA, 1115 bp, Homo sapiens
ggacatttccagggtggaatccaagtcaaaaatgaaaaaaacagaccatctttgaaatctctgaaaactgataacaggccagaaaaatccaaatataagccactttggggaaaagtattttaccttgacttaccttctgtcaccatatctgaaaaactgcaaaaggacattaaggatctgggagggcgagttgaagaatttctcagcaaagatatcagttatcttatttcaaataaaaaggaagctaaatttgcacaaaccttgggtcgaatttctcctgtaccaagtccagaatctgcaaatactgcagaaaccacttcacctcatcccagccatgatggaagttcatttaagtcaccagacacagtgtgtttaagcagaggaaaattattagttgaaaaagctatcaaggaccatgattttattccttcatatagtatattatcaaatgccttgtcatggggagtaaaaattcttcatattgatgacattagatactacattgaacaaaagaaaaaagttgcattcactcaagaaatcaagtacttcagtaagagatgggggcaaaagagttggtagtggtgcacaaaaaacaagaacaggaagactcaaaaagccttttgtaaaggtggaagatatgagccaactttataggccattttatcttcagctgaccaatatgccttttataaattattctattcagaagccctgcagtccatttgatgtagacaagccatctagtatgcaaaagcaaactcaggttaaactaagaatccaaacagatggcgataagtatggtggaaactcaattcaactccagttgaaagagaagaagaaaaaaggatattgtgaatgttgcttgcagaaatatgaagatctagaaactaataaaatacagtgttggatccctttctcctgtttctgcaagtgtcctgaaaaagactgaacgaaaggaaaaagtggaattgcaacatatttctcagaaagattgccgggaagatgatataacggtgatagagcagaatttcctgtataaagagacccaggaaactgaaaaaaacttctgtttatttcagagcccatcccccacccttcaaatgacttgagagggc

SEQ ID NO: 7248 - DNA, 1105 bp, Homo sapiens
gaacaaatagatttgcaatatattcaggaggaagagtcaataggtcttaatcaccaattaggagtgtggggatggagtggaatggatgactgtaggcttctggcttgggtgattttgtggatagttgagccactaattaagaagagaataggaaatagcaacaaatttgaggacttcctctgcctggggaacaattctcttatagattgttatgacggaataaggtataagattatttaatgaggtatttagatgacaaacttgcttgggaagaaatgtgatagaacagagagatggtgtcctaataatgaggggaagaacatccagaaccctgaatttaggaaaacagtgtataggagtatttagttacatgaatacatattaagagatttactaaatagcagggatctaaaagttttaccagagcttatgaacagacaagaatttggtttaaactgttctagatatgcctttgaaatgttattgttttatcagttgttagattaaatcatgcttaaagtgctagttttaaaatgaaatctgattaaaacaatttaacacaggtaaattaatttttacaaacaagaaagaatttgtggtcatttggtaataagtatttcctgctcagattgtatcagtcacattcatttttataagagattgtatcagtcacattcatttttataagacctctgcctatgaataggatatgtgagtcacaactatggaaaattaggcctctgaaatgctgaaataatacaaagggttgttttgccaaatgcttgacactaagcaaagacgaaaaagctgtttgatgtgcagatcatcttctgctcttattcttgccatcacatctaaaagttttgggaactgtttgactctctgttagtattaatataaacagatctataactgctatccaggcagctaaatgtctgtcttattcttgattatcttttgcatttaatccaagataaaatattaaacctcttgatttaatgtcacaaaccagtagtactcacaaagctgaattacagactgtcaacaggtggataattgctgaacatttacagatgttagttcacatggaattgtttagaattac

SEQ ID NO: 7249 - DNA, 2285 bp, Homo sapiens
tatccatcaaacaaatcatagtgtaataattgtgcaggtacaggaattgttccaccagcattaggaactttagcatgtcaaaatgaatgtttacttgtgaactcgatagagcaaggaaaccagaaaggtgtaatatttataggttggtaaaatagattgtttttcatggataatttttaacttcattatttctgtacttgtacaaactcaacactaacttttttttttttaaaaaaaaaaaggtactaagtatcttcaatcagctgttggtcaagactaactttcttttaaaggttcatttgtatgataaattcatatgtgtatatataattttttttgttttgtctagtgagtttcaacatttttaaagttttcaaaaagccatcggaatgttaaattaatgtaaagggaacagctaatctagaccaaagaatggtattttcacttttctttgtaacattgaatggtttgaagtactcaaaatctgttacgctaaacttttgattctttaacacaattatttttaaacactggcattttccaaaactgtggcagctaactttttaaaatctcaaatgacatgcagtgtgagtagaaggaagtcaacaatatgtggggagagcactcggttgtctttacttttaaaagtaatacttggtgctaagaatttcaggattattgtatttacgttcaaatgaagatggcttttgtacttcctgtggacatgtagcaatgtctatattggctcataaaactaacctgaaaaacaaataaatgctttggaaatgtttcagttgctttagaaacattagtgcctgcctggatccccttagttttgaaatatttgccattgttgtttaaatacctatcactgtggtagagcttgcattgatcttttccacaagtattaaactgccaaaatgtgaatatgcaaagcctttctgaatctataataatggtacttctactggggagagtgtaatattttggactgctgttttccattaatgaggagagcaacaggcccctgattatacagttccaaagtaataagatgttaattgtaattcagccagaaagtacatgtctcccattgggaggatttggtgttaaataccaaactgctagccctagtattatggagatgaacatgatgatgtaacttgtaatagcagaatagttaatgaatgaaactagttcttataatttatctttatttaaaagcttagcctgccttaaaactagagatcaactttctcagctgcaaaagcttctagtctttcaagaagttcatactttatgaaattgcacagtaagcatttatttttcagaccatttttgaacatcactcctaaattaataaagtattcctctgttgctttagtatttattacaataaaaagggtttgaaatatagctgttctttatgcataaaacacccagctaggaccattactgccagagaaaaaaatcgtattgaatggccatttccctacttataagatgtctcaatctgaatttatttggctacactaaagaatgcagtatatttagttttccatttgcatgatgtttgtgtgctatagatgatattttaaattgaaaagtttgttttaaattatttttacagtgaagactgttttcagctctttttatattgtacatagtcttttatgtaatttactggcatatgttttgtagactgtttaatgactggatatcttccttcaacttttgaaatacaaaaccagtgttttttacttgtacactgttttaaagtctattaaaattgtcatttgacttttttctgttaacttacattgtttaaggtatataatttttaagtcttacagaatttgtacagcttcgaatgctatagtattagatgctttctttctcatactacatttcttcatttggtttattacattagtctcaccagaccagtacttgcaaaaccctgatggtgctgatcgtagcaggtgatgcatcaccaccaagcatttcaaaaactatttcagccattctaggctagaggcctgagcaagtaaaacatggagaaaaggcagggcagggcctaagaaggatgtgacatgtcctatgataaaggaccaggagtttgggatttgagagagaacaggaagtggtggatagtgaaaatccatctgatgcaaaggctgggttaactgaaaatctgttctgggatgctaggtctttcaagtctgaagactgcagaccacatttggtatcaactttctgaggctgacctgagaacctacttaagc

SEQ ID NO: 7250 - DNA, 1150 bp, Homo sapiens
tttctgatttaaaaaaaataacagaaacgaagcaaatagaaaaagaaatcataatcaaaactgcattttgtatttggtttgtcaactagttctgaatggcttttccaaaaaagggctctcaaaatgttttggcaatggcaaaatactcacttatcaaacatttattaagcacttcctttgtgccagtattaagattatacttttaaagaaaaaatattgtgtggatgagcaattagaatgtgtctcaaaaaacttgtcttccacaaattaggaagtaagataacacgttagagcagatgttaaagtgaagctctgctgtagcgactgtaccaaatattacttgctactgtatctttttgttttgaagtggttgactgaatgatttctttcttggcagtatttttgacaggtagtgatcgcattcctattcttggtatgaagagtctgaaactagtcatccagtccacaggaggtggtgaggagtatctcccagtttcccatacttgttttaatcttctggatcttccaaaatatacagaaaaagaaactctacgctctaaactgatccaagctattgatcacaatgaaggcttcagtttaatataactttggagttataactattcagtttagtgcaaaagcattaaactatttgtgtttttcttgtggtgatgaattcagcaaggtgacagaggtactattataattcttacttgcagaatgttcaatctacgagtgttcatggaagccaaaaaatattaaaggaaaatgaacaaactgttaatattattgtacagaaccatggattttttttgaccatcttctaataaacatagcaagtattatgaatacattaaagttttactaacatgaattttaagagtttgcatatttcagaaatgatctggtgtgagtgcatggaaatattgcttaatttttcttcaatcattgagtgaaaaacctttaactttggcctgcaatagtcatttgattattttttcattttgtaaataatgttaagttttgtaataaaatagttatgttctgataccagtacagtttctatggttgtaattgaacttgaacagacttttaaaggttaaaaattatgatttaaatcttactctgagactctataaaaagaaaaaaa

SEQ ID NO: 7251 - DNA, 1213 bp, Homo sapiens
agggctgggattacaggcgtgagccaccatgcctggcctcttttttttttttttctatcattcttgtattgttacagtagagatatatttttcaagacaggttttcctcaagtgtgaagatggaaaaatccagtagagacaggaagctggtgatgcaggcatgtatcagaatgcagttcagaatggctttgccaaaataatgctataggaagttttccatattgaaaggaacactaatagtagctctgaaaattatattccatctacattccatttcctacagaattctcctggggctgcatgctcaggtggaaaatcaggattcactaaggccgtgtgggattttaggagagacactgacatttcctttagtgctccatggtgagaaactggatctggaacatacctggttcatttggatttcatggtataaatctaacgtctgaatcttaaaaagtggcttcctcaattgtactgatggacatgttcttccttgccatatggaaattgaaacacgtttgtcattttgacaggagtacaaaatttcaagctttgagcagaggctgatgaatgaaatagagtttcgcttggaacgtactcctgttgatgaatcagatgatgaaattcaacatgatgagatccccacgggcaagtgtattgctcccatctttgacaagagactcaagcacttccgggtcacagaaggctctccagttacattcacctgcaaaattgttgggatacctgttccaaaggtagggaagatgacaagccagttggccacctcacagcatgaagctatagacagtgccttcaagaaggtctttaaaaaatatacgcaatgttttttcttcttttttgtatttgttattgatatagttgtacatgttttagggtatatgcaatattttgatacatgtatacaatgtgtaatgatcaaatcaggataactgagatatccatcactcaaacatttatcttttttgtgtattgggaacattacagtttttctcttctagctattttgaaatatacaagttattattaactataatttttccactgtgctatcaagtactagaacttatttcttctatctaactgtgtgtttttacccattaaccaacctctcttcattcccttctcccatctatccttcccagcctgtggtaaccaccattccactcaccacctccatgagatcatttccttt

SEQ ID NO: 7252 - DNA, 1105 bp, Homo sapiens
gagccattgtcgcctggctgcaatcttgttttttatacttaatccacatcccacctccccaacccagaatattttgaggctaattccatacatatttacatatatatacatctctcaaagaaaataacttattttccattcttcatatatctattcctataaataatgttcttgggggaaaaagttttcacatttaatttttagtgttaccaatttgagcattaatattttcttcctactagggactggtttggctgaaagacaaagaagcaacacattgtaaactttgtgaaaaggaattctcactctctaagagaaaggtaagggagataagaagtgagtccaaaaatttggagtgcaaaaatgctaattttatttaaagtgtttttttccctctgatttttctgtttaatagcaccactgtagaaattgtggggaaattttctgtaatgcctgctctgacaacgaactacctttgccttcttcaccaaaaccagtacgggtttgtgattcctgtcatgcactgctcattcagagatgctcatctaacttgccctgagactccagaactaaatccttatgtatgaaattacctacaatgaatgttatgatgttgtatacaaaggtaaccagacagctctccttaagcggctttcggtcagtatttggtaccagtttatcttctacatattcagctcatggaaattacaagttatatatttccttccccattgtttttcaaaatgtattttcaacagagcatgcttaaaaatcatgtaactcattaaaaggccagagagcagagctaacacaacttgccttatcttgtaaaggccttaaaaataaggcttcagattgtttttttcttctgaattctgtcaatttggtatttgatggtgcctgcagttctcttaatgcactttaaagcttcacagttctgaaactggaaacgcataaaacttttaaaattattaatattctaattcaacagattttcattatctttgtaagatttcaactatatttatttgccctttcttctccccctctccctttgcctcttgcattagacagggccaatattttgtcctacaaaatttcctct

SEQ ID NO: 7253 - DNA, 1072 bp, Homo sapiens
gaattcgaaaaggactctatcgtggtttatctcttaattacattcgctgtattccctctcaagcagtggcttttacaacatacgaacttatgaagcagttttttcacctcaactaaaaaaaaattatggttggtttttcttaatacattctcagagggagaaatgaaacattactataattgtggggggaacattacttgaatggggatatttaccctgtcacaagagccactggtattttagtacttgattattttttctttagtcacaaatcagaactgcttaccatactttttgatgccaaacattataccttagaacattgaagaaaatattcctaagctgatgctggctaaaccgctttaaagttttatttggaagtagaactagctttaaaacggggttcaagaggttgccattagctttgtcatgctgttcaaagtttttaattgttatcatggtttttaaaagactgacagtgtttattattattaaaataaacagggttggttatattgcaatagaataatgagaattgaatttttaagttctatgaaacagccagcattgacattttatttttgttatctctcttctcacaattatgctccactggataataggaaaaacacttctttccttcattttttaaataaaattaatgttgtatttaaaaggtagccatgtagagacacaaaaataaatgaagaagctggacatggtgggatgggcatgtggtcccagctactctggaagctgaggtgagaggatcacttgagccctggaattccatgccagcctatgcaacatcatgaaaccccacttaataaatgaatgaacgactaagtcttgctcaaatgttattatgaggtactatgagtgacttacatgtgttttaaaatgtcagtgtgtttcccagaggcagaaataaaaatactgaatatctttgctcttaaaaaaaaagtaacactatagatttgtttttgttagatgatttgctctatagtagaatatttaagtagactgtgaaatatttattaatatagatgtgaatatcaaaaaatgtttctaa

SEQ ID NO: 7254 - DNA, 1184 bp, Homo sapiens
aaagtgaatacgaccaccactgaggtccagggccaaataactaacagaaatattatgatgaactttgcagacatccagcccagagtcagggaacacagccctcatctggtttctctctttggtgttgagggcggttttccgttgctggcgacctagacattgctcaatggtgtcatctctgacctggcaccttcttcatacatttataaacatgcaatttagagatcctaaaaactttttctagagctcccctgggaaaaaagttaatgacaaaatcttgacacctctctacgtcttcttcggagacagagaagttgagagaggtggagaacgagggggagggggagggggtcgagagggagtcgaggagggattccagctccagtttgggtaaatccagctcgcgttttgtctctcgctcaactgtgcagggtccagcgaaggcagagccccagcttcactccctgaggtctgtcctggggagacactgctgctccggggggctgacctggcggggagtggccgcgcagtctgctccggcgccgctttgtgcgcgcagccgctggcccctctactcccgggtctgccccccgggacacccctctgcctcgcccaagtcatgcagccctacctgcctctccactgtggacctttgggaaccgactcctcacctcgggggctcgggccttgactgtgctgggagccggtaggcgtcctccgcgacccgcccgcgcccctcgcgcccgccggggccccgggctccaaagttgtggggaccggcgcgagttggaaagtttgcccgagggctggtgcaggcttggagctgggggccgtgcgctgccctgggaatgtgacccggccagcggtgagttggggccggggcagagggcaggggtgcggggagcgaggactccgacgccgaggcccgaggggggtccgggaggcggcgctcggcgcgggctggatgtggccggggctctgcgtccttggctctcccgctgcctcaggggtgggctcgttccccgcctcgaccccccaccccgggacgctcgggacgcttttgttgccggagataaacaatgcccccggccggaggtatcggccacccgctccggaggccccgccacagcgccgggttgggggcagcgggggcgcctggggctctgaccccgggctgcggtgga

SEQ ID NO: 7255 - DNA, 2582 bp, Homo sapiens
gctggtcttgaactcctggcctcaagtcatcttcctgcctcagtctcctaaaatgctgggatcacaggcatgaaacactgctcctggtccttacttttaactggccgggcacgctggttcacacctgtaatcccagcactaggggaggccaaggtgggtggatggcttgagcccagttagagaccagccagggcaacatggcgaaaacatgtctctacaaaaaatacaaaaattagccaggtgtgatggtgtgagcctgcagtcctagctacttggggggctgaagtgggaagattgcttgagcctgggtaggtccaggctgtgctgagctgtgatcatgcctctgcactccagcctgggcaacagaatgagaccctgtctcaaaaaaataaaataaaacaattagtagtgaatattctatttcaaataggggaatgcataggaaaaagactcacttcagtgtattctgttgttatttcagaccaaaaccttgtgtgactgagctgaagagcagtgcatccagattctcctcagaagtgagactttccaaaggaccaatgactctgtttcctgcgccctttcattttttcctactctgtagctatgtctcgatcccgccatgcaaggccttccagattagtcaggaaggaagatgtaaacaaaaaaaagaaaaacagccaactacgaaagacaaccaagggagccaacaaaaatgtggcatcagtcaagactttaagccctggaaaattaaagcaattaattcaagaaagagatgttaagaaaaaaacagaacctaaaccacccgtgccagtcagaagccttctgacaagagctggagcagcacgcatgaatttggataggactgaggttctttttcagaacccagagtccttaacctgcaatgggtttacaatggcgctacgaagcacctctcttagcaggcgactctcccaacccccactggtcgtagccaaatccaaaaaggttccactttctaagggtttagaaaagcaacatgattgtgattataagatactccctgctttgggagtaaagcactcagaaaatgattcggttccaatgcaagacacccaagtccttcctgatatagagactctaattggtgtacaaaatccctctttacttaaaggtaagagccaagagacaactcagttttggtcccaaagagttgaggattccaagatcaatatccctacccacagtggccctgcagctgagatccttcctgggccactggaagggacacgctgtggtgaaggactattctctgaagagacattgaatgataccagtggttccccaaaaatgtttgctcaggacacagtgtgtgctccttttccccaaagagcaacccccaaagttacctctcaaggaaaccccagcattcagttagaagagttgggttcacgagtagaatctcttaagttatctgattcttacctggatcccattaaaagtgaacatgattgctaccccacctccagtcttaataaggttatacctgacttgaaccttagaaactgcttggctcttggtgggtctacgtctcctacctctgtaataaaattcctcttggcaggctcaaaacaagcgacccttggtgctaaaccagatcatcaagaggccttcgaagctactgcaaatcaacaggaagtttctgataccacctctttcctaggacaggcctttggtgctatcccacatcaatgggaacttcctggtgctgacccagttcatggtgaggccctgggtgagaccccagatctaccagagattcctggtgctattccagtccaaggagaggtctttggtactattttagaccaacaagaaactcttggtatgagtgggagtgttgtcccagacttgcctgtcttccttcctgttcctccaaatccaattgctacctttaatgctccttccaaatggcctgagccccaaagcactgtctcatatggacttgcagtccagggtgctatacagattttgcctttgggctcaggacacactcctcaatcatcatcaaactcagagaaaaattcattacctccagtaatggctataagcaatgtagaaaatgagaagcaggttcatataagcttcctgccagctaacactcaggggttcccattagcccctgagagaggactcttccatgcttcactgggtatagcccaactctctcaggctggtcctagcaaatcagacagagggagctcccaggtcagtgtaaccagcacagttcatgttgtcaacaccacagtggtgactatgccagtgccaatggtcagtacctcctcttcttcctataccactttgctaccgactttggaaaagaagaaaagaaagcgatgtggggtctgtgaaccctgccagcagaagaccaactgtggtgaatgcacttactgcaagaacagaaagaacagccatcagatctgtaagaaaagaaaatgtgaggagctgaaaaagaaaccatctgttgttgtgcctctggaggtaagcaaacagtcaaggggctgggagacagctgacacttggtatagtgatctatatgcagagac

SEQ ID NO: 7256 - DNA, 2988 bp, Homo sapiens
tcttgctcaggctggtcttgaattcctgggctcaagcgatcctcccatcttgtcctcccaaagtgctgcgattacaggtgtgagtcactatgcctagcctagttgtcttttctttttgtatattatgtccttttggtattttatgacttcgctgaatgtgtgaaaagcaaaaataatattttaggctgtatccacaggggctttacatttagttgttattaaattttaatcttctatggctgttattcagatatttaagtagatgacataagtaatttctgtattttacaggcagattttgacaacaaaccagtaaatggccccaagtcagaatccatggactacagtagatgtggtcatggggaagaacaaaaattggaattgaacccacatactgttgaaaatgtaactaaaaatgaagacagcatgacaggcatcgaggtggagaagtggacacaaaacaagaaatcacagttaactgatcacgtgaaaggagattttagtgctaatgtcccagaagctgaaaaatcgaaaaactctgaagttgacaagaaacgaaccaaatctccaaaattgtttgtacaaaccgtaagaaatggcattaaacatgtacactgtttaccagctgaaacaaatgtttcatttaaaaaattcaatattgaagaattcggcaagacattggaaaacaattcttataaattcctaaaagacactgcaaaccataaaaacgctatgagctctgttgctactgatatgagttgtgatcatctcaaggggagaagtaacgttttagtattccagcagcctggctttaactgcagttccattccacattcttcacactccatcataaatcatcatgctagtatacacaatgaaggtgatcaaccaaaaactcctgagaatataccaagtaaagaaccaaaagatggatctcccgttcaaccaagtctcttatcgttaatgaaagataggagattaacattggagcaagtggtagccatagaggccctgactcaactctcagaagccccatcagagaattcctccccatcaaagtcagagaaggatgaggaatcagagcagagaacagccagtttgcttaatagctgcaaagctatcctctacactgtaagaaaagacctccaagacccaaacttacagggagagccaccaaaacttaatcactgtccatctttggaaaaacaaagttcatgcaacacggtggttttcaatgggcaaactactaccctttccaactcacatatcaactcagctactaaccaagcatccacaaagtcacatgaatattcaaaagtcacaaattcattatctctttttataccaaaatcaaattcatccaagattgacaccaataaaagtattgctcaagggataattactcttgacaattgttccaatgatttgcatcagttgccaccaagaaataatgaagtggagtattgcaaccagttactggacagcagcaaaaaattggactcagatgatctatcatgtcaggatgcaacccatacccaaattgaggaagatgttgcaacacagttgacacaacttgcttcgataattaagatcaattatataaaaccagaggacaaaaaagttgaaagtacaccaacaagccttgtcacatgtaatgtacagcaaaaatacaatcaggagaagggcacaatacaacagaaaccaccttcaagtgtacacaataatcatggttcatcattaacaaaacaaaagaacccaacccagaaaaagacaaaatccaccccatcaagagatcggcggaaaaagaagcccacagttgtaagttatcaagaaaatgatcggcagaagtgggaaaagttgtcctatatgtatggcacaatatgcgacatttggatagcatcgaaatttcaaaattttgggcaattttgtccacatgattttcctactgtatttgggaaaatttcttcctcgaccaaaatatggaaaccactggctcaaacgaggtccattatgcaacccaaaacagtatttccaccactcactcagataaaattacagagatatcctgaatcagcagaggaaaaggtgaaggttgaaccattggattcactcagcttatttcatcttaaaacggaatccaacgggaaggcattcactgataaagcttataattctcaggtacagttaacggtgaatgccaatcagaaagcccatcctttgacccagccctcctctccacctaaccagtgtgctaacgtgatggcaggcgatgaccaaatacggtttcagcaggttgttaaggagcaactcatgcatcagagactgccaacattgcctggtatctctcatgaaacacccttaccggagtcagcactaactctcaggaatgtaaatgtagtgtgttcaggtggaattacagtggtttctaccaaaagtgaagaggaagtctgttcatccagttttggaacatcagaattttccacagtggacagtgcacagaaaaattttaatgattatgccatgaacttctttactaaccctacaaaaaacctagtgtctataactaaagattctgaactgcccacctgcagctgtcttggtgagtacttgtgtgcatgtgttcttatttcacctgcacaaattacctcaatcatgactgaagcaaattctgattcatcttttttgtgtgatattttttccccattcttattctaactaagatggattaagtaaatctataaccatttttctgtgggaacttttggttctgccacaagaatggaaaattcagctcataatttggaaaaacaaacttggaaaaggtaaacccgctcaagtggaaaaataggctgatatatctctcaatgttgaatgtctgtcaatttatcgtgcgtagcataagaatgaatttcgtaggccaggcgcaatggctcttgcctgtaatcccaacattttgggaggccgagtcagatggatcacttgaggtca

SEQ ID NO: 7257 - DNA, 1124 bp, Homo sapiens
cgggtgcctatagtcccagctacttgggaggctgaggcagaatggtgtgaacccgggaggcggagcttgcagtgagccgagatcgcgccactgcactccagcctgggcgacagagcaagactctgtctcaaaaaaaaaaggggattgctcaattttaataggattctaagggcaacctttaacatttattgttcttggataacttttagtattacacctcaattaatacagattttttttttaagcaggagataggagtataaatatgacccacatcttaaaatattttttttctcctctgattttcagaggaagaaagaattcgttaggggcaggaagaaaggaacattaaaagttaaatttcatgggctgttgtccttgcctttaattatcaaatcttaccaaaaccttgtcaagattcatggttctgaattgagggggaacaaaaagtataaaagtagcttctcctgtcccctatgcaattctgtaaagctttgggtctaataatcttattccttccacagatcgagttatacaaaaagacaaaggcccatattatacacaccttggggcaggaccaagtgttgctgctgtcagggaaatcatggagaataggtgaggaaatacgcttccctgttaaaatcattcttactgtggatctgactcaacggagataaatcatctctaagaacaaacgccgtgattgaaaaatgatcaggagtatgagttggatgtttcttagggcccaacaaaagaggggtgtcctcgtgtccctactgagccacccatcatacaagctgttgggcacataaaagcacccacaaagcaagactagttgtctttgataaactcagaagtactttttatatatcgcataatggtagaaataggtcaaattaccacccttgacactgcataccctacattcccattgcttgtctggcactcagcctattttttaaagagtgatctttgaggataagtgagtaggactggttaacaaattaaaatacctgccacacaaaagcaaatgtttaacaagagtaaattacgaagagtgtctaatttttgaacttctgtacatctatatcttatatacattaagatgttcaaagccaaagcct

SEQ ID NO: 7258 - DNA, 1263 bp, Homo sapiens
tacatttgttcccttgtgacatttgtggaatttcagtgcagttttctaccgggccctctcttgtctgttgtgcaaactataacagcagtgaaataaaacacagactgccttgtactacttctacaaataataaccacgtgtcacagatttttgttctgcctgttgtttgttagtcatataggttcaggtactcttgtgatgagtctcatggagggaactgttgaggcagtggaaagtcctacagggttttatcccttgagaagtagtaactttaaaaaaactaaaatatggccgggcatggaggcacatgtctgtaatcccagatctttgggaggccaaggaaggaggattgcttgaagctaggagtttgagaccagccttggtaacatagttagaccccgtctgtagaacagattttataaattaagtaaataaactaaaatataatcatggagaacatcaaaaggaatatccattgcattcaaatttggcatacttgtcttccatagatgaatgtattctgttttttcaggttttaagaagaagcagtgatgaagaaaaagttctttgtttggtccggcagcgtacaggccaccactgtccaactgctgtgatggtggtgctcatcatggtgtgggatggcatccctcttccaatggccgaccggctatacacagagctcacagagaatctaaagtcatacaatgggcaccctaccgacagaagatgcaccctcaatgaaaagtaattaaatctgttttatactgccttaccattcagatctctattacatattggtaaaattgttaattagctaccaactatgtatattatatgggagaataggatttgagtattgtggaattaaaaagaatgaacatttctgtaaagagagagtctctattttatagtgagttaaggttactttaaatcattctcctttggaatattacttcactgtgaccaggtgcagtggctcatgcctgtaatcccagcactttgggaggccgaggcaggaggatcatgaggtcagaagatcaagactatcctggctaatatgtctccactataaatacaaaaaattagccgggcgtggtggcgggcgcctacagtcccagctactcaggaggctgaggcaggagaatggtgtgaatccgggaggcggagcttgcagtgcgctgagattgtgccactgcactccagcctgggtgacagagcgagactccatctcaaaaaaaaaaaacaaaaaagaaaagaatatta

SEQ ID NO: 7259 - DNA, 1849 bp, Homo sapiens
tatcttagcatactagatttgggaaaatgataactcatcttttctgataattgcctatgttctaggtaacaggaaaacaggcattaagtttattttagtcttcccattttcttcctattactttattgactcattttattgcaaaacaaaaaggattacccaaacaacatgtttcgaacaaggagaattttcaatgaaatacttgattctgttaaaatgcagaggtgctataacattcaaagtgtcagattccttgggagtatggaaaacctaatggtgcttctcccttggaaatgccataggaagcccacaaccgctaacacttacaattttggtgcaaaagcaaacagttccagcaggctctctaaagaaaaactcattgtaacttattaaaataatatctggtgcaaagtatctgttttgagcttttgactaatccaagtaaaggaatatgaagggattgtaaaaaacaaaatgtccattgatagaccatcgtgtacaagtagatttctgcttgttgaatatgtaaaatagggtaattcattgacttgttttagtattttgtgtgccttagatttccgttttaagacatgtatatttttgtgagcctaaggtttcttatatacatataagtatataaataagtgattgtttattgcttcagctgcttcaacaagatatttactagtattagactatcaggaatacacccttgcgagattatgttttagattttaggccttagctcccactagaaattatttcttcaccagatttaatggataaagttttatggctctttatgcatccactcatctactcattcttcgagtctacacttattgaatgcctgcaaaatctaagtatcacttttatttttctttggatcaccacctatgacatagtaaacttgaagaataaaaactaccctcagaaatatttttaaaagaagtagcaaattatcttcagtataatccatggtaatgtatgcagtaattcaaattgatctctctctcaataggtttcttaacaatctaaacttgaaacatcaatgttaatttttggaactattgggatttgtgacgcttgttgcagtttaccaaaacaagtatttgaaaatatatagtatcaactgaaatgtttccattccgttgttgtagttaacatcatgaatggacttcttaagctgattaccccactgtgggaaccaaattggattcctactttgttggactctctttcctgattttaacaatttaccatcccattctctgccctgtgattttttttaaaagcttattcaatgttctgcagcattgtgattgtatgctggctacactgcttttagaatgctctttctcatgaagcaaggaaataaatttgtttgaaatgacattttctctcataaaactggtcatctaacattatttctacccctctattatgttttactgtaatgatcaccttttcttatacctctcttataacacttaaattgggttttaaatctgcgtttgttcatagtatgatcattgaattcactgatacatgacctcctaatagcccactcagttcataatatgctacaaacttaccaattttaatgagagaataattcctgcctattgcagaatcgtacaaaatatcatgctgcccttgatattccatttcttttttcttttttcttctttttttttttttttttgtagagactgtctcactatgttgcccaggctggtctcaaactcttggccccaagagatcctcctgcttcagcctcctaaagtgcaaggatgataggcatgagccactccacctggcctgaaattccatttctaatggctcttca

SEQ ID NO: 7260 - DNA, 2471 bp, Homo sapiens
cacctcacaatcaaaatttaatgtatttgtcatattgaaatgcagggttttttgaaggaaacatggtaggtaaacattttagttcccaactcctgatcgttaaaatgcaaaattgggcctggtgtggtggctcacgcctgtaatcccagcactttgggagaccaaggcgggtggatcacgaggtcaggagttcaagaccagcctggcctagatggtgaaatccccgtctctactaaaaatacaaaaattagccgggcatggtggcagacgcctgtaaccccagctacttggtaggctgaggcagagaattgcttgaacccaggaggcggaggttgcattgagccgagattgtgccactggactccagcctgggtgacagagtgagactccatctcaaaaaaaaaaaaaaagcaaaattgttggcatctctaagacagagcaagactccctctctaagagatagtagtgtctcccacttaattgaattcgttttgttttgtttgctttgctttgattcttgccacgtaaaatctgtgggtcttgacccagagatttgctcagacagttaagaaaaataataagatgtatttgtaaatttttacataatgaaaaatgagatgtatttgtaaaattttaaaataacctctttataaatacgtttataaatataaagaggtaggatgttttggctaattagcacattctgggtcatacacacacacacacaaacaggccaaacactctagatagtcaaataaattccccttttggtgattcagttcagtaatggtgattcagttcagtaactgcctatcctcatcaatgcttgtttgtgatgatgaaatagttgacaaccgggactttacaaaaatagctcctgaaaaaaattaaatattttattgcaatatatgttcatattttttttaacttttatgaaataacattgtgataggtgctttaagaaaaatatttttccagaagtggtttatagtataaactaagggcagtttttacattgtgatgtgtgggtggatggtcatatttagttaggttattaagaaatcatgaagtgttccctaacaagaaacttgcaaagctatttggcaggaagaaaatcattaacttctagtttatttattttttttctcatgctatacgcttaattaccaagtaaattcacttgcataccattaccttaattcaaaggagaagccagaatgtttatcattggtgggagtaaaatatacacagattctttaccatggtgaaatagaataatactgaattcccaatacagaaatactaatttcataagctaatattcctatcttttagctgacttctttctctcttcaggatatatttactatttattatttacctttgaatttttgatttgggggatttttacctattgccatcctactatcttaagtatcctgtacaatgaaatatcttagcaaggaaacacttttaaaacttcacaaatatccaatttcattcttaacatatgggggaagcagtaaaagaaaaagcacttcaccacgtagaagagaaagtgatcattttaattaagataatttcaattcattatcaacatttaatcctctgcaaacaagggaacacttactagcagtacttgaagacttgtgagttggaattgcatgttacttgaaagatctaattaagctaaattttggtgcacagcaggttgtacatgatttcatgtttatgtagcaaaatgcattgaaatgtattagtgttgaaacatacatgtaaaggtagttgtggaaattgttatattttccttgtgtgtcatttatttagagcataaaggttttttttattcagcctaactgaataaggctaaatgaatactgtaattgaaaatatattttaaatctttgtcatgagtttttttaaaaaaaactattgcaaattgtatcattcctgattacacagaactttgtgggtggttttaaataaattttatacttctattttgcacctgatagtctaatttttctttccttctaaaaatcacatttaaaagttttaatattcaataaaattcacacattttaactacaaaggactataagatttaatatttggagatgactaaatgtatgcatgtgctcaccataaaaccaaaatggctagcatttgtgaaatcctcattatgtgccagaaaccttacattttatgtaaattatgtaattcccatggtgattctattaaggactcttatcagcctcattacatagatctattctgaggcttgaagttattaagttcacagccctagtaattggcagagctgttactctactcatgtccttacttggctttataattgtttcaataaacttaatacttttccttaagtctgctaaatttaaatttaattctgaatgcagtttgccaatatattttactttttttactttttttttgagacagtctcacac

SEQ ID NO: 7261 - DNA, 1196 bp, Homo sapiens
acctctgttgcccaggttcaagcgattctcctgcctcagcctcccgagtagctgggattacaggcgcccaccactgcgcctggttaatttttgtagttttagtaaagatggtgtttcaccatgttggccaggctggtcttaaactcctgatctcatgatccacccaccttggcctcccaaagtgctgggattacaggcgtgacccaccacgcccggctgcatatttcttttatgtcactttgtacactagactgtcacttcaaatatttactataattgggtgctttaaattttgttgatatttttcacttctaatgtttttcccactagattaggagtgccatgagtatctttatcattattacttagcatattactttgtacttgtaggtatttaacaaatattttagagtaacaatacagttaactgtggtaccccacacagataaaagtacttactaaaaacccagcaaatcttgtcattgttttttatagttgaacgcatgaggaatgggattgatatcctggttggaacaccaggtcgtatcaaagaccacatacagaatggcaaactagatctcaccaaacttaagcatgttgtcctggatgaagtggaccagatgttggatatgggatttgctgatcaagtggaagagattttaagtgtggcatacaagaaaggtaatccacaaattcaagaagctgataaaaaagaccaaaggaagggtggtaactctgtctcctgggttcaagtgactctcatgcctcagccaccctagtaactgggattacaggcacccaccaccacgcctggcctcgtatttttagtagagatggggttttgccatattgcccaggctggtctcaaactcccagccccaggtgatccgactgcctcaccctcccaaagtgctgggattagaggcatgagccactgcgcctggcctggtgactaagtagttttctaagagattaataaagccttgggaaattggaatggggctcattttatctagaaacttggattaaaaaaaaaaagtcattactctgggattaaagctggtgaggaaaaaaaaagtcatgatttatcatattaccacaatggggaaaacttggaaaagtaaagaaaaataccatcttctgtcatcttgatgtggtctgcttttggtgtattcctgatgttttgcattttattg

SEQ ID NO: 7262 - DNA, 1203 bp, Homo sapiens
tggaacttaaatctatctgagttatgtaaacataaatcacacttaaaatttaaacattagagggcagcagagaaatctagtgctttgtgtttaagcttaaaagtgttgaagtttaaaatttcacctttgattctgataatctagatgaattaatttcactgaggaacagacctgtatattaatctactacagattgggtttttaagtaaatgaaaaggcaaaacatacagaaatttgttggttatttggtttcctgtagaaagctagggagtggcatttcctttcctgcattttcctggttgtcagaaaataaagaagttagatgctctttagagaaaggggagaggcatggggagatgggcagatcatgttgctttctgctttactggcttatttaggtttttttctgtcagtggtggctgcagacagctcttatcaggcttgagtagttgtttccaggagcaagacattagaacattagtgttgtgctcactgatcattgtgttgtgattttagtttccagcaaagctttactaaatagatgttttttttcttcttacataagcatctggctattaagtgccactggactcagagggcagcagttattggggatgtcatccgagtatatagtggtcatcaaggacgcactatcatcttttgtgaaaccaagaaagaagcccaggagctgtcccagaattcagctataaagcaggttggtccttccccttatgccagcaaaactggggatatcaacaaatcttcaccttgggcatatctgctcttggtctgattttcattcattcagtgaataccagtttagtttagtttagaaatgagaggaagctacttttttttttttttttttaattgaggcagagtctcattctgttacccaggctggagtgcagtggtgtgatctgggctctctgcctcctgagttcaagtgattctcccacctcagtctcccgagtagctgggattacaagtgagcaccaccattcctggttaattttgttttttctttatttttttgagagggggtctcgcttcttcgcccaggctggactgcaatggtgtgatcttggctcactgaaacctccgcttcttgggttcaagcagttctcctgcctcagcctcccaagtagctgcgattacaggcacgtgccagcatgcccagctaatttttgtatttttagtaga

SEQ ID NO: 7263 - DNA, 2586 bp, Homo sapiens
agaatgatgtttggcaatatagaactgaacattatttttcatgcaaagttaaaagcacattgtgcctccttttgaccacttgccaagtccctgtctctttcagacacagacaagcttcatttaaattatttcatctgatcattatcatttataactttattgttacttcttcatcagtttttccttttgaaaggtgtatgaattcattacatttttattctaatgtattatctgtagattagaagataaaatcaagcatgtatctgcctatactttgtgagttcacctgtctttatactcaaaagtgtcccttaatagtgtccttccctgaaataaatacctaagggagtgtaacagtctctggaggaccactttgagcctttggaagttaaggtttcctcagccacctgccgaacagtttctcatgtggtcctattatttgtctactgagacttaatactgagcaatgttttgaaacaagatttcaaactaatctgggttgtaatacagtttataccagtgtatgctctagacttggaagatgtagtatgtttgatgtggattacctatacttatgttcgttttgatacatttttagcttctcattataaggtgattcatgctttagtgaattcttcatagatagtatatataaaagtacattttaatagaaagccagggttttaaggaatttcacatgtataaggtggctccatagctttatttgtaagtaggctggataaatggtgcttaaatggtaatgtactccacttcttcctattggaagattaacattatttaccaagaaggacttaagggagtagggggcgcagattagcattgctcaagagtatgtaaaaaaaaaaaaaaaaaaaaagaaccaaaccactggaaataatcaaatgcaaaaaggtaacaaattcataactggaaagcaaagagaagaacaagtatgatttggatgataaagcattgttttaatggtgaaaacttcacagatcactaatgtttctagaggttaacttcaagtgggcaagctggggtttttaggtagtcagtggcctagttcctaaagccacagtataggatctgttaaactgaatgtctgttgaaagtttgttttagctgcttggaggcttccttttaagacaaactgtatgtgattaagttgttttgagggaactgaagaacctgatgtagcccctggccagataactgcctgatttctcagatattatttctctgggaaacattctacatagcacaggagcttaagagtggcattatcttctcgccttaatttccagagattatttctgtactgagaatcctggaactactatgctaggaaatttaaagctgcatggtctgtcttgttttcatttaattattgtgaatacctagaatctttcttggtcctgatttctcttgcttaatccagtctttatctctaactgccccttatttgatcaccatgtactaggagctctgatagccagctcagctcctaatccttgaggcaacattctttttctatttgaacttcagttctgtccttgaatcccgactagatatttcttgccctctggtctcagaattctcttggcttttattccttgatccacttgccagttttatcactttacccttgttcctcatggcttcccatcaagccatgggtattaggtgacagtgtaatttattagattctggttttgcccaaatactgggcatgctttaataataactgaaccatttcattatttggataggcatgggtaccttatcaagcagattaaaaggatatggtacccgtcctttagaaaagaacagctaaaaccttgttgtggattatggatttagcctaaagaaaaataatctggcataaattaagagtaagagagaagattaatagaaatttcacttcacataacttaaaacatggctatttcaataaaggactaaagtttctcctggatcccagaattcaacctgtatttataaatgtataatgtatttagctactttttggtttaaatgaacttgttgggttagcttggtaaatgttataatttttactattttctacaaagaaaatattttctaatttaagttggagctatctgtgcagcagtttctctacagttgtgcataaatgtttttactataaaatgagctaatgtataaaatactgctgtataccataataaagatagtaatacttgattttagtggcttttgttttctaaaatgaaaatagcttgaaatatttattataaaaataataaaagctagatataaaaatctaaagagaaaaaaaaccagtcacccttatctaatattttagtgagcagtcttccacatgttcatttataaaattggaattatttgattttgtgtattgcttttcccccctcaacatgttgtgcacaattttgtacaggcttacatggacatttttgatgacatgttttcttgtatggatatgccactacacatttaaccagtactcgatgtccatgttggttatttctaatttttcaccattataaacaaccctaaagttaatatcctcacatatgtgtt

SEQ ID NO: 7264 - DNA, 1166 bp, Homo sapiens
cagctcttcttagactccctgagagacccaaataaagtattccctgagcatataggggaagatgttcttcgccctgccatgttagctaagtttcgagttgcccgtctctatggcaaaatcattactgcagatcccaagaaagagctggaaaatttggcaacatcattggaacattacaaatttattgttgattactgtgaaaagcatcctgaggccgcccaggaaatagaagttgagctagaacttagtaaagagatggttagtcttctcccaacaaaaatggagagattcagaaccaagatggccctgacttaatccttgtttttaaagaaaggaaatgtgcaatattgaagtgatctttttccctagtcagacaggcccaattccattgtgatgtttacctttatagccaggtgagtgcagtttgaacttgagatacagtcaactgagtgtttgctaggatcctaaggaacataaagttaattaaaaacttacacctaattatgtaaattgccttgttaaagacatgtgatttgtattttagatgcttgtttcctattaaaatacagacatttctaccctcagtttctaaatgtagactatttgttggctagtacttgatagattccttgtaagaaaaaatgctgggtaatgtacctggtaacaagcctgttaatatattaagattgaaaaagtaacttctatagttactccttctaaaatatttgacttcctaaattccccccacccaaaatctttcccttttgaaaatactaaaaactaagttatgttattataaagtgtaaaatggtttgtcttaattataggagaaaaaggccttgttagaaataaaataaactgacttatttcactaatgaaaacttctgtttcctttttgttttcttgtgagcactgatacctcaatacattgatacctcaatacctttgaggtattttttgatacctcaaagatactagcttatttgaagctagagaagaatatttcttcaataacattgcacagttagaaaacattaaaatatcattcatgggccaggcaccgtgtctcatgcctgtaatcccggcactttgggaggctgaggcaggcggatcacaaggtcaggagatcgagaccatcctggctaacacggtgaaaccccgtctct

SEQ ID NO: 7265 - DNA, 1977 bp, Homo sapiens
ctgaaaaactgaggaaacagagaacaaactttcaccagcgatttgaatctccagaatcacaggcatctgccgaacagcctgaaatgtgaactgaacaggagaaaaaaagaaaagcaaaaaactcctgtaacccttgagattaagttcagcaggttaaagatggttgcagctggagggggcggaaaaaggccaaaactccatatatgttagtcttcctttatcttacagcgcagcatttattttatgatataatgaaatgttcgttcatgtatatacatttttaaaagtgctttctttgaaacactggaactttgttaagctgcctttttttttttaacttcctactttgatgataagcactcagatatatatcagcgtaaacatgaaaaattttcatgtgagtaggctggtatttgtaattttgctttctttctgcataatgttgattataaatcctctcttttcaggctaatgattacctcttattctctacatgcaaaaaattaaatattttgtgttcaaataaaattagaaaacctgagtggcctcttgtgtcctgcagagatttaaaacatggcatctcaatatttttgagaactacatttgtttttaacatatgtgtttgagaaaagcatatggagtgtttcaccgcaggcacttctgagtaccattccatggcttccagaattttatcctctttgaggtcttctgtgctatgaatattagatttctttccccaagggattatgtggcaggtcattatggccttcttttttttggccatattaagtaacagttttgctatattccagtagtaccgttgtgtgttttctgcaatgtggagttgacttagcttggcattttagatttgttaaaactattttttccataaatactttgaaacatatttatatatttcaatttaaggaatctttttgccatgtgtatgcaaatattattttcttcatacattcattttcttttcaggggaaaattttgggatgggggactcaggaggacctgtgaagcatgtagttatctagatctgggtaatttcatgtttattaaactcgaactttggctagttaaactcatattgaaacttcatctagtctcttaattttttaacactaaattcaagtcatttgttttaagtctctaaaaaagaagattgcagtcatccattcatatgcatggggtctgatcgcaaatacactaaatgtggagtgtaggaaccaaaatgaaacctgctgtatggaaactactttcacttatggttcattggtttttgtaccaatattttttatgcacttcagtgcaagtcttgtcagttaaccttactttatgagtaagctaaataacccaaattacatttctttaaacctgttttactactatggcactttgataaaatggtcaggaaccaactttactggcaaaagggtccatgtaccaccatgtgctggagcatctgttctacatgtggatatctatgaatggtaatgttttccttcatgtaagtgcctattcagagtttcagaattttaaaatgccaaatattttcatggtcatttgcatgtagtaagccagaaaatattcaaagagattttgaaaaccaattgtatttaaccagcctcaaattgtgcaaccatgatgtataataaagaatttgaaacagaaactgagcttgctgtttgcatgattaaaatagctctgttctcaaatctcttctcattgttagatttattgtcgaggataggattgttcaatagtttaggaagctgtaactgtgataatgaatttttataaatattactggtttcaattttaaatagatatataatgcttttaataggctggcttaaaactgtcatatacaggatgcctatccgttttgctcaagactttttgtagcataaccaatttgaaaaaaattcaaatttaatatttggtgatttcagtcaaaagtcagccagc

SEQ ID NO: 7266 - DNA, 1117 bp, Homo sapiens
tgtatagtccacatcattccctaaatgtctgggacctggctcttaaaagctcagcagccaagaattatcttagcattttgtttctttttccaatttggctctggctttcttttcccagggctgtggaagccggggtctggttgggaagtggggaagggggccagggatttctcttgctcccttttaaaataggtctggctgcgcagttggcatccagttagattggcaagccatgtggcattactgtccccacatccacttgctttcttctggagtgaactggatattgtgagcaggtttctccccaccctatctttgcccccagagaagcccattgtgtggatgatcgggagatggaaatgagtctgggcccctccccaagcccagtgtgatctgggaggagccacttggcccctatgggcttctgcttcatccctgtcctggagcaatgcccagggccttggggtgctggaggcctcccagccctcatccagccccatccattcttctttgcaggccatcctgatcacctggacaaagcgatttaaagcgagcggagtggaaggagcagatgtggtcaaactgcttaacaaagccatcaaaaagcgaggggtaatttctcctgggccctctgcctcagccatgcaggggtgtggggagcagggctgcattctaaaacagaccagtgcccttcctggggggcagtagtgccaaagcctgaagacccaggcaggggagagttgagggctcacagtgtggaatgatgaggatggggatggtgcaaagcccagctctcggaggtgctgcctggagcacccaggcctggagcagggggtcacctcctgacaggagtgctgggctattcagggagtgggtgtcacggatgcagcctgctgtgcttagaacaagggcagaggagcccgccttatcggggacgtggacctcctgtggaggtttgcagaggaatgtagctccatgagtaaaatccccactacccaaagactcttaagccaggtaattaaggaaactgtgaggttttcatcatttaatcaccatgctctgatctagttaatttgagtaccagctgtaatgaaaccagtaccactcacaaaagcag

SEQ ID NO: 7267 - DNA, 1215 bp, Homo sapiens
aagaaatcatggtgcatccctagagggaatactgcagcagctgtttccaatcctgttctcagataaggctgtgggaaattgctcaatgcatgaaacaggaaagagaaagaaaatcacatatcaaggataatcccattttgcatatcatgagaagcataccagctaggaaaaataaactggaaggaaatatattaaaatgttaatagcattttcctagatgttgagatagtgaatggtttagattttccaatttttattttgctagatttgccaaattctccacagtttaacatgtaacacttgcccttgactctgtctgtggatgagtacagtgattgggggcggggggcgtcctttggacgtggtctccaggctgctcttgtgggtcctgcttcatccagccctctggctcttgtcccccacagtgaccgattagcactgctccaggtccgggctatcctccagcagctaggtctgaatagcacctgcgatgacagtatcctcgtcaagacagtgtgcggggtggtgtccaggagggccgcacagctgtgtggcgcaggcatggctgcggttgtggataagatccgcgagaacagaggactggaccgtctgaatgtgactgtgggagtggacgggacactctacaagcttcatccacagtgagtgggccttccagttgggatgcgcagagcttgctgggatccctttgggttagggggtatcagggtgtggtttacgctggggaaatgccctgcgggagcccagccaggctgaaggctgtgcgttcaggagctggggattgtctaggacaaggtaatgaacagtttgtagggtttgactgggatccttagggagacagagaagtggcttcacttggccagctcacaccagtggcatgatgtgaccctcaccccactcctcctggtcccccttaggtgggggctaggcagtgggagaggaggtgagggtgggcgtgggctcactcataagcctggtgagctgtagccaggccagaggctctgttgggtaagtggggagaggatattaagaaaggggaggagctgggtgcagtggttcacacctgtaatccagcactttgggaggcctaggtgggaggactgcttcagtccaggagtttgagaccagcctaggcaacatagtgagaccttgtctgtacaaaaaaattttgaaaattagccagggatggtggtgaat

SEQ ID NO: 7268 - DNA, 1190 bp, Homo sapiens
tagccaggtgtggtggtgcatgcctgtaatcccagctactcaggaggctgaggcaggagaatcgcttgaacctgggaggcggaggttgcagtgagctgagatcgcgccattgcactccagcctgggtgacagagcgagactccgtctcaaaaaaaaaaaaaaaaaaaaaaagaaaggagtgatgatgagtattaaaaatgctggccctagagccatgccctgtagtccaacctgcctcaaccacttcctctctcctctgtcctgggcctgatgtgaggaatatagactggcatgttctgtgctctgagagcttgtgacttggttgttgggattcttatgggtggcatgggggattgctgagaaaggagggtgtgaccctgggtggctgtaggaagggcaggatgcagcctagagaggttgattcctggctggtgcgtcaacccaatgattcattcatctctctctgtcttcacattccagagcttcttcaacaggggccatggtgctcccccagggggtcctggcccccgccagcagcaggcaggtgccaggctgggtgctgctcagtcccccttcaatgacctcaaccggcagctggtgaacatgggctttccgcagtggcatcttggcaaccatgctgtggagccggtgacctccatcctgctcctcttcctgctcatgatgcttggtgttcgtggcctcctcctggttggccttgtctacctggtgtcccacctgagtcagcggtgacctctgagggctgataggggtgggtttgttgagagggacttgctgggccttggtgtgagagcaggcatatttggaggggatctggtggtgccttgaaggtatgatcagagaggggaccacaggtgtgtgtttcccctttgtgttaagcgtgaggcagagggagacgttagtccagcatttccaaagtgtgggtgggtccgttggttcccaagatacttttaggtggtatggggcctgcattaagtggcacaaaatcagagcaagaaagcgatgcccttcccaattctctcaatccttttatgccgagaagatctcagctggatgccaacatgttccgatgcctgtggaagacatgccgacgtctcctctgcctagggagcaggacttgggcttagggcaggtggaaaaaattccagacttttttagcactgtttttgttt

SEQ ID NO: 7269 - DNA, 2456 bp, Homo sapiens
gctgtatgccatcatggggcacctgaaaagaaaaacacgtctcaccactgtggttgattcaaaagaaagtgattctattttttaaagaaagcgttgttaatgtaattggtatccctcctaactttttgagttcacaatttacttggtccagagttttctattcttttttttttttaaactaatgaatgacatttagatacttcataaaattatgaacagatatggaggccagagctcatttgggtaaacttactcctgctgagttagcaggttggtgagagaagctcccctgagctcacctgtctctctgactgccttggagtaggtggcataaccttgtgcacagagaactagaaaaggggcagaaccccggccttgcagttgtggcaggtttccactgtggtaagctaggttcattcctcatcaaggaatgtgtagcagattgttcactgtggaggagttaattatagaatgggttattgttgttattcttactcatgaagttacagattttagccagtctttgcttttatacttttgtgaaatttaatttctctctatagcaccttcctttttcgttttcagttatcaaaagtgactttgacctcataaaagagttgagaacatctctcgtgtcacatactgcaggtgcatcagttacttttgcacagattctagggggacatttttctgaataggaagacaggacaaagttaacagcttaagggctcttaattctgtgagttgaggacttaaaagtattgtagcatttgtttggatccatgaaaaatgtattcagtgggctttaaaatttccatttgcagaatttggtctctcaggctgtttgggagctcttttttttacattttttctcctttgacacctattttattggtgtttaaagtaaaggttaacatctgtagcttttccaggtttttttttttttttttttttttttggtatgaaattgtctttctccattgcagaaataagctagggaaacactaacccaaaaactttctgtagagctgttcctttggaggcagcatcacttattggcagtaaagactcagtataaaagcaccggcatccctacttgggtgatggggattaattttatagcattccattttcctagtgccacatgtgaaattggattttgatgatcttaatctatattctacccttataataaaagatcaaaagatatatctcctatgaacagattggagataggagatgaaaagttgggaggatgtctttattctaatgtgagggtagggaaaatgtggataacattactggggtgagggaggcattgttctttagttggagttctcattcttattctccagtactgacttgtggggaaagcatactttttcactgccaggtactgaatgcagaggctcagtgaagtatatatgtgggaagtgcatgcatttcgtttattagcaaacatagctggattaagacaaagttgttggtttggaaaggggttaaagccttaagtgaacaaatctagctaacagtgaatgaactaggtaatataacttgcatatttttaatttcctttggttaaaggtcccccatacttctctgttcggagacatgagaagtatgattacttcagtgttagttttcttaattttttttttcccctatttgtcccttgtcactttgttgcaagctagaaatctgtgggttatacatagggcagctctttgtgaaagtggtttattccactggagaaaggggattgaaaatcagttagaaccaatgtatttcttgccccacggaacactattcctataagatagctgaaagaagctgctgtgaggagctcagctccaaacacaggatcagcaccttgtataggaattcccatgaattatgacttctcattctgttttatcagagtgcatatatgtcctacttcaggaaaagtaaaacagtcatttacgaaagaaagtcaatctgtatcctaagcattttaataaaaagttaaaacaaatacgctatttccttttttttttttcattggtttgttctgagctctgagtttgaacaatgccgtttatttggggaggcaaccaaaagttccctgcatagaggaagagacatttagggtgcgtgtgagatacttgaattttgccaccaggagggggaaaaaggctggggtactagaagtaatagatttagtactacttgagagatttggaacatgctgtggacccagggttgttggtcatctctgcaacaggatggggatggcagatgtttgagcaaaatctatattaacatgctagcaaggactagttctagtttagctgtgtttcactcattttacacagaattagaattggccaggtgtggtggctcacgctgtaatcctagcactttgggaggctgaggtgggtggattgtctgagctcaggagtttgagaccagcctgg

SEQ ID NO: 7270 - DNA, 1260 bp, Homo sapiens
tggtggctcacacctgtcatcccagcactttgggaggctgaggcgggcggatcacttgagcccaggagttcgagaccagcctggccaacatggagaaaccatgtctctacaaaaaaaaaatacaaaaatttgctagatgtggtggcacacgtctgtaataccagctgctggggagactgaggcacgagaattgcttgaacctggaagatggaggttgcagtgagccatgattgctgccactgcactgcaatctgggcaagagagtgagaccctgtctcgaaattaaaaaaaaaagtttgaaaatcacactatgcaattagcatgaagtgtaaggaagcccaaaagaaaacacctgcatttgctgtagagaaattttgtatgtatgcctgttaattttcaggtaattcatagtaggattcattaaagcaagtatattagtctttgttatatgttaggtgtatttttgattctcaacaggaattctaatttgtttttcttttctctgaatacagtggataagtggttccatcaccagaaaaactaatgagatttctctggaatacaagctgatattgctacatcgtgttcatctggatgtattagaagtaaaagtagtagcttttcaaagctttaaatttgtagaactcatctaactaaagtaaattctgctgtgactaatccaatatactcagaatgttatccatctaaagcatttttcatatctcaactaagataacttttagcacatgcttaaatatcaaagcagttgtcatttggaagtcacttgtgaatagatgtgcaaggggagcacatattggatgtatatgttaccatatgttaggaaataaaattattttgctgaaacttggcttaggatatttttattttaatctgaagccaacattaagtaggtatgggtattttttggtgtttgttttctgttgatagtcttataattcaaatttataattattagacgaagaaatcgcttatatttatagtactcttgatactatgctctagtacataagtcctagcataccattctaaagcaaaagtttttaaatttatatcatattagcagaaagcacaatgttgctcaccctttgaagttatatattaatagttatttttttacttcttcagtcaactaattggacgcttaagtcatttatattatattctaagttatcagctgaacaaaccagtttgaatgccagcccatcttcttactagctctgtaatcttaagtcagtttac

SEQ ID NO: 7271 - DNA, 1195 bp, Homo sapiens
caagcgattctcctgcctcagcctcccaagtagctgggattacaggcatgcaccaccacgcctggctcatttttgtatttttagtagatacagtgtttcaccatgttggctaggctggtctcaaactcctgacctcaggtgatccactctcctcagcctcccaaagtgctggaattacaggcatgagccatcatacccagcctaaaaccacacatctttaaagtaaacgtttgggtctatatttgtgtttccctattgtctcagttattgagtagttggcttttgcttgttttaaataggatcattatctgttttaaagcttaaatttagtttagcattagatgtgtagtaggagctacagcatttaattgaaactcttgtgtgtagttaagattcttaaatgcgaataaagaactaaaacaatgagaaaaaagtagctgaagagtcataggatgttatctgttattctcaacatgatccattttgtcagtatgtataggaatgatatacactgtcttatatttttagacttgggaagacccagggcacaatgataaacatactggctgttgtggtgacaatgacccaattgatgtgtgtgaaattggaagcaaggtaatgaaatgtgacatttttttctttagtgttgagatattaatgaagtataccaaatttcatactttaaaaaatactgtgaataaaatgcatgaatattagtgaaataatgatgtctctttggtattaaaggcttcttgcattttaagcatttgtatattataatttttacatttaaatctagtctggaaaaaaatgtgtctatgtatgtatgattgaacatatatctagaagaactggacatgttctgcattgctttagaagatggataattagtcaataggtgaaaggtaccaggagggaaattccctctcaaaacatggcaaatcttgcctaacaatttagaatgatcagtaaattgacccgaaccaaataacctcatgagttggagatccatggtagtaactcctccatcaagtagggttgttctaagattctgattatagttatttctttatgtctctctcaggtgcagagaaatagtaaacaactaaaaacaaagttatcattttgttttttaagtcataaagtttttgagtcatcgtatgacttgcttaactcatgacttttataaaataaa

SEQ ID NO: 7272 - DNA, 1108 bp, Homo sapiens
aacaagatttttatgggaaataaatttgagatgcatgagtggcctttaaagctttagtaagtggagaacaggcagctctgaaacaagacccaagtgaatcagaaggacagccaccctaaagggacctccccaaagcggccccaacctggcgctggaaagacggggaggctctcagcatccaggcagctgccaggatcaactcagtcatcctcttgtttccgaatagagctgccacgtgatcttcctccaccctctgagccattctcaggaagagaaggagggaggtctgggatctcaacagggcatagaggctgagagggacaaggatacttctgtctgctttctgatgccaaccactgggaggtggtacctgaccttggtgctcactggtagctaaatgccctcacgtttcaggtctgtgtggcacgtggatggcttttgttgccaccttgagcacacggccctccagtctatgtgtgtgacccttctctgccctccacctccaccagcatcgggcgtggtgtgtggcatacagcaggtactcagctgggtgggagcattatgtagagcaggaattccaaagcctcgaagctcctctgaaataagtgagacatgatagggcagagtttttcaagttgcgtactatgaacctgctagtgaattgttaagtcaagtcagtgggttgagaccagcaattttttaatgcagtaaaatagaaaatgtcagagtacatcatcacatataaaatggtaattactatgttgtaacttttaatttcagttttactatgtgcatgcacagatctatctatctatctatctatctatctatctatctatctatctatctatctcctgggacatgatgaaaaatggtatttcttactcttagtcatgacgaaaaaatattgaaagccactcttatgagttgtcctgcagagatttgggggtctgttctcagccaactcagtcacccgtcctccctagctcatgccccaaccacattatacagccttcctcctctcatccctccccttcacctgccccgcatggcccgtgctctcagtctggaagtcctttctcatgtcttaccattttctctgcctgtg

SEQ ID NO: 7273 - DNA, 1376 bp, Homo sapiens
tacatcaaagatacctgaagtgttggtatctgagaatatctgtcactcctcttatctgagaagtgaccttttatttttaagatgactacagacctatttttagatatgttttcagtacaattttgaacagcaactttttaattaaacatcttccagtgttaggaagttgagaaacgttcataggcaagtctgctgttctatgtcaccatcttttgtctcccctagtcccccaggagctctttcctttcccctctagttttgggtgtgcatgtttggagtttgtagtgggtggtttgtaaaactggaccattctgccttgctatgggttgttcaagaaagcctcattcttttctgtgaccctttcgcttttgcattcaccctccttcccacctacctgtcctggggctgttgagcagcataataatcccgggagaatgattcccctcatagaaagacaaaagcatccatcccctcatagttaagtagccactggtgtcctgggaatttctggttggatttggtgccctgaacttttttattaagaaatcagatcccagggtgagagtaacaggccatttggccaagaaagaaacctgtttgtttttcttttgaactatgaaaagaccctgtttgtgaatatattttagaaagagaggaaggatgtctgcagaactttgttctgttttctgccacaaaaatgtgaatagttcagagtgaaaaccttttgtgatggttgatgtctcaggaataagctggatctccaatgttttggggatgctttgagtctcaaaaaaaattgataatcagaaaagtaatttttgtttgtttgtttaatgtatccctgttctgtttttaattaaactccaagtctcattttacatattcttggaaaaacctaagttgctctgtaatttacataagaagcatgctcaggacctctttgtaccccggggagcctgattctttgggaatgaagcttttcattcttcatacactggccttggcatcctgtggaatttgacccaactagcagctagtcagtctgtcagtgagcagaagagtgaactcttcttgatctttattgctatgtgtgaaaacttggcttcctcactgaacggtgaggaatggatttaaagcatgagctttagtagtatcaagatgccattttcctttttcttgctgtcttggggagcttctgcatgtgaccccctaatcagaaggcatgtttttagtatttcttgggagtgtcagctgtataatgcagcagctgttcaatcccttacccttctctgcaaggacttccttacagcttggtgcagttctttcccagaggccaccactactagacagtctttcttttatcttatggagataaa

SEQ ID NO: 7274 - DNA, 1276 bp, Homo sapiens
agccgctgagcatgctgtatgtggataatggcagagtgctcctagatcaccataaagacatgatcgtggaagaatgtgggtgcctctgatgacatcctggagggagactggatttgcctgcactctggaaggctgggaaactcctggaagacatgataaccatctaatccagtaaggagaaacagagaggggcaaagttgctctgcccaccagaactgaagaggaggggctgcccactctgtaaatgaagggctcagtggagtctggccaagcacagaggctgctgtcaggaagagggaggaagaagcctgtgcagggggctggctggatgttctctttactgaaaagacagtggcaaggaaaagcacaagtgcatgagttctttactggattttttaaaaacctgtgaaccccccgaaactgtatgtgaaagttgagacatatgtgcatgtattttggaggtgggatgaagtcacctatagctttcatgtattctccaaagtagtctgtgtgtgacctgtccccctccccaaagattaaggatcactgtatagattaaaaagagtccgtcaatctcattgcctcaggctgggttgggggagccccacagctttctggctggccagtggcaatctactggccttgtccagaggctcactggagtggttctctgctaatgagctgtacaacaataaagccattgtctagttctcctgggccagctggtgcctgtgaaggcagaggcaggaactcatccaagaggaccggccatgttgggttacagaagacatccctgcgtcagtctgcttcggcagacacagcctgagtttgttaaagttggtgacaatccacctcagtctctcaatgtgtgctattaatgaggcctctgagcttcctatccagcagtggtgaaggccttgccctgggtggcaagatacttgctctatggtcacagctcagccactggaagctgtgcgacctcaggtgagcaattcactgtccagtctccacttgtaaaaggaacgctggtgaatcctaatgcattcatattaaatgtctgttgtcaggctcagaagagccatgagctttaagctgtagactgaataggaagagctaccttatccctacctccctctaaagcttataaagcttgctaaacccagtccctgccacatgcccttaatctaacctttatcggctcttttgttactcagggttctaagacagacttaatttcaggttccacatgggaagcacagcaaaaggagcctgagtg

SEQ ID NO: 7275 - DNA, 1166 bp, Homo sapiens
gagccaccgtgtgcgtggtgcgtgtgttgtaggtgggtcgctgtgtgctgtgtaactggcaatggggtctgttaccctgcctgagcccctcctggcgcatctcttcgcggctctcactgcctgcggtctgctgcctcctggtggccttgtgctgcagggctcttctgaggtcaggcccccgtccatggtgggaccagggctgggtccagctcaggtgggtggcagggccagcagtctatgtgcagcccaggggcgcagtacacaggggtgacatacaggtgcatgtcctgcctgatggagggtgggtaccttgagccccaggtgcatgctgtgttggctcacacatcctgtccaggtgcttggtgtgagggtgattacgactgcacaggtgcagctgtttacacgcacatggtctcatgcaccccggtgagttttgtttgtgtgtgcaagcttgggagcctgacaatttctggcccgaggacagtggctggggctgccatgtggatggggaccctgttggggtttgtgcatccaagagacgcccgctgacccagaccttgcttttctcgtccaggactttgaccagctgctggaggccctgcgggccgccctctccaaggacccaggcactggcttcgtgttcagctgcctcagcggccagggccgtaccacaactgcgatggtggtggctgtcctggccttctggcacatccaagtacgtgtggcctctcaagtgagattagagatttgcctggaggagggtagacactcaggtcccaggcacactggctccacaggagggtgtgaggggcagagacagccgggtgtggtcccagagccccttccatcagtcttgggcagcccccaagtcctccccagcaaggggctcctggcgttgggagggggcttctgtctcagcagctgtcttccctcagggcttccccgaggtgggtgaggaggagctcgtgagtgtgcctgatgccaagttcactaagggtgaatttcaggtgagcatgccctgcggggtccctgaggcaccttgggatgggaggaggaggaggactcctgcttgccggtctaggggtcctcaaagcacgtcccaatgcagtcacgtctgccacctcatcatatcagtgcttccctgttcccattttatagatgagccc

SEQ ID NO: 7276 - DNA, 2373 bp, Homo sapiens
aactcagtggccttagtggcaccctccctcccctgaaacactgctcctgcctctgctctcctcccaggtggcatcgaaggctggcatctacgagatccttaacgagctgggcttccccgagctggagagcggggaggaccagcccttctccaggctgcgctaccggtggcaggagcagagctgcagcctcgagccctctgcccccgaggacttgctgtagggggccttactccctgtccccccacccacagggccccacgcaggcctggggtgtctgaggtgctcttggctgggagcggccctgaggggtgctggccttgaaatgattcccccacttcctggagagactgagcggagttgggagcctttttagaaagaactttttataggacagggagacagcacagccatcccttgcaaaccaccaaggtgtgtggctgacctccagggaggagcactcactggagtgctcacaaggtgcacactgctgtgtgtaccttgcagacaggccggcgttcagcctccaaggggctcactcccccagttgccaaacactgtggatctctctgtcctcttctcccctctctcagattggcctggcagcccctggcacagagcagacccggccactggtagctccccacttccttactcctgctgctctgccattgccgctccccttgttgctgcccaagcactgccctcgggcgtctggcagcctgaggtgggtggaggggacagtgttctggatagatctattatgtgaaaggcagcttcacccagttttctggactctcatgcccccatctccgacctgggagacttcaggaatgacaacctacccagcctggtggggctggcaggatggtggaggtttctcaaggagctggagacttcagggagcccctctcatggggaggaaagagcttccagggggcgaacgcagcacagaggaagaggcctgctccacttgtctgggaacctgggcaggaggcacagaggaagccaaggcctggagctgcaggtcccccggcatctctctctgtcccggcagcccaggatggcctggtgcccccacctgctgcagcaggagccccaaggagtgctagctgagggtggttgctggggtggtcctcatggacagtgaggtgtgcaagggtgcactgagggtggtgggaggggatcacctgggttccaggccatccttgctgagcatctttgagcctgccttccggtgggagcagaaaaggccagaccctgctgagttagaggctgctgggatccactgtttccacacagcgggaaggctgctgggaacaggtggcagagaagtgccatgtttgcgttgagccttgcagctcttccagctggggactggtgcttgctgaaacccaggagctgaacagtgaggaggctgtccaccttgcttggctcactgggaccaggaaagcctgtctttggttaggctcgtgtacttctgcaggaaaaaaaaaaaaggatgtgtcattggtcatgatatttgaaaaggggaggaggccgaagttgttcccatttatccagtattggaaaatatttgacccccttggctgaattcttttgcagaactactgtgtgtctgttcactaccttttcaggtttattgtttttatttttgcatgaattaagacgttttaatttctttgcagacaaggtctagatgcggagtcagagatgggactgaatggggagggatcctttgtgttctcatggttggctctgactttcagctgtgttgggaccactggctgatcacatcacctctctgcctcagtttccccatctgtaaaatgggagaataatacttgcctacctacctcacaggggtgttgtgaggattcatttgtgattttttttttttttgtacagagcttttaagcattaaaaacagctaaatgtgagtgcacctggctgctaatatgtctttagtgtcagacagacgttctagaactggtacaacaggctgaggtccctgccccttcagagtaagggtgggcaggcagagtgagttgagagcacctgttcttggcacttccagctctagagcaggcgggtttttgcagacacgcatccccagttttgcctcaccctcttacactggatgtcaggctgagctcctccttgaagaaagcaacggaaccagcgaattctcactaacatatgaaggattgctgcatctagggaaacagtatagagcaaagtggaattgggggcctgtgaaggagcctggatctcagcctccactttctcccctaacccctgtgggccccacctgacccctttgggcctctggttgattgaacacacctcacccctggttgagtgctggcatttaaa

SEQ ID NO: 7277 - DNA, 1919 bp, Homo sapiens
tcgccttcttctcgtttggggctgtgatgctctttaccccacaaagcggggtgggaggaagacaaagatcagggaaagccctaatcggagatacctcagcaagctgcccccggcgggactgaccctctcagggcccctgttggtctcccctgccaagaccagggtcaactattgctccctcctcacagaccctgggcctgggcaggtctgaatcccggctggtctgtagctagaagctgtcagggctgcctgccttcccggaactgtgaggacccctgtggaggccctgcatatttggcccctctccccagaaaggcaaagcagggccagggtaggtgggggactgttcacagccaggccgagaggaggggggcctgggaatgtggcatgaggcttcccagctgcagggctggagggggtggaacacaaggtgatcgcaggcccagctcctggaagccaagagctccatgcagttccaccagctgaggccaggcagcagaggccagtttgtctttgctggccagaagatggtgctcatggccatactctggccttgcagatgtcactagtgttacttctagtgactccagattacagactggccccccaatctcaccccagcccaccagagaagggggctcaggacaccctggaccccaagtcctcagcatccagggatttccaaactggcgctcactccctgactccaccaggatggcaacttcaattatcactctcagcctggaaggggactctgtgggacacagagggaacacgatttctcaggctgtcccttcaatcattgcccttctccgaagatcgctcctgctggagtcggacatcttcatcttctacctggctcaagctgggccagagtgtgtggttctcccaggggtggttggaccccaggactgaggaccagagtccactcatagcctggccctggagatgacaagggccacccaggccaagtgccccagggcagggtgccagcccctggcctggtgctggagtggggaagacacactcacccacggtgctgtaagggcctgagctgtgctcagctgccggccatgctacctccaagggacaggtaacagtcttagatcctctggctctcaggaagtggcagggggtcccaggacacctccggggtcttggaggatgtctcctaaactcctgccaggtgatagaggtgcttctcacttcttccttccccaaggcaaaggggctgttctgagccagcctggaggaacatgagtagtgggcccctggcctgcaacccctttggagagtggaggtcctggggggctccccgccctccccctgttgccctcccctccctgggatgctggggcacacgcggagtcattcctgtgagaaccagcctggcctgtgttaaactcttgtgccttggaaatccagatctttaaaattttatgtatttattaacatcgccattggaccccaaaaggttgtgtgtgtgtttctttttctctctctgatttatgggaaggggacaatgaagccagagctcgaaggttgagggctgggctgtagcaagagaactgggggtgggggcgcagctcactgtggctgtctcctgtccctccacctttccacccatgccctgctgcgtcactgccaggtgggacacagggttgccactggtttcttggctactgaatctcctgtttccctgaggcccaagttccaggacaacactttatttcaggttattgtgaaattctcaacctgtttaaatgcaactagaggccagtggggcagagtggctcatgcctgtaatcccagcacttttggaggtgggagttccagaccagcctgagcaacatagcaagatcccgtctcaacaaaaaataaaaagaacattagccaggcgtggtgttgcacgcctgtgg

SEQ ID NO: 7278 - DNA, 1099 bp, Homo sapiens
gtttatacctcattgtggtttgtttgctggtttcatctctgatgatagtgtgctgaaatttcacacttttcattttgctttcttctgccaactctgctcataatagttctcaaaattcctaggactggataggaaaggagagaagaaggaagctattgcagaaaaaggccactccaaagccatatagagaacaaaaaataagtatagacaaaggcaaatgttcctgctgttagaaggcagttgaggatgaggacaacattattatcagattgcctttattgtagctaaatgctattaatatctttttcacattgctgataataatgatttttcatctttattttattgtgctaactctattgaacttttttcttgatttgctataagaatgctgttgggtttccactcaacatttttttcttttgtatccagaggagtttcttcctgtttcttctttatcagaacctgtcttcccagagattcttgcttactgaccagtgaccttacctttctctgcagacgccttctggcaagaggggagagcctctggaacagtgtacagtggggaggagaagctcactgagctccttgtgaaggtgagtgtccagttcttgagggaagcctgtgaggtctgtgccagtttacatgacctcctttttttcccttacttttgtaattagaaaaattacttaaggaaagcttattggtacaataaaaccataaaagtttctcttcacccaaacataggcgaatatgtataatattatcaaagacatcttcagtctgtaaaatagtaaaatgttatttatgttttcagtctttgcagatgtcctgtctagaaggcagattactagggaaggtagtcctgtcagatgagatttttgtggtgagacagattttgtttgataagaagagataagatagggaaactctttcataattttctcaaatcatgtgacccaagatgagcagtggtctcatgtatacttcaaataattctcattcttagcttcttccatttctaatcaaatttatttttattttattttattatttttacagacaaagtctcactctgtcacacaggctggagtggagt

SEQ ID NO: 7279 - DNA, 2739 bp, Homo sapiens
gatggaattttgctcttttgcccagtctggagtgcagtggcatgatctcagctcactgcaacctccacccactgggttcaagcgattcttctgcctcagcctcccgagtagctgggattaccggcacccaccaccacgcctggctaatttttcaattttctttttcagtagagacgggttcaccgtgttggccaggctggtcttgaactcctgacctcaggtgatacccgcccccccgcctcagcctcccaaagtgctgggattacaggcgtgagccaccgtgcctggccctgtctctcttaagagtaggttcattgtctgtcttagagtcacttctattgcaactcattttctttttccagggcacagatcgaccaagctgccgttccctattctgcaggacaggactattctagcatacctgcttcgtccacccaggcagggtttggggtggtctcttctgtgcctgcagtccccatttgacacttggttgccaccatctttggagattattgtttggaatgatgcttccattggctttttcttgttaccatggactaggaagaaaacatggtttccaaataatctgggagcttttggccatggtgccgccttcctgaattggcagtggtcagagcacacctgaaccctatcctgggctggtgatgagcagaaatcagacctttttctatgcttttttgaatatcagagtaggatgaacacccagattcaaatatgtcaccaaagttggtggtggtccttccctgcacccttgcgttaagccattatgtaatgaaaatgtgtttgcttgaaggaacagctcaaagcaccttcacaagttgccttgacttaccctaggtgggtgtgaaagagcacccgtagcaaggaaaattttctctattagtgtgttcttctgcctcttcccccttgattcagctttcagaggtactatggcagttttgcctcaggtgctgaacatttctcagccctggctaaaagggagcagcacagggagagaaacaggataggaaagcagaatggcgagcagcctatggcccagggcctgtaatcccttcccaagactagctgctcagggtggtgcagggacaggaccagaccctgcgcctatttcctgccttctttcccctatagggaactctgtaggctgagccactgtcctgctcttatgacattatatcttgtgcctttctcctcagcagtgagcagtgagctactcctggcccaggccctaggggaaatggatcagtctttgaggtttctatttggggaggggagtacttaagatgagtcaaaagacactttcctctgttccattccccatctcagggactcctgaatattcagcctctccaggctggtgtcttctagtttcccccactgggaatgctggctgggagagccatgactaccagacttttcctcaggctccttggcatgttagtctgaattgttcttgagcactgtactactgacccaacaactgtgactagctggccacgccattcagggctggtgtggcatttatgtgtgtgtgtgtgtgtgtgtgtgtttttcctgtttgcccagcagtgcattgtgggttccaagagtgggtagtgtgtgtatgtgtgtgtgtcagagggagacctggcaggcacctctttgagagtagctgtggtcagagctgtttggtcagtgcattatgttgaatgaggtccaggaacccagagccacccagcagacaccactgtggcttgccagctgccaagatggagaagcatgtgcccctgtagagcgtctccccagaaccagaccccgagccactcgcttcctctgtgctgtgacaacattggtgccaggggagatggtgtttttcaaagggacctactgtagccactttaatttacaattaagagccttagtttgacttaacacttttgtaggcttttcattgtgtatttttgtgtatgtgtgcatatagcagctactctgtagcagaggtgggtagagacacttaatagtatcatgtcgcatgcagatgtcacatcggcctctgcaaaaactgtactgtcttgtttctgcattagacttaagtagtcatgtgaatatactgctatgtcacttttaatattacgagttttatacttggaaaatggtacttgcttcttttaaatctctgtcttctctaacctcccccttcccatttcaatgctcccttcctaatttcagcaataatctcaaaaagcaattaaatagttaaatgaccctaattgtaattactgtggatggttgcattcatttgattacttgggcacacacgagatgacaaatggggcagtggccatgcttgaatgggctcctggtgagagattgccccctggtggtgaaacaatcgtgtgtgcccactgataccaagaccaatgaaagagacacagttaagcagcaatccatctcatttccaggcacttcaataggtcgctgattggtccttgcaccagcagtggtagtcgtacctatttcagagaggtctgaaattcaggttcttagtttgccagggacaggccctatcttatatttttttccatcttcatcatccacttctgcttacagtttgctgcttacaataacttaatgatggattgagttatctgggtggtctctagccatctgggcagtgtggttctgtctaaccaaagggcattggcctcaaaccctgcatttggtttaggggctaacaga

SEQ ID NO: 7280 - DNA, 2609 bp, Homo sapiens
ctgtaaagcagagtgatggctgagaagtcctctctagctgcagaagcctgagcttcccggtgtcagtcagctctgcaacgtgggagccttggaggcgggtggcctggctgtgcttcatatgcccaggagtggagaaggaggctgagaagctggtttcccagctctgatctccacaggcacctcctataaccctcctctcacccaccccgctacggtctgagagatctgaaataacctttcccagtgggcagggttgccagggttgaggggacagcacataccacccccacccaacctgttcgaggggccctgcatggcacgggatgagtccctgccctgtgcagctgcctggcagtggctgggacaaggatcttgcagccagcacagaggcctcttcaaaggcctctccctcttggcactccaggcaaggcaggtgcccgcttccccaacacctccaggcagtgaccctagggcatgccccagcaggtctccgagcagccactgggacccgtctcagcacatcctggcctttgaaagtctgatatcctgagaggagggcaggttttagggccgcagttccagccagcgtccccagcctggcttccctgccatggactcagtagctcgtggggcttcttaccacccaccagccccgctggggtgcggcctggctgtgggcaaaggaggacttgcctggagatttgagagaagattccttctaccagggctgctgaggggccaggcctgcatcaggggctaggctctggctgggcccggaggctgagactaaggctttcgaccctggtgcctccatgtggatgctgcctcagacaaaggcagtgagccttccctgccaaagtgcccatcccatgggctcggcctcactggtcactgttagcccatgaacacgtgtgggcctcggtcacgtggctttgagggcagtctgaccaggctagaccacacgtgccgtgacagggggtgccattcccctcgcaggctctaatgtgcccacatgtagcctggcagtccaaagaccaagaatcaacttgcaaatctgccattaaactgctgtgcgacttcaggcatatcactgccttctctgggcttcagtgtccttttcatacctagaagtctgcggtctgaggctctttgggttcagacacactgttctaggcttctgtaggggaccttgtgatctgccgtgcccctcctccctgttcttttctgtcctccccaccccaccctcagaagctgcttgctctgcccccaggacaggagcttgacggatgaagtgcagccagccacccaggtgccatttccagtctgacttccagaaatgtgcaccatgtcctagagcacagacccattggctggagcctcctgggagggttcaaaccatcagctctatgagaaatgcccagaaaggctttgccgactccatccgtctgtggaggctgcctgcctccggggtgggatgggtggtttctcctccaattcagacccaagaggtagcccccgagggcatgtacctggtgggaagcagctcaggtacccttgggggttgcagggcccttacgcaggtatttctctctctctcctctctggggtgcgtgtgtgcgtgcgcgtgtgcgtgcctatgcttttctctgtgggcacatcaggatgcccctcggagagcatgtgcacgtgtccccacctgagcgagcgtgtgtgtgtgctcctctgcgtcccaggtttggacgtctagggtttggtgtgcctgtcttctgccctccctgagcccacagggtcagtcaatgtatcttctacgtgcctctccctctgccttctctcacagtgcccccggctccagagctcaggggtaggggttctcctgagggtgcaggggatccttctcatctcctggaccctccagggcactctggtccctattccccagctcctaggcagctgagccgggtcccttaggggaggtgaccaggagctttggtgcagggagctcttggtggggcaaagggctggacccctgccaggtctgtggacatggttatatgcccgggagaggggggtgcagggccccagggatggcccccaatcccacctctgtttattctgtaaactgcaacctataaataacctttagcattcctattgtaacaaaattaatttttatgaaataaattatatttcctagtctaataaaatccgggttgcatttggctgtcttcctgttggtaattgggaatgactccgttgctcttctcaaaattccatggaaggtggaggtgtcactgtcagttcagagctatctgacccccaggagatgagcaagcccaactgcctcattttatagaagggaaaactggttcagagaggggtaaggacttccctagagtcacacagcaaggaggagcctgtggtccatctggatcccggtccttgtgcatccggatctgttcaggagtttgtcatgtgagtctgccaggggctaggtaatggttgagagggatgacacagagatgaagccccagcatccctgtccgtctctgaggagttcagaagggggtatccccaagggtgctgaggctgtgaggtcagttcagaaacct

SEQ ID NO: 7281 - DNA, 1963 bp, Homo sapiens
ggggaaatgtgggcctgcttctcaaggcccgagctggtgtgtagcctaactcaggcaaggaggttctgcctgggagttagtgtgcaggctgctagcaggacgctgggtgccgggtgcaggtagatgaagggtcctgagccctgcctgcgtgggtactcatctgcaaactgctgcaggcatctgctgctctggactcgtgccttagaagttcccaaaactctgatggccacgtgttccctgtttttaagtgagatcctgtcctgggtcttcagcatctggtgccatccagctgacctaggacaagagaacaggtcctgttttggggtgatatctgatacattgatgggccgggaacggagtttttcatccgaagactaaactcagcttcctctctcctaccaggctgtcgagcattgcaaacgccatgtgtggaactaggaggaggaatattccatcttggcagaaaccacagcattggtttttttctacttgtgtgtctgggggaatgaacgcacagatctgtttgactttgttataaaaatagggctcccccacctcccccatttctgtgtcctttattgtagcattgctgtctgcaagggagcccctagcccctggcagacatagctgcttcagtgccccttttctctctgctagatggatgttgatgcactggaggtcttttagcctgcccttgcatggcgcctgctggaggaggagagagctctgctggcatgagccacagtttcttgactggaggccatcaaccctcttggttgaggccttgttctgagccctgacatgtgcttgggcactggtgggcctgggcttctgaggtggcctcctgccctgatcagggaccctccccgctttcctgggcctctcagttgaacaaagcagcaaaacaaaggcagttttatatgaaagattagaagcctggaataatcaggctttttaaatgatgtaattcccactgtaatagcatagggattttggaagcagctgctggtggcttgggacatcagtggggccaagggttctctgtccctggttcaactgtgatttggctttcccgtgtctttcctggtgatgccttgtttggggttctgtgggtttgggtgggaagagggccatctgcctgaatgtaacctgctagctctccgaaggccctgcgggcctggcttgtgtgagcgtgtggacagtggtggccgcgctgtgcctgctcgtgttgcctacatgtccctggctgttgaggcgctgcttcagcctgcacccctcccttgtctcatagatgctccttttgaccttttcaaataaatatggatggcgagctcctaggcctctggcttcctggtagagggcggcatgccgaagggtctgctgggtgtggattggatgctggggtgtgggggttggaagctgtctgtggcccacttgggcacccacgcttctgtccacttctggttgccaggagacagcaagcaaagccagcaggacatgaagttgctattaaatggacttcgtgatttttgttttgcactaaagtttctgtgatttaacaataaaattctgttagccagatctgggcctaatgtttctgtgacccttcagctggaagagtttgttcctctctgatgagctctgagcccatgacacctttggggcccagcactcccatgacccatcttggccagagaatgaaagcaaagtggataaaggaagatcccacctcatcctccccaagactcagggccagcagtaggtcaggcgcacctgaaggtcggctctgctcttcacctgcccctgtccctgctccctagaggccagagtcagagcacgttgccagttccttgagagttgccttgatttttaaacaaaccattccagaaacttgtagtgagtaccagttaaacaaaaccaaggggaaactattgagggaataacttaatttaaaaaaggaaca

SEQ ID NO: 7282 - DNA, 1936 bp, Homo sapiens
catgagacttactatcactaaacagcatgggaaaacccgcccccgtgattcagttacctcccactaggtccctcacatgacacgtggggactatggcagctacagttcaagatgagatttgggtggggacacagccaaactgcatcattgcctaataggagaattgaggaagcttaggggccactgtgtggttaggcactcggattgggtaattttgtcattcttggtatgctgagcagtttgaatttagacaacaggtttgtgtttcttttaagggatttaaagagagggactaattcagaggcactagatggcctgtcttattttcccctggggagaggattttcagcaggacttctttccatcccaccagagccgtcctggggaggtgtgctctgctctcaacctctgcgagtctctccagaagcacctagcagagctgaatcaccagaagcagctggagtccaataagatcccagagctggacatgactgaggtggtggcccccttcatggccaacatccctctcctcctctaccctcaggacggcccccgcagcaagccccagccaaaggtaagacaacgggctggccactgaggacccatttttggttgcactggagatgagagaccaaagggacagagagggcacgtgtggttcttaaactggggcttatccctgtgcgtgactctgcagtcacatgagccagcctttaaatggttgtaccatgaagtttctaaagaatgggatatttaaaatatgcaaagattaatcccctttaaaaaaatttacttcttttatttttgagacagggtctcgttctgtcacccaagctggagtgcagtggtgtgatcatggttcactgcagcctcaacctctgaggcttaagtgatcctcccaccttagcctcctaagtagctgggagtacaaatgcacaccaccacacctggctaatttttgtattttttgttttgccatgttgctcagactggtctcaaactcctgggttcaagcgatctgcctgcctcggcttcccaaagtgctgggattacaggtgtgagccactgtgcctggccaacctttttatttatactaaaccccctttttataccatactgttactataatgaacacttaatcgattttaagcctatcagtaatttgagagcctgtaaagcatcttaggaactggtcagcaagtgccccctaatgctgcagccctgagtatataaggacgttttcctaggaatttgagtcctcttaagttgcaaacctaactgcctcttctgtaggataatggggacgtttgccaggactgcattcagatggtgactgacatccagactgctgtacggaccaactccacctttgtccaggccttggtggaacatgtcaaggaggagtgtgaccgcctgggccctggcatggccgacatagtgagccttgtgtccttgtgcattggggatgttctgggcctgggagttgggctgtggaggctggagtagggcgttcagacaacatccttctcttttttcccagaaagcagcttgaataggtagtgcagacttgaatctattttggttaatggcatctggatatgtaacaaaactgggaacaaaaagtaggagactgtttctgggaagattttgtttcctgccaggcaccctgtgtattaggaacactgtagaaatactttttgcccccattttttttttttttttttgagactgagtgttgctctgttgcccaggctggagtgcagtggcgtgatctcagctcactgcaacctctacctcatgggttccagggattctcctgccttagcctcccgagtagctgggattacaggtgtgtgcaatcacgcccagctaatttttgtatttttagtagagatggggtttcaccgtgtttgtcaggctggtctcaaactcctga

SEQ ID NO: 7283 - DNA, 2190 bp, Homo sapiens
aatgcagtgaggctctctgggtgaggctcccaacctggcagtccccagcctcccagcatctgtgagcgtctgttggactttacagaagagcctcatcctgtctgcccctcactctgccctggaatcaacatcttccgagtccttcttgggggaaatagcagagccccacttaactccataaactgcttcccattccgcagcccagttctgattgttgaggtgtcgcgtcgttccaggtcccccagtcccctctttctcctgtcctctctctgtccttcacctccccactccagccccggctcagttcagggaaatgctgttccacatcagccctctgctctctgaggcagccgcgcctctgactcggagctacttgaaacttctgctcttgctaggattggagtctacctatctcttccatttgtcccagctggagttctggaactttcctcctcggggtgggggtgggggttgttaaggatgctggggggcctggggaaggaaggagttcagaggaagggtgtcccctgtcctcttgatgtcaccctccgctcctgggacacgtgctctctctgtctctgggtcttctggctgtgcacgtttgtgtgtccttgtaaatatgttttaggaagaaagcaaaagggactgaactagcctctggtaggattgcaggggtccagccttgcctgtttccgaagcccccacactgcctttcgccctactgagactggtcccctcaaaaggtagacaaaacagcagctccctgtggagctgaagggcggcctcaaagtggctttttgttagacaaggttaaggtttcctcatgagcaaggttgcagatcggtccttcctcagctccttgatttgtgaccttgaccaaggggcctgccacccagcccctccagtgccctctcctcgatgcctcgctccttcctgcccccactcccctggcttaggcaggtaggggaattagggccatgctggaagaagcttaaccatgtgttcaaagaacggtttcttgcttgcttggtcctggaactccccttggctgccccaggcctccttggcccatgggtgctgggggaggtggatgtcagatctggtaggttgcagcagagaaaataaatgtgccttgagagaccactcagagagggtccaagggtgatggagaaggaagcatggcctgggagcttggaagggaggggtggtgggtggcggcatcttgactgccccctgttgtcccacacgtggggggtggtcaccccccttcactccagcccgcctgccttcagccttccatgagcttcacctgcttccaacttcactttggagggggtggggtccgttggcatcaacacggggaccctctgcttcaccaaagcccgagccctcagcccctggggagaacaaatggctgagctttgatacctggggtcgtcgagaggctgcgggctggcggcagtcccaggggagagacaccacagaaggagacccagacatcccgaggaagttcccagcagagcaaactgctttccagcctgaagcctgcttaaactgtgtgatgtgcaataactgagcttagagttaggaattgtgttcaagtgcttggatttccgtctgtagatttaactgctgaaattgtatctctcagtaattttagatgtcttttaaaaaattgaaaaacaaagtgttagactgtgtgcgtgtgcgttgatgggcactcaagagtcccgtgagtcatccagccctgcctttcccctgcgcccccatcctctcacgtcccgccccgcctccacttggggaccctgcctcgtgtcgtctttatctgcctattactcagcctaaggaaacaagtacactccacacatgcataaaggaaatcaaatgttatttttaagaaaatggaaaataaaaactttataaacaccatctgctggcaatactctgattattcttacccttggtattatttttcacgaaaacagcatttatggctgagcgtggtggctcacacctataatcccagcactttgggaggctgaggcaggacaatcccttgagcccaggagtttgagactggcctaggcaacatagtgagaccccgtatctatcaaaacaaaaaaattaggctgagaaggaggggcagtgggtgaggctaaggattgcttgagcctaggaggttgaggctgc

SEQ ID NO: 7284 - DNA, 1114 bp, Homo sapiens
ggctccccttggtttctaccctggctcaaccgacccctgtctgcccttctccctcttgcttctgaggtcaagctctggcctgcgagcctgtccccattgcaaaggggagggaggggcagggagctgtctaccagctgaggtcctcccaaaactgggccgatgtggtgtgacatccccaccagcctcagatgagacgggccaggacgcccagccacagcaagccctgtccctttgccggatccccaaacactagagaagctctcctaacccaaggcggagaatgaaggtggtggcggcagaggaggagggcagcagctgagaggccagggacagggtgcctcgccaagctgtctgaggtctgtcccaggtggcccaggtggtgcaggtagaacagggtgaggagagggggtcggctcagcaggaggaggctgtggctgcagagcctgggggagcttttaggtgttgagatggggcagctctgaatcctagaccctggaatagcctgtcccttttctctgggtctcgtggtggagccatgatctgggctgctctcttggggacactgggtggtggttacacagttgacctctgcctggctcccccttggtgcaactcctgcctccatcccccttgctggggtcccctcatccacttgagggcgcctgagggccaggagcagcaggcaaggagcctgggtctaggctaagggggtgtgtgcccacctcctccctgacccttaacactcctgtcctgcccagaccaacagagagagctgtccctgagaccccggagagaagcagctgccgaaagctgcagcctttccgcactctgagaccatgatcttcctcctgccaggggagagccacccacaggccatgtccagccccacttccctcagcccccagggcttccttctggcccctctgaggattccctagggctgccccgcagaggggcttccccaagctctgttttgaagcctgcaatgtggaaaagtgagaagtcagagggaacaggacaggtgcagccgggctctgaggccacacctcacacctcgctgttccccaacatcccctgagcagtgtgagctcatctcaccagatgagaagaggcc

SEQ ID NO: 7285 - DNA, 1141 bp, Homo sapiens
ggggcgtggcggtgggtcggggttcgactgcgagctttctggggctcaatggaggcggggcccggccgctgtcaccgggcaggagagaacgttgcttacgtgcgcccggagtccattggccaaggcgggccacactcccgggtctggattgggtcgtggcgcagagaaggcgtggcctcgccgcgctagtccttataggctgctccgcgctggtgctagggcgcagcaggccaagggggaggtgcgagcgtggacctgggacgggtctgggcggctctcggtggttggcacgggttcgcacacccattcaagcggcaggacgcacttgtcttagcagttctcgctgaccgcgctagctggtgagtgtcccttctgtgtgtgggtcctagagctcgcggtctggtctggtctggtccccagactgacgcctggtcggtccccctcttgtcttacagcggcttctacgctccggcactctgagttcatcagcaaacgccctggcgtctgtcctcaccatgcctagcctttgggaccgcttctcgtcgtcgtccacctcctcttcgccctcgtccttgccccgaactcccaccccagatcggccgccgcgctcagcctgggggtcggcgacccgggaggaggggtttgaccgctccacgagcctggagagctcggactgcgagtccctggacagcagcaacagtggcttcgggccggaggaaggtgagcggtgggcgggtgccgacgcgactcgaggggccgggaaggtggggaagccccggtgctggaaggggtcagagccgccttggcttcctatcccatcgggacccagattgcttgggggcagggggaattggagtataaggtgagtgaggcggaaactgaggcacggagtgggaaggagcgttggtttcttaaggaaacagcacctcccccgcctgtgcgtttcgttttgaagccgctctaataccccttcctgtgtgctctcctttccagacacggcttacctggatggggtgtcgttgcccgacttcgagctgctcagtgaccctgaggatgaacacttgtgtgccaacctgatgcagctgctgcaggagagcctggcccaggcgcggctgggctctcgacgccctgcgcgcctgct

SEQ ID NO: 7286 - DNA, 2814 bp, Homo sapiens
ggtgggatctgaggcactctctcgaatgccgtcacacctggcagcctggaagccacaggcatccggccttgcccaggcatctcgcctgcggtctgaggaagggaacagaaggtcatgagttcagggtcagacgcagccgctcagcacaggaggggtggaggggaaatgagagttgctggtagcaggctccctccttctgcagcccggcgaatgggggcgctgggctctgttcccagcgtttgccagaggtggccacttcagccaagcccagagaagtgtgggcagaagcagtgaaggttcttctctgtgtgggtgccctgcccaccccctcctttgcctgtgtcctcccggcctggatccatggctgactctgcctggaggccatttgtgcctgcctctgtgctgccgcaggagggcaggccgcaagtggggttggtgggggtcgagcgggcagcacggtgcagcggtgcagtggcaaggggggctacttgtgtggcataagctagaggagccggtgccgcctgaatgccgagctaactgttgccactctcctccccagactatgaaatccctggagaatttttggtgacatgcactgagccaaggtgatggactgtatatttgaggaaagacaaacaaagaaacaaaattaaaatggaattggaggccgaacgctgcacagctgccctctctctcacccagtaaatgcagaaagctcttaggacagacagaaaacctgccatggggctgcttccctccctcgcagggctggcggaggctccgcatcgcctctctcctaggatacagaaaccatggcaacgaaagtagaatgtaaaactcgcagcagatatcagtgggaagggctgggggagggggcacccagctgcctttcctccctcacaggagccaccaccagccacctctcaggagaagccagaggccctggccaaagataggaggaagaaagagaactctccatagaatgtaatttatagatgcgtgtatatgtatatatatctatttatatgtaaataggcatatatgaagatatatatatatatagtctactttttaaactctgcagggatttggttaagttgttgagctgatttcttccatgttttagaaaatgaggcctgtttggggaaggtaccctggtgatgtttttgctagacattagctgtagctgacagcataaggagagtcgcatcagagcttttcacagccccccgaaaccccagcctggttttgatggcagcagtaatcatgatagtgtgaacccgcgaaggcctcaggattatggttaacctggagaggagcaggccatggaggcaggtgccaggtcagtattgagtcacagtagaggccccacaaggacctgcttgggtgagaccacctctcccctctcagcagcgctggtgggctctttgtcctggtgcccaggagccctccagccccctgcccacagaagggaaggcctgcagagggggccaggatctacctaaccatttccccacccctaagtccctcagtgggctttgccttataggtgccacagggcacagctccatcattgccactggtttttcctaagtcatgcaccaaggacttcagaaagttcttcctccgagtcagtcagtggtgccgggaccccagggcagcctcctcgactcctgaagaaaaggcagtgcccgtggctgcctctgtcttcactcgctgttgatgtgaccgccaggcctcctctcgtaccttggacaaaggatacacctgaaccagaatagttttcttaccctcacattgaaatgaggattttgcttaaaacagcacttgccgccagtgggaggagggaggttttatttattcccacagtttctcctgggccttctggaatgaccatgttttcctgtggcggtgggtgtgtcattgcgcccgccgtcttccaaagccttacttccccaagctgccagccaggaggtgataaccaccctcccagagtttctctcggctctttttttaaaagtcccccaacaaataggattcttgctgggaaaggaagttcggtaaggaaatgtcaaatctggtttttaaacaaggtccaaccctgcaatgaagcagccacttcagcccagagagattataagaactgatgtggccagagtgcctacccactgtggccccggtgctctgcccccacgccccgaccatctggtcttggtagatgtccctagacgggctgagccatgtgcaataagaacatagatcctaaaggatcctctggaagctgtatttcttgaattagaattctcaaattgtacatctgttaatatatgtttattatgtgactggccgtggtgggtctgcattgagcagggaggcctaaggggtgggggggagggggcacaagcccctgctgctgctgacactgtccagcctgtgccacaaggagctctagatgatgagcctgaatttcccccgacccctggccctggctaacagccacttaagccacacatgctgttccagaactaactccatccaggcagaggggtgctcaggtgactggggggctgcaggacctgagcagtctgggtccctggggtccccagcgccagtcctggctgggcatctgggccacgaccatcaccctctgcttttccctctcccaatccctcccccccacaccctcaggcctgccatgtgcccgcagagcattcgaaattcccggccccagcctggagctcgatcccactcaggagccagatcctgggaaaagtgttgcgagtttgtttccatcgtccttcccaccatcctccc

SEQ ID NO: 7287 - DNA, 1162 bp, Homo sapiens
gtttcccctctttacccttccccgtccccgtgttctgctgggctctgattctgcccaatgagtatccccataggttctcaaaaacatgaacaagtctgtaaagctcagacatttgtcagcctcaacagcaccacccattcaagcatcctgtggataaagaattcagggaaccatccacacacctgccaaccctgggaagcatccagttctcaaatcgtttttgctatggatttatactaacaagaacattccttgacttccctcctgctggtgttttaaagccacaagtagggaagatatctggcaggcagaaagaagtctgtgatgataaacaatgatgaggatgacctaggcaccctacgctagtgtgagaagcctgcgccccaggaaggatctgtgttagtccctgggatggctccaaggcctgctctaggaaggcagcatgctcagtgggaacacagcaagattcagaatttaaagtagttgcttcatggctctgtgcactcccttttcttcctcgcagcctccctaagatgactccagtgtgaccctgtgcttagtgagcaatagtgattgagctcatgttccctgcaagtgccatttcctctccaggatgggcctctaaagctgaggcctggctcagagcctgtttgccctctgtcttaaacaattgtaaatatcacttaaattataaccatttgcaataaacatccccaaagttccctgtctcctttattttagggtcctctaggcccttttcattttatgtccccactggatttgagatcttgctggaagcagacctgttttctttctaccagagtctggttctttctgatgaagagcagctttaggcacagacaaaaagtgagggcttttggaggttagtggtggcattgtccccgcacagtttggttagcatttcattctgggccaaggtacacagtccttgcttattcatgccccacagtaaagaactaagatggggagtatgtgaggaatcatctagtatggtggacctaagttgtgtggggttttttggttttgcttttgttttgagacagggtctcgctctgcaacccaggctggaatgcagtggcgcaatcctggctcaccacaacctctgcctcccaggctcaagccatcctcccacctcggcctc

SEQ ID NO: 7288 - DNA, 1192 bp, Homo sapiens
taggagataatacttttcacgcattatctcagagaagatcagtctgctgaggacataagtgacaggtccagatttttttttttttttttaatactagagacagggtttcaccatgttggtcaggctggtcttgaactcctggcctcaagtgatctgcctgcctcggcctcccagtgtgctgggattacaggcatgaggcaccacgcccaccctccaaatgtttttttgaatgggcaaaataatccacagtaaatatagaatgtgctttatgtctaaatgctaagaacatataggcattaatgacgttgaaaacattcttttcttagtactgtattgataaatgtgtggctagctttttggtggcagtaataaacatgaatagcaacaaagcaacaacaaaactgagggcacatttggaagacaaagagatatgaaggacaatatgggatctggtgttagttttgttttgggttttgcctgctgcatgggtcacaggaaacatttagttacagaactggagacctattaaaatcctctcatttgtaggcctgtggtgtgtgtttcttatagcagagcaatggctgctgtgtgactgtaagtttggaatttatggtaatagaagctttaaatatcccaaacattacagtaaaggtggaaggagcccttcttaaagaagcaaggtcaaatattcattttgaagttgaaatgaatcaacaggcagtctctgaagaatgccatttccaagttcagagaagatgcagttatgccatcataacatcataacagtctgctggtttctgcatgacatgtggatataaaacaccatcttttctattgagaggccctaatttaaagcaagaaagttcagtggttgtggtgactttttaaaaagttgcttcaaacattatagggtgaagaatttttctttcttggaggataccagttaaccttagacctcttagatttgtattgtttacatatatcgctaatgaaataatttttttctcacagtttaaagtgatctgtgagcatgattatcttccctaaaataagtaacacccaaaataagaatatatgatgtaaaaattttaaatgagttaataccagcagcaaaaatattacttgacattccatcatattaatacattaagttctagttaccaagaaccctttatatttactcgttgttaca

SEQ ID NO: 7289 - DNA, 1267 bp, Homo sapiens
tccatgaacgtggacaagaatttcgaagaccttgtacgttgtcagaattggaatgacaaacaggcttccctttttctcctattgttgtactcttatgtgtctgatatacacatttcctagtcttaactttcaggagtttacaattgactaacactccatgattgattcagtcatgaacctcatcccatgtttcatctgtggacaattgcttactttgtgggttcttttaaaagtaacacgaaatcatcatattgcataaaaccttaaagttctgttggtatcacagaagacaaggcagagtttaaagtgaggaattttatatttaaagaactttttggttggataaaaacataatttgagcatccagttttagtatttcactacatctcagttggtgggtgttaagctagaatgggctgtgtgataggaaacaaatgccttacagatgtgcctaggtgttctgtttacctagtgtcttactctgttttctggatctgaagactagtaataaactaggacactaactgggttccatgtgattgccctttcatatgatcttctaagttgatttttttcctcccaagtcttttttaaagaaagtatactgtattttaccaaccccctctcttttcttttagctcctctgtggtgaattaaacgtacttgagttaaaatatttcgattttttttttttttttaatggaaagtcctgcataacaacactgggccttcttaactaaaatgctcaccacttagcctgtttttttatcccttttttaaaatgacagatgattttgttcaggaattttgctgtttttcttagtgctaataccttgcctcttattcctgctacagcagggtggtaatattggcattctgattaaatactgtgccttaggagactggaagtttaaaaatgtacaagtcctttcagtgatgagggaattgattttttttaaaagtctttttcttagaaagccaaaatgtttgtttttttaagattctgaaatgtgttgtgacaacaatgacctatttatgatcttaaatcttttttaaaaaaatgtttgttttctgtgtggtgtttttcgtatttaaatccgaatgtatgatgtggcagtaacaggttaacttatgtaatttctttagtacatagggcttaggtttatactcttggtttccactcacactaatgtcacatggttaagaaaaacttaggctctctgaagtttcagatatttcatgaatcaagatgtgcttccttcaaaga

SEQ ID NO: 7290 - DNA, 1248 bp, Homo sapiens
actgctctatttttatactgcctaataaaagcatctgggatctttgtttaataacttattttttctttttcagagctatccattttttattttgcccttaaaaaaattcctttttttttttttttttttttgccacaagcatttaactgtgaggtatttaggaaaacctagttttttttttcttctagaaactttttgtctctgggtgctttccagttactttgtgccatttagagcaatgccaggcattcatttaatattttcataaacatggcttttttttcatatttaaacatttgaactttattttgatgagtgaagggttaaaagagatacactacctttctccttatttaagacctcgcctctctcacccagaaaataatcattaatactgtatttaaaattctgaacatcctgtttgaggcaaaatatttgcagagtactgcttcttttgtatgtttttccagagatactctgtatatgcaagcatgattattgtctcttatctgcataggaatagatattaaaagtattattactgtaatatattcatcatattcttaactttatgtttagacccctcggagacagaaaaaactcttttgccgctaccatgatggaaaccgtaatcctaaatttattctggctccagctaaacaggaggatgaatgggacaagcctcgtattattcgcttccatgatattatttctgatgcagaaattgaaatcgtcaaagacctagcaaaaccaagggtaaataatgttttctttctttctcctcaatttactgtacctttgtatcaatttttctttgtaaaaaaataggataattgatatacgaataatgccacagattttttaaagatattttgcctcagcataatggagttactaatgatgctgtgtttatgccagtttttccatttgttatcaacacaagtaatgtacccttaactgggttttaagcactgaattatgaaaattattgtgagatttttattcaccattaacaaatttgtgtttcactgtcttcctgataaacttttctctgtattttggagtcttttaatctcagaggctactcaaagcccagctttttcacttctgtatttttactgaaagaataccgtggaagtatttttattcccttttaggcacattgttactattataaaaagatataattgggcacaagtattatgttaatttgaaatggtgatagttttctgactttaacccacagaa

SEQ ID NO: 7291 - DNA, 1234 bp, Homo sapiens
attccaaaaaaactccatacccattagtagttattccacttttccagcccctggcaaccactaggtactttctgtctatggataatgttgtgaaagcttgtgttttaacttctcaaacagagcagacaaaaggatcggcaaaaggaaatggacaattttctggctcagatggaagcaaagtactgcaaatcttccaaaggaggagggaaaaaatctgctctcaagaaagaaaagaaataatggaatttttctcttcaaaggtccttaggtgtaaattgatgccatcgtaggcaaggtgcaggcaggatttgaaggcaaaagtcaattcagctcttgagaaaaggtgtctttccagcctgaatttttcagattgactagaccaagcagaatctctcaacctgatcttagtatttcctagaaagcacttgacattgtgtgaggtctcacctgaaggaacttggtggtgacatttgggagggtggagggaggcagtgtccttcctgacagcacttgcctccatggatcttctgtacacagaactcttatctaggatgtggttctgttcatgctgctttctgcgatgtgcgtgtctgttagaataggctctctacccagctagaacaccttccagacacttgctggacagctatcttccacatacttcccagtttacatttggtcttaatgatcttgaatagatcctctcttcattttactcagccaggttttgtactgatgtacaggtgttaaattacttcaagcatttttgtaagaggtgtatataattcaataaaaaaggtaaaacatgatgattaagttctgggggctttgtaaatgatcccactaaaatgtgacctaggaaaaatatgaatggtgtttaggatgagagaaaaggggaaaacaatagccctggtcagctttataatagagagcctggtttccctagcatgaagagatgtatgttgtagtcctgccactgattactgaagtcctgccattaattgctgaatgtcttcagttgggccactgagcttgtctgaatctgttcccttttataaaagagttactacatcaaaacaaagagtgaaatccaaatttgtcaaactgtatgtattaaacatgtccagttttttggttaaaaaaaaattgcactggctttgagggaaaacacacagggtgagggaattgggctaaatgacttcttacaggcccctttctgattctttaactttga

SEQ ID NO: 7292 - DNA, 1207 bp, Homo sapiens
ctgaataatgctgctatgaacatggatgtacaaatatctgttcaagtctactttcacttattttgaatatacccagaagtggaatttctaggtcatattgtaattctttggaagtgtttttgttttgctttgaggaattaaccatattagtttccacagcagctgcacccttttacttttccatcaacctgtgtacaagtgttcccatttcatggcatccttgccaatacttactatttttttggttttgataatagccatcctatcaaatgtttttaaatgactaatatctttggaataatagatgaaactagtactaccctgaccaagtattttacagagctgtgaatcagaccttcattgggtagtgctagcattggtatgagtgccagccataaaatgtcagtcacttggtgttttcccccccaagttttgattattattaagatcttattatttaaaaagaattttaagaaatgtcagttgtcacagatgtttttctgacagaaatattatttcttatgcagattgaccttgtacaaataaaacagatgttcgctcagatgtatcagaagactctgggcacaatgattgcaggtgacacgagtggagattaccgaagacttcttctggctattgtgggccagtaggagggatttttttttttttaatgaaaaaaaatttctattcatagcttatccttcagagcaatgacctgcatgcagcaatatcaaacatcagctaaccgaaagagctttctgtcaaggaccgtatcagggtaatgtgcttggtttgcacatgttgttattgccttaattctaattttattttgttctctacatacaatcaatgtaaagccatatcacaatgatacagtaatattgcaatgtttgtaaaccttcattcttactagtttcattctaatcaagatgtcaaattgaataaaaatcacagcaatctctgattctgtgtaataatattgaataattttttagaaggttactgaaagctctgccttccggaatccctctaagtctgcttgatagagtggatagtgtgttaaaactgtgtactttaaaaaaaaattcaacctttacatctagaataatttgcatctcattttgcctaaattggttctgtattcataaacactttccacatagaaaatagattagtattacctgtggcaccttttaagaaagggtca

SEQ ID NO: 7293 - DNA, 2046 bp, Homo sapiens
aatgccacctcggaaagatgctgtacagcaagatggtttcaattctctgaacaccgcacatgccactgagaaccacgggacgggcaaccatactgcccagtgacccactacttcccagggactctcacatctcgggccccaaatggacagatcacccgaggagctggaggggtcggccaagctgactgtaaatttcacagtctctctgaagaaaccattgtgcttctgagaccctagcccccttcctggatggaggcttgagggccctgggacatgtgctatctgataagattgggtcatcgctgccaaggtggagagcagtgagcaaggggcttggggcaatttccagtggagggcatccacacctccattttatgcttgtggttcacacatttaagtttacaaatcagatttcttttccccttcagtagaattagattttgtttttcaatcatgatttcaaatgcaatcctaagagctaatgtggacttttctttttccatgaaatgtctttaaaggatgaattagcatggtcttaaaatacatttctgaggttactagctgtattttgaattgtgagcaaaatgccgagaaacccagttggcatttatacaaaatgttgacctcaggtctatagttcttaaatgtggctaattctgtaacatagtcttggtattttttaattatgaatgcatatcctatttccaggcaggctctcttacttgaacacaaatccaaaaactaatttagagtcttttttgcccagatcttttaagacttacaccccagagatttaagaagaaaacctctaaatttcaaaattatgaagaattacagaattactcatttaaggtactttaaaagaagtttgtacattgtcaaagtaaattttaattcaaatcatgtctgtaaaacttgacgtattttgtgtatgcatgttttcattttgcaaatatttaatatatagacctatgatgtacaggtacgacatgtataggttacctagatgttatgagaaattttagtttattgtgagtactcaagttgcttagagagccaccagggtgatttgctgctggctttctatcatttttatgttttaatgcaaaggaaattttaaaatgttctggaagtgtttttgattaagcaatgcagcctagaagcaatggttctgttcaatcattcagatgttagtggaagcataaaagtcaagactgcatgttgaaacctttcttttgatagttactgaactgcttggttaaactaaatggaaccatgtgctaatttttcacaattattgacctgtattgattgccactgtagtttggtatttccctttactttggtggcctgcttccctcatgccctggaatacaactcagagctccaggcagcggaaccatctattgttttgtttgccagaaagtgcaccctgtatggtctcctgtctaagttggaaatattatgcatgtgcaggactattcgagtattttataaacagtagcacacaataaattccatgcatgggccgctgctcctatctctgtgttgggttttatttggaagatgcaatctgatttgtccttttgatgcaaatcagaaaatcctgttactagagctgggatgtcctccggagattatctcgtggatagttcatggtaatttgattaattaaattctttataaattttgccttaaaaaaaacttttgttatatacttgttttacatgagcattagtaactgagcactagaggactttgaatgcctactgtaggcctcctaagtctaatatttaagatcactgtttattgtcttttaattgaaagaaaatatgttattgtctagaattttgttatagtggtattgggaatttactgggtgttctaacaataagaaaaatattagtgataattgcattttcctatcattcctttcttctttgtcataatcacaataagtataggattttgcacattgagggatattaggatattgctcaaaattatataatcatacaataacttgaattatagttctcaacaata

SEQ ID NO: 7294 - DNA, 1154 bp, Homo sapiens
ctgcgattataggcctgagccactgcgcccctgccctgattccattctcaaaaacagaaccaagtgttaaatttaactttctaccagtgctctaattcctcaactgtgacttcctcttgttaatattaagggagctagtgttcagtgtccagttgagtactgccttactgattgtcctttgttggtttgactcaggaggttaagggatggattttttttagcacttagaaaagaggctcaaaccattgactgtcttatcaaaaatcagatgtctctttgtagtcctgagtctgtacataaatagtgttaatggtttgagtgtttacgttgtatgggtatgtttgtaatttttcattctatccataaggcaattttctagatttttctctcttttatcccttacaaaagatctgaaagcttggtatcagctcataatttttgagactaatttaaaatactcttttttcccactttgaactgattgtcaaaacatataatttaaaatacttttatttcagatgggaatttcatatgggaaacaaacatatacttattaagttagtaaacagtaacatgtagcaggattacttttgattctctattagccacaatcacaaatgttggaatttaacatctgcatttcagtgcttttcattaaaatgaaaaaaaagtaaccataaaattatatctacaagacattttatacttttatgtattttcatgtgaaatgcattgtctgatcttaaacttctgtggtaggcagggtagacatattagtcctgttttataaatgagaaacacattagttgaataatttaccaagcattgcacagctagtatgtgctatagtttagatgagaatccagcccttctaacccagtgttctatacagtaatataaccagtaactgaaatctatgtaggtcatttaagattttaattatatcaacatattgaaacattagatacctgcatttgagatgaaaatgttatctctggattgtttggttataatattctcttttggtgttttagtaggattttttttctaaacaaagtaaaatatttctttgtagtaattttgtctgattttccatattaaatgaaacaaatacattcatacatttataagtaaaatgttccaaatgggtggga

SEQ ID NO: 7295 - DNA, 1137 bp, Homo sapiens
tagagtgagactccatctcaaaaaacaaaacaaaacaacaacaaaataaactactgtggcagcgttggtaccctgcatcactgccatggttgtgctattctcatctcaacatagaattggtgggttctcctaagggtgtcaggaacctctaaaaagatgtgattctttgggaggggatatttgaaattccaacttccattccccctagcaaaaggaagcagctgctgtttaagggttttatctgagccactttaaagatgaatccatggtattactctggatactagccattccttaggattttaaggtcacattttattcctggatgctttatgtccccacctccacctgagccctcatcctctgttccctactatactcccaacttctactctttgttttatccacctatccctattacctgaccctttgtcttccctgtctcccatccttggggggacatgtagccctgtggtcatggttctgatgacatcatcagggcagcccccctgcccaggtattatggcctgtcagcattccctgtgccctccaaaccttaggcctagaatgcggagctgccaacataacattcacccttttgaacagatggagtcaggcacactaacacagccttctgtcctcaataacacagccattattgccacttgctcagtcgtcaatgtaaaccctcagagtcagctgaactattttaggccaaacatactgtttttgtaaagtatttttcattaataaatctataagacagttctatttaattccttgtcattcttccctttgtatgctcttgctttctttgtattggggctggaagtctggataaatatatgaagtggcttttgactgagtggaagtgaggagccagagacgagttgaaggatatacaatcaaggtgggaatcaatgggtcctaaaatagggtgcctttcctttctagtattgctgctaggatgtttcccatccctttcctgacagagcattcagtactcagtacattatacacttccttcctcccctccttaggaagattttctggggattcaagctcttcttacagactcactcctgatcaatgtactccaggtgccttccctctatcttataagtttgtgacgtgcct

SEQ ID NO: 7296 - DNA, 1084 bp, Homo sapiens
gaactgctgcacccagctggctgatctatatcgaaactgtgagactgacacgctcatcaactacatggccaagtttggtgagggtagaagcagggcagggtgggattggggctgagaggtccaggatggtgagtgggtagttgtgatggtgggaatgcacacatgatgggcagctgaccagtgactatctttgctttcccatccagcatatcggggagtcctgaatagccctgtgaaggctgttcgtgacacgctcatcacccagtgtgcccagatcctggcctgttacagaaagaactgtgctagcccctcctctgcaggacaggtggggcaagtatattagtgggaggtggggttgttgggacaaatgtttgcatttgggagggatttctcatgatcattgactttattttgataatcccctcagttgatccttcctgagtgcatgaagctactcccagtttacctgaactgtgtgttgaagagtgatgtcctgcagcctggagctgaagtcactactgatgaccgtgcctatgtccgacagctagttacctccatggatgtgactgagaccaatgtcttcttctaccctcggctcttacctttggtgcgattgagggttggagtatgagatcttgcacggagcaaagggcctcttaggaggaggaaaggataggctagtatcagtcagacactagtggaatttgtttttatgtattttagctgatgtaattttcacactgagagagttactgagaccccagaaggggtggtgtctgaggacttagctttcaaaattttgtgtgtggtgcgggggggcagacttgtcttatggtccttggtaaccttttgctcccttccttttgtctagacaaagtctcccgttgagagtactaccgaaccaccagcagttcgagcctctgaagagcgtctaagcaatggggatatatatttactggagaatgggctcaacctcttcctctgggtgggagcaagcgtccaacagggtgttgtccagagccttttcagcgtctcctccttcagtcagatcaccagtggtttggtgagggcagggagtcaagga

SEQ ID NO: 7297 - DNA, 1841 bp, Homo sapiens
ttctggataatccactgtccaagaaggttcgaggcctcattgatagcttacgggcacagagatcccggtacatgaaggtaacactgatctgaaccctggatttcttaccttgtcaagtcctcacctagaagtgggggttgggtggggaatgagtaagtgactgcctaatgagatttctgggcatgtttaatttcctttggccttgccttatgaaccctgaattctggccgtagcttaccgtggtgaaacaggaagacaagatggagatgctgttcaagcacttcctggtggaagacaagagtctgagtgggggagcatcttatgtggactttctctgtcatatgcacaaggagattcggcagctactgagctaaagcaagtgggtaaatggcatagggcccaggctagcttccagaaagcaccccaggatgtcagagaaattgggacagtaacatatcttatgtaagctgacctcagtctctctggggggagggggagatataaggagacaccttctttctgggctcaagtatcctgccactctgtcatgtcctgctgatggaaggtgcccctgttccctcattctaccctctttttcctgctaatcctgtcataatgaatgtagcttctcagttcactgtatatgattcggtattgggggtttggaggcacccagaccctggcaatattatgtgtccctttggaccagtctcccaagaggagaggggcaggcaggaaagagtggggatcctaaggttactacagggggctcagtgtcatccacaacttcctatattagggataaaacatataggtgcacaagagctggggtatagcccataggtggtggagagaaaagtggtcagtccttcttgggcctggaggttagcagtcaagtttctctgctttcactgctcgctcgctctctcctgcaatgattgatgatcactccgtggatagagaggcacactgtcagaggtgaccggagaactgagttgcaaaatatattaagatctggtagaggtaccagcttcctttccagctggagaggccccaacactggatggttctgtagggagcctagggagcctggtcatcaacttgcaatacctcacagagccagttcacatcccactctgagctcccacgagaaacactgcttctccaggcccggggttgttggggagagaggcagaggcagctggagcgccgttctctcctgctgggacaccgcttgggctttggtattgactgagtggctgacagttatcttccaaccccaactggcttgggggcaggacaagggctaggcttgatggtggccaggcttgcctgctccccacctgggatgcccctgctctggacctctcatttctcttcattggtttatttttcaatgcatctttaatttgtaaagaaataaaataaattaagatgtaaccattagcctcatctttactcccgaaagctcactttgcttttagtcctggccgtcggctgagcgagctgcgcatgcgccacgtgcccccgtggcgtagggcctcgtccggtcacgactatccgctgggcggggtcggtgctggccgagggggcgccggctgccggagtggacatggcggccggccccattagggtggtgttggtccttctaggggtgctcagtgtctgtgcagccagcggccatgggtccgtagcggagagggaggccggcggggaggcggagtgggcggaaccgtgggatggcgcggttttccggccgccctcggcgctgggcgcagtgggggtgacgcgcagctctgggacgccgcggccagggagggaggaggcgggggacttgccgg

SEQ ID NO: 7298 - DNA, 1841 bp, Homo sapiens; identical to SEQ ID NO: 7297

SEQ ID NO: 7299 - DNA, 1141 bp, Homo sapiens
tgtgccagtggctcttcagaggacccttcctctagctcttcatttgtttactgtggggtcaggtgacaggttggggtaaagggtgaagaggatacaccgtaccatgtgcccacccttatctatctcccaggaatgctggcactggagatgctgggtcgccgggcacacaacgatcaccccaacaacttctcccgctcccccccctacactgatgatgtcaaatggttgctggggctggcagcaaagctgggtaacacctcccctccctaggaccattgccccccccccacctgctctccccaccttccttatcccagacctccttcctagctcttgctcagagttgaggccttggtcgggtatgtgtgcgtgcgcggggggcggagggttacctcagctcctggggtggagggaggctctctgccaggccagagctgagatctgtaagttgggtccctagggcagaggtggccacccccgtctcatgcccctccccctgccccccaggagtgaactacgtgcaccagttctgtgtgggggcagccaagggggtgctgagcccgtttgtgctgcaggagatcgtcatggagacgctgcagcggctgagtcccgctcatgcccacaaccacctgcgtgccccggccttccaccaactggtgcagcgctgccagcaggcatacatgcaggtgacaacctagaattatggagcagggtggagcacttcctgggtggtcttggaccagagggaggcagggcctgtttctgtgctttgtactaaggctcatcctgcacacatcctcctccagtacatccaccaccgcttgattcacctgactcctgcggactacgacgactttgtgaatgcgatccggagtgcccgcagcgccttctgcctgacgcccatgggcatgatgcagttcaacgacatcctacagaacctcaagcgcagcaaacagaccaaggagctgtggcagcgggtctcactcgagatggccaccttctccccctgagtctttcacccttagggtcctatacagggacccaggcctgtggctatgggggcccctcacacagggggagtgaaacttggctggacagatcatcctcactcagttccctggtagcacagactgacagctgc

SEQ ID NO: 7300 - DNA, 1138 bp, Homo sapiens
ctgcttaccccaggtctaggaatgaacttctttggaacttgcataggcgcctagaatggggctgatgagaacatcgtgaccatcagacctacttgggagagaacgcagagctcccagcctgctgtggaggcagctgagaagtggtggcctcaggactgagagcccggacgttgctgtactgtcttgtttagtgtagaagggaagagaattggtgctgcagaagtgtacccgccatgaagccgatgagaaacctcgtgttagtctgacatgcactcactcatccatttctataggatgcacaatgcatgtgggccctaatattgaggccttatccctgcagctaggagggggaggggttgttgctgctttgcttcgtgttttcttctaacctggcaaggagagagccaggccctggtcagggctcccgtgccgcctttggcggttctgtttctgtgctgatctggaccatctttgtcttgccttttcacggtagtggtccccatgctgaccctcatctgggcctgggccctctgccaagtgcccctgtgggatgggaggagtgaggcagtgggagaagaggtggtggtcgtttctatgcattcaggctgcctttggggctgcctcccttcttattcttccttgctgcacgtccatctcttttcctgtctttgagattgacctgactgctctggcaagaagaagaggtgtccttacagaggcctctttactgaccaactgaagtatagacttactgctggacaatctgcatgggcatcacccctccccgcatgtaacccaaaagaggtgtccagagccaaggcttctaccttcattgtccctctctgtgctcaaggagttccattccaggaggaagagatctataccctaagcagatagcaaagaagataatggaggagcaattggtcatggccttggtttccctcaaaacaacgctgcagatttatctgcacaaacatctccacttttgggggaaaggtgggtagattccagttccctggactaccttcaggaggcacgagagctgggagaagaggcaaagctacaggtttacttgggagccagctgagaagagagcagactcacaggtgctggtgcttggatttagccaggctcctcc

SEQ ID NO: 7301 - DNA, 1184 bp, Homo sapiens
ttgatctttacttgcaaagaatggagcggcctcattggtgtgctgtgtaacacagggacaaaaggcctggagactccctccactgcagtggcaccttggacacattgctgagcctctgttccctcctaagtatagagctgggcttaaaccagagaatgttggagtccccttcccgctctaatctgatgttctggcattctaaacatgactgttctgtctgtctttccaagtctttaagttgacacaggttctggaatagccgcagggcttctccaactctgccagtcacagctttaggtaccacagagtatcccaattacaggagttgagttgaagacagaaccagtgttgcagggtatgaagctcaccaataccacattcttctccctattcctgctccttagttcccatcaccagaatgggacacggtaactcctgaagccaagaacttgatcaaccagatgctgaccataaacccagcaaagcgcatcacggctgaccaggctctcaagcacccgtgggtctgtgtaagtgtctttgctagtggccaaggagctcaggggtgtcagccttctgtgtgccctcggcaccaccccctccttcttaccagcagagattcattctgggccccaagcaataactgagcaggcgggcagaggactgttgagggccagggtcaataaatgtcaccagggagactcgggaggctgatggggctggtgggccactgctcctctctcccccactcatggctgtcaggctgggattggttctgttcttggatgagggctcaggttgacccttgtggactccaggtagccggtgatagaaagcagctggcaaaacccaaagtgaattcccaagctggggttcatactcagatctcaactccactggagtggtgaccaagatccaacaaatcaacagaaggggtttctgagtcattaaaagcataaaagctgaggcataaagcttctgcgctaaagtcctaggagagtcctctaggctatcagtgtgggttgacgtactctgtttttatacacaattctttcaagctgaaatatcaactttcagacaaagaagaggatttggtagagttaggcatcttgacaaccacgaggcattatttatctgtccattctgtgtttattaaatacctctttggtgctggttaccgtctgggt

SEQ ID NO: 7302 - DNA, 1153 bp, Homo sapiens
aatttcagtttttttgattactagtgaagttgcatattttcatgtttggtttctagtgtcagaatcataatagcttcaaatatttttcccagttccaataacttcgtttttttctgtatagatagttttgtctgtctaacttgattcatgtacttcatgtaacattttagagatgtggcctagttttttggcttaaatacacacacttatattctcaatgatgaatttctcctattatgctcagtaatgctttcaaattagttattctgaagaaggagtaatacaacattatgtttgtattccatattgttattctagtatattgtgaaggcatattatgtgagtaatcctaaaaaattttttaaatccagaaatctcccttaaatctagaaactttaatgatagattatgtttaagtatatgtttcaaatatgcttaagtaatagttttttaaagtctgagaatttatatttgaattatgattttttttcctcttgtaggttggaaaagagactgttcaaaccactgaggatcagattttgaagagagatatgccaccagcatttattaagtgagtaattgaaatattcttctgttgctaagcagaataatactcttgttaggaagaaaaagtagctgatttcagtaacaacttttttttggtataaaacttttgtttacaattgaaatttcaacttttttgtcttctaacttttttaaaaaaactgttcattttagtttttgatattaggcatttttgacataataattttttttttttgagacggagtttcaccctcgtcacccagtttggagtgcaatggtgcgatgtcagctcactgcaacctctgcctcttgggttcaaatgatttgcctgtctcagcctctggaatagcttggattataggcgcgtgccaccatccctggctaatctttgtatttttagtagagatggggtttcaccatgttggccaagctggtcttgaacttccgacctcaggtgatccacccaccttggcctcccaaagtgctgggattataggcgtgagccactgtacctggccaatttttgacataataatttttaataagaccatgagttttgagtttttctttccaaaatgaaaagtattcagagacccactgtgactat

SEQ ID NO: 7303 - DNA, 1178 bp, Homo sapiens
aaagcccatctggatttgcagcatttataccaaccgtggttgccagccttcttgtatccaccccagacaaccagaaatgcaacatcgggaggaaacaaggaatatgtctgaaaccatcactgcatcaccaccacgttatctgtgaataatattttctccctgtccctctcactccccagccatctgttgcttgttggcagcttgtagtgctcaagatgagccatgcggaggattccaataaccctaacagcctatttcttattcctgttacctctcttcagacacctcaggagttccactttcatctcgggctgccatggaccccagtcacagcaggttctgcagggacagcaaaaagcctacattcctcattccttctttcctatctctccctttacagagaatgaagacgattcagaggtgccacttcaattgcacagacacaggtttgctggtggttggtttctcctttttaaaaaaactacgtagttgataagttggaggaaactttgagacaagttgtattaaatggtagctattgtggttccttgaaatgtgaacccactgaaaatgacagggacacttactgtatccacaaacaccgcctcccagcctctgaaaccaaactcgggctcggactgggcaaagacactattcaaagagaagataggagtggtgacaataaacatcacgccaggagggcagcattaaaataaaagagactcaaagagtctctcttctgacaaagttgcaaggcttgaatgagaagccgccactgctcagcagccttaagcagagccaagtacactgctcagcacgtgaccggccctttatccaattacagctgagtaacagaaccagtcccgctccaatttctcagaactcattcttcatggattagacaacaagatttgtatagaaaactctacctgtcattttttcaacattatcgatccactggttcttcatggtctcaaaatgttcataagcagcttgatttccagggttcctaagtaagatacgagcagccgagaccacctgacaatgacaaaacacctttaaacaccagagcacccttgctctccagatacaaaccttcagccaagctttctcctctttacctacagatggcactgtaaagccagaaagtggcaagtctcttttcaggctgaatacat

SEQ ID NO: 7304 - DNA, 2108 bp, Homo sapiens
tgggttagaaagactccctggtaccagtaggcacctggctgagcctggctggcacagaaacctctactaaaaagaaggaaaatgatctgagtcccaggagctgcccagagttgctgggagctgaaaaatcacatcctggcctggcacatcagaaaggaatgggggcctcttcaaattagaagacatttatactcttttttcatggacactttgaaatgtgtttctgtataaagcctgtattctcaaacacagttacacttgtgcaccctctatcccaataggcagactgggtttctagcccatggacttcacataagctcagaatccaagtgaacactagccagacactctgctctgcccttgttccctaggggacacttccctctgtttctctttccttggctcccattcactcttccagaatcccaagacccagggcccaggcaaatcagttactaagaagaaaattgctgtgcctcccaaaattgttttgagctttccatgttgctgccaaccataccttccttccctgggctgtgctacctgggtccttttcagaagtgagctttgctgctacaggggaaggtggcctctgtggagccccagcatatgggggcctggattcatttcctgcccttcctcagtttaatccttctagtttcccacaatataaaactgtacttcactgtcaggaagaaatcacagaatcatatgattctgcttttaccatgcccctgagcaatgtctgtgctagggaaacttcccgtcccatatcctgcctcagcccgccaaggtagccatcccatgaacacactgtgtcctggtgctctctgccactggaagggcagagtagccagggtgtggccctgccatcttcccagcagggccactcccggcactccatgcttagtcactgcctgcagaggtctgtgctgaggccttatcattcattcttagctcttaattgttcattttgagctgaaatgctgcattttaattttaaccaaaacatgtctcctatcctggtttttgtagccttcctccacatcctttctaaacaagattttaaagacatgtaggtgtttgttcatctgtaactctaaaagatcctttttaaattcagtcctaagaaagaggagtgcttgtcccctaagagtgtttaatggcaaggcagccctgtctgaaggacacttcctgcctaagggagagtggtatttgcagactagaattctagtgctgctgaagatgaatcaatgggaaatactactcctgtaattcctacctccctgcaaccaactacaaccaagctctctgcatctactcccaagtatggggttcaagagagtaatgggtttcatatttcttatcaccacagtaagttcctactaggcaaaatgagagggcagtgtttcctttttggtacttattactgctaagtatttcccagcacatgaaaccttattttttcccaaagccagaaccagatgagtaaaggagtaagaaccttgcctgaacatccttccttcccacccatcgctgtgtgttagttcccaacatcgaatgtgtacaacttaagttggtcctttacactcaggctttcactatttcctttataatgaggatgattattttcaaggccctcagcatatttgtatagttgcttgcctgatataaatgcaatattaatgcctttaaagtatgaatctatgccaaagatcacttgttgttttactaaagaaagattacttagaggaaataagaaaaatcatgtttgctctcccggttcttccagtggtttgagacactggtttacactttatgccggatgtgcttttctccaatatcagtgctcgagacacagtgaagcaaattaaaaaaaaaaaaaaaaaaaatccctgaatgatgattagagacatcaccgctaaaaaactacatttataagctaggatttgttatatgcaaatattttctgcctcttcttttgttctgtttaaaacaataaaatgcatttgtataaaaaatgctttaaatgatggatatgttactttagcaagaacttttaggtcaggtttctcctttgttttgatgaatagtcaatgaaactaatc

SEQ ID NO: 7305 - DNA, 1481 bp, Homo sapiens
tagaattatacttcacagacattccctgcctgtgtgggaatcttaaccaaaaccataccatcaaagtgcaataatttgtaaatgatagaagagacatttcttccaaatggtggaagggacactggttaatgtcagatttaccatatagcgctcattgctaacattatattggttgggatgatgataatttattctttttcattctttttgatacaggcttaaaagtaaaccgtttggacatgtatggggagaaatataagccatttaaaggagtcaaatacgtcacgaaagctggaaagttccaagtgaggacatgagaagaggccaaaattcctcaggaccagtttgttttccaagtgtcattacgatgtatcactattaggtaccaagtgagtgggaatacatattctagttaaagcatttgtgtctagctacacaccgctaacaaagttacttagttatcaatgtaggattcttaaggagctttaagctaaggaaaccttttagtgacttagcttattttgtatcttttcacttaggaagattttggaggtgatttttttccataggaggataccatctggcggctgcacattgtaacagtaaaggcagaaagctgtagtgataacctctctcctaaaagagttaactggtctcatccagcagaagctatcttaaatctgtgatgtgtcaggtgcagccaaatatcacaccttctgatcttagccatcccaaaccagtatctgtcccgagaggaaattccccccacccccagaagtttacagaaaactgcctcttcaagtgtttgccttattcagcttttcacttgtgccattaagcaagcactgtagcaaaagccacttccacatggccctggcagggagcactgctgctccatgctccattctcactgtacttggtattgtattttttataaataagatttttatgtaaagcttagaatttgatttacagggaccttgctgcagtaaataccatctcaattttgtgccactggttcagctgttagcacagtaaaaaaatcatttgtatcaaaggggcaaatgctttattaaggtagtaaaagggaacattacttctgcttttaggaagttactgcaagcacaagcatttgtgcttttaagcaaattaaagtagtaaaagaaaaacttaagtgaaacctttgccatcttcatgttttataatataaagcttacccaacaccagttaagccatggttaacctaaatgcctcatgccccagttcagcaaaaggaggaaaatgtgcctgcctcacagtcatcagtctttttaaatcttttttgttgttgttcttaagggtttgaatttgtctgcattccttgtctttaggggaaattcccttttcatattgtgtgcttcccaaagctatagtcatagatttcttccagaaactattgtcataattgtcactggagtgcttaaatatacgtactatactga

SEQ ID NO: 7306 - DNA, 1203 bp, Homo sapiens
ttagcatttctttctctcaaatcagtcctttgaaaaattgacattataagaactgtattttttccaaagtcagcataattatgttctgtaaacctctaaaataattaaattttcctctttataaaaacctctctttaattgggaatttgaaaactgcctggatatttgctgatacttagtcattgttaataatttttgaagtatgataatagttttgtggttatgtttatcattacctttcaaagatatatactaaaacatttatagatgaaattatgtatagttcttggagtttactttagaataatttgaaaagcaagtggatgaggatataggtgaaataagattcatcatacattttaaatttgtgtagatcattgatgggttccttggaagtcactgtgctattctatttacttttgtatatggttaaagaaatttttaatgtctcttaatagatatgcaggtctcttattttgatcaatagaagctaaattgttaatctactaataaagttttgttttattttattggtcatgagaattttttccttccttctattaatagactaaagacattaaagagatagccaaaaagacacaagccctgccaaagatgaactcaaagaggcagcgaatcgtgatcttcacccaagggagagatgacactataatggctacaggtacatgtgggaaatgtgtgatgaatctagtattatggagattaatcaattacaaaaaaaaattctgtattctttctattataatatatacaatatacatatacaatatatataaaatgaaatattttattttaataaatatttctaccctgtatctcagtagaaaagatttcatgttcaagaagatagtttattaacatttagttaaataaaccactttgatataatttatttacttagttatcttggggattttgtcaatcaagaaatatctttcctgaaaaaaagaatacatttcatttataaaatacctgcactagagtaaaataaatttactcaattatgaacaaataaaatccagaactaagttacattttccatttttccttcaagaagaaaatctcattttttgttttatttcaccatctattttatagcactcataaaacaggaatttcatctagtaagcaaacatgttattgattaaaatgattaatagtgttaatatggagctacccact

SEQ ID NO: 7307 - DNA, 1865 bp, Homo sapiens
tgggaagtttttttacgtatgagacttgggaaatacaatacctagctgaaagctggattatttactcttttttttaagtttaagattttttgaaataagtttaatgtactttcatcagattttttatatcatagacttattctttgatgtgtattttatgtttatggcagacatatacctcaaaccactttcatataattttgttaatttcaataaatataattaaatgtataatttagatgtgattatgcctcataaatgacttcatatagagaagtgaaacattctaaaaacaatttcttctcagactgtgacccaatttcttgttgaaaaatatagtcactgtggctgtgttatgtaatacctgcctgtcattacttcttgtggtcattctgtgtctgaaaaagtcatgctaaagaatcttttagtttatttgtgtaagcttcattattaagagactttcccctctttttatcctttaaggtcttgatttcccagttaaagatgttcttcacccgaatgcagtctttcctgttggtaaaataagacaaccatcaacattgcctgtttgtctgcttttgaatctcttaaggatggatgtttgtaagatgttgcttaatacagtctggaatactctgtccatttgttgaattgtaaatgactttcaaatgtgcaagttctgttaaatacaaagagaacctctatgggtaacttttgtgttgaagaagtcatttgtcaaccatggtaaaacttgcaaacccactttatacagagtggattcttgaagctatacagaaaataaaaaagcaaaagcaaaggccctctgaagagagaatctgccatgcggtcagtacttcccatgggttggataagaagacagtctctgaacagctggaactcagtgttcaggatggctcagttctcaaagtcaccaacaaaggccttgcctcctataaggacccagacaaccctgggcgcttttcatcagttaaaccaggcacttttcctaagtcagccaaggggtctagaggatcatgtaatgatctccgcaatgtggattggaataaacttttaaggagagcaattgaaggacttgaggagccgaatggctcctccctgaagaacatagagaagtatctcagaagtcaaagtgatctcacaagcaccaccaacaacccagcctttcagcagcggctgcgactgggggccaaacgcgctgtgaataatgggaggttactgaaagacggaccgcagtacagggtcaattatgggagcttagatggcaaaggggcacctcagtatcccagtgcattcccatcctcgctcccacctgtcagccttctaccccatgagaaagaccaggtaagcgaaggagtaatgttcgtgcattctcactactgtccttttgtcttttacggtttcacttaagttttatgtggacaaaagttctgaataaagtttgataaaattgaatgttttgccttagagcaggcttttgtattttaaaatgtatatattgtactgcattgtgtggaggacttcctcactggttggccaagaatttaatggaagagtcatgtggtttgtttttaagctctaattgctaactggttggtgtctgaagggaccaggaaggataatattgatctttcttcatccaggcagggtcatatatatttcagaaatctacgaaaaggccatcgtatatttttctctttattactattttcaaagaagaatctacagacttcttattttactattattatttttttgagacagaatctagctctgtcgcctaggctggagtgcagtggcgcagtcttgactcactgcaacctctgcctcccaggtttaagcgattc

SEQ ID NO: 7308 - DNA, 1659 bp, Homo sapiens
cttctggataacacatatgacttatttcctcctaatactttaaaaaagacatttcaggaaatcataactacttgtgacaacaccaaaggatagcttgtttttatttaattataattaaagcattgggtgttcttttagtctcttcagcatttttcttgcttatattgcccttgggtccacatggattcttccagtacctggtggatgggccctggaagaaccatgacatgtaaatgcagttgctgctgcctttccaacagagaaacatctaggtggtggcacacacaaaaaatacagttcttaagtttaagcccattgaatgcatctagttgcaataaatttgtttttagatacctttataattctatttattaaatgctgatactattctctaaatttctgcctaggtctgtaaccagtgatgaaggatccatgaatgcattcacaggaagggggtcacctggtaggggtcaaaagactaaagtctgtaccacaccttcatctggtcatgctgcatctgggaaggactcaagcagcagattggctgttacagaccccactcggcctggtgccaccaccaaaatcaccaccacctccacctacatttctgcctctacacttaaagttaacaagaaaaccaaagggctcattgatggccttactaagttttttacaccatcacctgatggtcgcagatcacgaggtgaaattatagacttttcaaagcactatcgtccaaggaaaaaggtctctcagaaacagtcatgcacttctcatgtgttggctacaggtaccacacaaaagctaaaacctccaccttcttcacttccacccccaacccccatctccggtcagagccccagttcacaaaagtccagcacggccacttcttctccctctccccagagttcttccagccagtgcagtgtgccctccctgagcagccttaccactaacagccagctgaaggcactctttgatgggctttctcatatctataccactcagggacagtctcgcaaaaagggacacccgagttatgcaccacccaaacgtatgcgtcgtaaaactgaattatcttccacggcaaaatctaaagcccacttctttggcaaaagagatattagaagtcggtttatttctcactcctcctcctctagctgggggatggctagaggaagtatttttaaagcaattgctcacttcaagcgaacaactttccttaaaaagcacaggatgctaggcagattaaaatataaagtgacccctcagatggggaccccctcaccagggaaggggagcttgacagacggaaggattaaacctgatcaggatgatggtaagcaaaaggtcaaagctccaaccaaacctgcgtcccgtccctttctccccaaccctgaaaaaaatcaaccaatcaattcctatttgtcacataggtcttagctatttctcttgttctcacttcactttcatacagaagcagtgaaactttgacctttttctaatgctgactaaacctccaaaatgttgtttttccaactaatactctcccaccttttattatttatttccattcgtagtgacactaggacccccagatgccttcatagcattgcttatggctttgtagtcccgcatgagtagccactgccatgcttc

SEQ ID NO: 7309 - DNA, 1186 bp, Homo sapiens
aagcctgatctgtgactctgtgatgtgtgcttttggatgtgagtgtgtctgtgtgtgtatccaccttagggagaaaacggatttcataatttcattgaacaaattggcccattacatttgctaccctttatcaaacaaaaaccgaaactgtgtcatttggacaaagtggtagaatttattatctcaaaagtgataatgggaatgctataactagacatcgataaaacttctaatcttggttgaaaaatatgatttcactttgtattgctcttactttccctcatatatttattaaagctgtaaaaagatgacagtgataaattcaaataaaaatttgagtatagcagggaaaggatactgctggatctatgagcagtgcttagatgtaaaagcttatttataaagctttaaaaaaaatccctatttgcccagtatgctaatttggtgccattttggtaatatatggtggttactcatgattcaagtcagtgaatacactttctgctggttttaaatgacagatactgaaataaaaataaacatcaaacaagaaagtgcagatgtaaatgtgattggaaacaaggatgtcgttactgaagaggatttggatgtttttaagcaggcccaggaactttcttgggaggtaaggcgaggatcccacattgtagtagcaagtataagatgtggcttctaactattaatatggaattactgtgttgattttatagagaatccctttcaacatcctttgtgattctttagccgttatcatgcccatttctactgactgtacattcaaaagcaatgacttagtagaattgtcgccactcttaaaagtaggtatggactcagctggtctcacaaaataaaacagagtagcattagttgaggcagattttggaaaacatttctaggtgtgaaggaatagatttctgatgagttttgcctaaatttagaaaataacaatttaaaatcattaacaaaaagaagaacatcactgttaaattcaccgatgtttcttccaacacagatggccagccatatgaaaaatgtctcatatttttagctcttctgcattgatgaaaacaatattttgtttcacaatcagttgtagtcagttttatttttattgtccagtaatttctttaagtgattccactttaattctgcttaagttattaccacc

SEQ ID NO: 7310 - DNA, 1217 bp, Homo sapiens
gcttgggataaaaccaaaatggaaacctctttgctaatccacacttctgaggaatcagaataatacagttcatttattttagttttatgtgaaacccttttgaaacaacataaagtttaacttacttgagaagtattttgatctgtttatatttccttaatacagatttattcggttcagatagagaggacatgcctgatcatttttagctcagaataaattacaagtaaaaattactcctttactagtggtttggcccttctttggtagcttaaagagaaattttaactaccttaaatgtaccctaatttaagagaaaatgtggaattctgatttgccagtgacagctgttttctggttaaagctgtacttgcttaatagagtgttttaatctctcagtttaggatttggaaataaaatgatgtactttctgaaataccatatagaagaaacaattttatatggtgcagtatttttatgttaaataatgttgtctgtttctttttgctaggttgatgggaatatgagcaaaatttattgccaaaacctttgcttgttagccaagctcttcctggaccacaaaacgttgtattatgatgtcgagccattccttttttatgtccttacaaaaaatgatgaaaagggctgtcatctggttggatacttctctaaggtaaaacaagagccagcatgaccttcattttctttttcaaaatgtttttggtagagcccaattctttgaacagggctttttcattactataatttgaataagtgacatgtgtttttgaaaagctcaggttcttgttcagagctcattttaaaagatgaaaacaaaaaacatggtgcctagtaagtgtgtaaaggacctcagcactgtgtgccgccttgatgacactctaattgctgccttgtggaccacttagcgtctttgattttctcagtgtttagcttatttccgttttccctttaagtggtgtcaacatgaaggtttcagtttagtgtagcatttaagagagaattctcctttctccttgttgccttccctctgtggtcaacagtatctcagtgagttaggacgctggcatttggacagtcaagctgataaaatgactggttttacacttttgtctcttattctctgtgctatggttttaagttctaaagcaatctcacctttagaaagcctaagtatcagccgggctcagtggcttacg

SEQ ID NO: 7311 - DNA, 1923 bp, Homo sapiens
aagacaatcccgaacctctaaagtgcaaacaagtgtggccaaaaggaacaaagcgcggtctatctaagtggaggcaaaacaaagagaggaagaccggatttaaactgaatttgtacaccccgccagaaacacccatggagcctgacgagcaggtaacagtggaagaacagaaggagacttcagaaggaaaaaccagccccagtcccatcaggattgaggaggaggtcaaggaaactggggaagccctgttgcctcaagaggaaaacagaagggaagaaacatgtgcccctgtaagtccaaacacatcaccaggtgaaaaaccagaagatgatctcatcaaacctgaggaagaggaagaggaggaggaggaggaagaggaagaagaggaagaagaggaaggggaagaagaagaaggaggaggaaatgtagaaaaagatccagatggtgctaaaagccaagaaaaagaggaaccagaaatctccacggaaaaagaagactctgcacgtttggatgatcacgaagaggaggaggaagaggatgaagagccatcccacaacgaggaccatgatgccgatgacgaggatgacagccacatggagtctgccgaagtggagaaggaagagctgcccagagaaagcttcaaagaagtactggaaaaccaggagacttttttagaccttaatgtgcagcctggtcactcgaacccagaggtcttaatggactgtggcgtcgacctgacagcttcttgtaacagtgagcccaaggagcttgctggggaccctgaagctgtacccgaatctgacgaggagccacccccaggagaacaggcacagaagcaggaccaaaagaacagcaaggaagtcgatacagagttcaaagagggaaacccagcaaccatggaaatcgactctgagactgtccaggccgttcagtctttgacccaggagagcagcgaacaggacgacacctttcaggattgtgccgagactcaagaggcctgtagaagcctacagaactacacccgtgcagaccaaagtccacagattgccaccacgctcgacgattgccaacagtcggaccacagtagcccagtttcatccgtccactcccatcctggccagtccgtacgttctgtcaacagcccaagtgtccctgctctggaaaacagctacgcccaaatcagcccagatcaaagtgccatctcagtgccatctctgcagaacatggaaaccagtcccatgatggatgtcccatcagtttcagatcattcacagcaagtcgtagacagtggatttagtgacctgggcagtatcgagagcacaactgagaactacgaaaacccaagcagctacgattctactatgggaggcagcatctgtggaaacggctcttcacagaacagctgctcctatagcaacctcacctccagcagtctgacacagagcagctgtgctgtcacccagcagatgtccaacatcagcgggagctgcagcatgctgcagcaaaccagcatcagctcccctccgacctgcagcgtcaagtctcctcaaggctgtgtggtggagaggcctccgagcagcagccagcagctggctcagtgcagcatggctgctaacttcaccccacccatgcagctggctgaaatccccgagacgagcaacgccaacattggcttatacgagcgaatgggtcagagtgattttggggctgggcattacccgcagccgtcagccaccttcagccttgccaaactgcagcagttaactaatacacttattgatcattcattgccttacagccattccgctgctgtgacttcctatgcaaacagtgcctctttgtccacaccattaagtaacacagggcttgttcaactttctcagtctccacactccgtccctgggggaccccaagcacaagcta

SEQ ID NO: 7312 - DNA, 1965 bp, Homo sapiens
actctcaacgccatgaatgggtacagcatgtcccagccaatgatgaacagtggctaccacagcaatcatggctatatgaatcaaacgccccaataccctatgcagatgcagatgggcatgatgggcacccagccatatgcccagcagccaatgcagaccccaccccacggtaacatgatgtacacggcccccggacatcacggctacatgaacacaggcatgtccaaacagtctctcaatggctcctacatgagaaggtagacaacgtgggcagtccacaaaacctacggggcatcactattggattgatctgcacaaatacctttgaagagtacgatttcaaaaccagcaattggtgtgaatgcaaaaacatttgttggcaccatttatttaaaaaaaaaaaaagctgtatgcagcagaaagccttatacaagttgtttttctttttttcctttttcttttttttggtaccttcatttctgttacttttatataaaattctctgcaaaggaaggcctctctttggactacaatttggaggcagccacttgttgtgcctgcttctgttaaacaatgtggatatcaagcccccccaaattatctgttttaatattgaacctagagctttttttttcccttccctgtccactccatgtaaatgcctttagcatttcagttattgtatattttgtttaaggtgacacttcagcatgccgctaatgtctttgttagtgacagtgcattttgtagtactgtacaagtgttgtgctaacagtaagccatttcttaagttttttgccttgattagggtgccctaatttgagggttttaaaaaaaactatatttttgttaattataaaactgtaaagagctataaaagctattcccatttggttagtcaaaagggttttattgctaaatgtttggtgtaaagttgagacccttttccattttggtgacagatttctttggggaaaaaaggcagctttctgttttataaatgcagacttctgtttattgaatgaagcatatctcagtgtttatctgtcaggttttgaaacatttcatatatgtccaaatacttggcaggatttaaaaaaaaatagtgaatttggtgtaaagttgctattttatggaaatgcctctaactttacattttcattccatctgtagatttttctatctttataaaatattggagttattttttaaggaaaaatagaaaagtagcttgtgaatagctcaaactaagcttacaaatcgcatgtaaaaaagcaaaaaagttatttgtgtctgtttatattgcttccttttttgtagcctttgtacctgtacagggtgacagtaagggccaagcaggagaggcgtaatccttgtataaaataggatccagcgacactcttgtatttatctgttctctttttagtcagtcacttcaaaaaaacaaaaaacaaacaaaaaaaagctgtacattttaacataaaataaattatgatgagccatttttagcctcttgtgtcctgtcatattatgattgatagagaatgaccaatggaactgtatcatgtgtcacgcctcagaacacatacacattttgggaaaataaattatttagtgtaaattggagttatgggattttctgatttgttttgactttgggggaggggttggcaataaataagagtaatatctaataaaaccatcacatataccaaatacctatttaataaattaatttataatggattttaatgcttttcatgaaagtttattttatgcgagtgcataccttctgtatgccaatcattgtctttaaaataaagtgaaattgtttttttcttttggactttgatcttcatttgcaaagagatcccgcacaaatatccagctgcctcactcgcacagtctgtagaaacatccctccaagcctcgcaccagggtagcaaacttcctttttataaagat

SEQ ID NO: 7313 - DNA, 1157 bp, Homo sapiens
atgttggtcaggctgttctcaaactcccaacctcaggtgatccgcccacctcagcctccctaagtgctaggattacaggcgtgagccaccgcacctggctgaaacttttttttccccatatattttgtttgttttttggttgtttcaggtcagaggataaatctggttcttgttagtaaatcttggtcagaagcacatgtcctttaacagatcatttatttgtattaattattgataaaagctgaattcttaaacatttactaatctaatttccttattttatcaatttgtatttatcattcaaagtctcctgttccctgtaattcctttggtacaacataaatattaaattggccctaaagctttttatcatcttttaatatacctctttcatgcaggctttcacagggttagctaagtagtgatttagtatgggcctcttaactattatatagtagcatacaattaaagggcatgcactgacctgataaagcagaacagtgaaatgtgtcatgcttttagggcattcccacagcaggctcaaagacttccaagagacttccacgtataacttatattttctagcagctaaaacgtcagcatcaaagcctattagcctgattgaggttgtaaagaactggtgagctaagacagtggaaaaaaacatataaaagaagagaagaatcattttgaacagagtatgagaggaaactgtcctaacgaataatgctacaagaatgggagtgacatggaacccattggtggtaagctgttagagaaaggggaatgttaacagactagaaataatgtgactgaagaaatctggccttgtattttttatttatttttttttatttttgagacggagtcttactgtgttgcccaggctggagtgccgtggtgtgatctctactaactgcaacctttgcctgccaggttcaagcggttctctgcctcaacctccctagtagctgagattacaggcgcccgccaccatgcctggctaatttttttgcatttttagtagagacggggtttcaccatcttggccaggttggtcttgaactcatgacctcgtgatccacccgtctcagcctcccaaagtgctgggataggcgtgagccaccatgcccggctggctttgttttatgtgaagg

SEQ ID NO: 7314 - DNA, 1265 bp, Homo sapiens
catcttggctgcccatgaacattattctattgatgtgtttattgctttttatataacaacaagactctttttgtactaccatactctggccaataccagagcatatcagcagagtaggagagcaaggatttggtttcccatgttctctttttttgaatgcaatgttaatggcacagtacctaatgaatattgttggccattttcaaaaccagcaataatgaaaagactaattggatgaatactatctttctaatgaatttgtgattaaatatataatagttgttgaaaatgagtaactttgcgttctccccctaggttgttcttagatgcctggcttatgtgttgacaaagtaaagttttctgttctgagcaaagttatgattataaaaagcaagaaagaacaatcaagagtccttatgtagctatttgaacagaaagcttaagtagatgttttctgccccttctctttaggaagacttaatgttgtgattgaagtcaggctgtacccttacctgttgagtatttgcttattgaactttaaacaagtcaacttgagcagtttgctggttgaggaattttcattgatttccagtagggctctagtcaagaaataatatgttttgaagctccttattacctttagaagaagaaaccctaacaagtgacagtacttgttctttggactaatctttgtttcattttaaaaaatgcaaccctgggacatgatctgttttactgacaaagagtttttgccttctgaaccatctttaaatatactgagcataccaggatgcctgaaataagaagagaatgaaagaggccatagatgacgtgacagagtactggctaggatgccattggtctcctcattaatgcaaatgtagggctggcatatttcaccaaagatgcaacaaaagatgcagtgccagtgtgaccctcagtgagtattcatgagggaaaaatggctgcatccataaaaataaatgggcttaatgttagtggtataggtacccagaataacttctttgtgctatagttgttagatgacagttcaattttatgcttttttaatggtgttattaaatgagccaaataggagtgttttaccagatgttagataaagttcttaatgccgttaagtagggaggtatgcatgcaaagaattgttttctcctgaaaagaaacttacagcacgcaaaatataactttttggtttttgaaatttatcattcttggctgttggaagtaaacagtctcagacatac

SEQ ID NO: 7315 - DNA, 1183 bp, Homo sapiens
agaattgttagtaacatcaaaggtcagaatgcttcaggtgactaataagaatggaaagagactgagtaggttttttgtttcttttccctgtctttgagtaactttgaatgactaaaattagtatgaaactaggttttggacccccttctcacctcacccggatgtaatgccaccaatttcaaataactaaaatgtgaccaattactttgcttcaagttctatacaaatatctctgaaatctgtaagccatatttcagctattctggtttttataatacattctaccctaaattaaccaaaggactttttattcagtgtattccatgtttcagcataaggaaagtttgtgcctgatatggcaggagaaagaacactatggtaatttcattgttacttcaggtctctttcaatctgaagaactgggttgtctggagaattgaacatagccaagcaatattatcaattagtaatgtcatcttaaaaatgttcacttttactaagttttattcagaggatctatgtattattagaaaaatgaagtatttctgacatggaacaaagaaagtggaaactggtacttaatgggggaagcaaaattagctgggactaaaacggacatgttttgttttgtgaattctacctaaatgtctctctatccacagagaaactagtattacttgaagatgtgaaagttcctgtggtagccataccttgaagcacagtgtttgtacataagtaaatatcttgattctaaattaaatccagatttaactaatatatattattttatatctttgttgtattaaaatgtttaaaaacactaaaaataaaacatttgaaagttggattacagtttcttattgaaatgtctttgcattattaatggagctggtcagttttttatataatgaattttagtttttgcaaatgattggccaggtgtggtggctcacgcctgtaatcctagctctttgggaggccaaggcaggctgatcgcttgagcctaggaatttgagaccagcctgggcaacatggtgaaaccccgtctctacaaaaaatacaaaaattagccaagtgtggtggtgcgtgtctgtagtcccagctacttgggagactgaggcaggaggatcgcttgagcctgggaagtcgaggctgcagtgagccgagatgatgccactgcact

SEQ ID NO: 7316 - DNA, 1171 bp, Homo sapiens
ccctggaaatgaaggcaggtgttcctggcctctggtgtgtcttcataatgttaggggtggtagagaatggagctagaaagaatctactctttactatgtcttactcttcagggttcattccagcccttgaagtcggtaactaagtcctaaaatgttgggattgtgcaaggaaggcaggggcctggattggtacatgatacctcactgggacctcctcccaaacgcagtggttacatacagccagaactcagcagcaccggcatttatgagaggtgtaagaatgtgaggataaaggattgtttgatctgattcttcagaggaattacttgtcgtttggagattttttttttttttttaaacattcatggttttgattctttaggaagagtcctggaagtagtaatgtgtgtaactaagtcatgaatttaaactttataccctgtgctttaaggctgctgtgtgtcacctctagtgagcctgacttgtaccacattttggtctggtttgttgtgctagactagaattaacaaagatgatttttatgagagtgcttaggcttttgtgctgtatggacagtttggggtctttggatacattccagtggctatcaagagtattgtgtcctactgagaatttgatttttgagttgaatggatacgaattaaatagtacctggtttgtttggcttaatacataatattgaattttattgtctcacgtgaataaaactgaacacttcatgattacatgatggggaaacatgtaggggctttgtctctattgaaatatttttcttacagttgtttttgtattttattttaggcaaaagtcaacaactctagcttaattggagtaggctatactcagactctgaggcctggtaagtattcttgataaagtaggattgttttgatagtattaaaaaatttagttttcattcttcagcttacttttcagacctttcaagcacacagaagagttgaaagaagagtacaataaatacgtgtttaccttttaccacaattttttatttctttttctttgctttttttttttttgctgggccatttggtcatgacacttctcttcagaataaggcccgtctcttcttttctgcataactataatactatcacacctaagaaagttagtgattccttattatttaata

SEQ ID NO: 7317 - DNA, 1317 bp, Homo sapiens
ctcaacattatagtatattctagaacactttgaagttgttattaaaacatttctctgtgacttggtgccttagctagaatggtaacccagttcttctggtgtctcagatacttccaagcgccctctggtggccagcactagtaggtcagctgacaggctgaggaagtgacaggcaggctctggggatgactgtgaaagaaggcccagactgagtgacgtgccaggtacatcacggttttttgtttttgtgtttttttgtcttaataggtgtgaagcttacactctctgctctggtagatgggaagagcattaatgctggaggccacaaggttgggctcgccctggagttggaggcttaatccagctgaaagaaacctttgggaatggatatcagaagatttggccttaatatatttccattgtgaccagcagcaggcttttttcccccaagaagatgatcaaaacaaaggatgatctcaacaagagctgtattttaagtatttagacagttctttgttagctggtttctagttggttatctagttaccaatgctgcagtcctgcagtcacctatacattatttaaatgtatttaactgttaaatgcgctacccaccaataatgaaatagacctttatgaaaactgtgcaattgtgtgcatgtttgtttttatgttcctttagaaaacattgactgttaccattgaatgagatggatcagtggatattaagatgaggttacaaattttgttaagttcagccattattacttttggtatcccagaacatgacaaattatgaataaaacaagtatacataattaatggctccaagtatttgcggagttccacgtttgccagctaggatcaaatccccgtggtagctagccaatacttgatttttccagtgagtattttgctctgtacctaaatctgtgccacagaatcttctgtgtccctagattccacgagctttttaagactacaataagaggatacatgcttttacacttttacatgcacagtttgtaagtctgtgcagaattgccctgcatcattgaaaggaaaaagagaaggtgctgaaaagttacacaaacacaccatacccctgtgagctactgctaggaacataaagtaggccctggtttggtgagatggtgttaagcatacagaagaggagtaaggtgtagacagtgagggtaacctgagggactgtgagaggtcattactcatttccttctaggcagacacactgaaaggtgggtataggtaggagaccagagacaacccctttaggctgcgtggcattggccttcatct

SEQ ID NO: 7318 - DNA, 1147 bp, Homo sapiens
ccttagcctcctgagtagctgggattacaggcgtgcgccaccacacctggctaattttgtatttttagtagagacggggtttctccatgttggtcaggccggtctcaaactcccgacctcaggtgatctgcctgcctcggcctcccaaagtgctgggattacaggcatgagccaccactcccggcctaacacgatggattttaagtcactgactgggcagatgggggtgtaggggttggggtggtggctgctggttttagggctggtttctttcacagagctcaggtgtgatgccaaaccttcacagttgcacttaggccatcgtgattttattttcttctttagatttttctgtaatttccagattttctacaggtaccttggttttcttttataattacaagggggggaaaatcctatgtctttttcaggtggaaggcacttaagtcactgagatcgctctttctggacacacgggccttgcagggcagccccgagacatgctgtcaagcagccctgaaaggatttgtaccctggtgggttagaggcttatttaccccacatggagactgtgctggggggcggggttgtgggcacagccaaatgggcctcctcctggaggtggtgtctgtctcacactggctcagatcattctggaaaggcagagcagattcttcaactccagccatgagaccaagaaattgaatatgagatgacctctgcggccccttcccatgctaacagctatgattctgtgatatgggtgggcaacaggactcaaatggagcttgactttgctcctggcctagcagagactgtgggaaaccccagcttcaaggcaggaggagacctcatgcttaggcgccgaccctgagcagctctggagtagaagccgagcaccggccagaagcctcaggcctttctttccagccaagacaaagctttgaggctcaacagcagtgggctaaccagaggcttggggaagccgagctgccacctcctgtggggttgatgagacacagggccacaagggtcatgatgtcaaagatgaagagaaacgtgaagtacaggaagggatgcagagtgaacataaaccgcagacaagggtgcacgtgctggcgtgggaacggtggacctctcagcagat

SEQ ID NO: 7319 - DNA, 1510 bp, Homo sapiens
actttggcattcttacaaactcgtctctcggcctttctctcctgccttccacagcctctcgtttctcctccatctgtgcttattacttgaggactgtgtctgctccgtgagagctgcgtgggcagggctgcagtggggtccaggtggtgttcagctgtgctgatgcctgccattgggtcctccttaggctctgtaagtcgtgacagccttcatcagtgcaatgtttgcagggtaattcttaaactttttagagggtggcaggtacatcagttctttttgatatgaaaacattcatgtttcagacattgaattgagagcttttaggggaagcataatggttattgtcactatcaacagtctaaaaagaaaaactgaggtctttttaatcttgattacagcactcacggcatgcaccctactcagtgtgggtgtcttcgtttgggggctttttttttttttgcacttctgaggctagatatgtctggctgaagatttgatgtggttcctccttaagctatgcgtcctgttaataataggtactgtactgggctctgtgtaagtgtcgttggggtaggacctatattttaatactgttcctaacatttcattttactagcgagaaatctttgatttcattttattctttgtaattctagacactagattgtagtttagccataactgatgttttttaaaaagggatatattttcttgcacagttgttcaaaaaagagacaagtttcagtcctcaatgctgtcctttgttttacaggtacaagttttctagctcagacaaactatgaaaaactgtagactattctcaaggtattaactcgcagaccctctgggggtaggggctgttttctaagttacaggcagagtgggactgagatggtacagtgtgcacagacaggtactgagctgacagactgggattttctgtactaaaatgttactttgtatcaaaagttaaacaggctttagtacaacaaataaaggtcaatttctgtaaggctgtgtttgaagatgtgagtttttaatctcttcctagtcagtcagctttcctgtatttctaaacttgagacagcttctcctctgcagcacgtagctggagttggctgatgtgtaggttctttctgtctcacatgacaatttgcagtccctgctacccgctgcatcagcctctctctcactccttcctgcccttccctgccacccatctgtccagtgtggcatgaactggtgactgcagccaggctgcccatctgtgtgagacccagattctgccctctggccctcacattcaattctgcaggcttgggaaaagcaaaagggagtgagctgagtgctctgggtagcattctcagtcagggccctgtctggggcccttggctgggaatggccccacctgcttgggggctgctttgtagtacctgacagcatcacactgggagatcacccagcattgctggactcccagaacagcccacgtgggcctgaactccgtgtt

SEQ ID NO: 7320 - DNA, 1073 bp, Homo sapiens
ccattgtgttttcctggtattttatgtattccttaggtgtatcctgtgagtttggccttgcccagtgggttttatttactttagttcgctacatgactaatggctacaaattggactgcaacattctaggtcttggaaaatcacagcaaggccaagaaaagttggagtagttttattaaccagagtgtttatgttttcagaacgacaccgtaactatccgcactagaaagttcatgaccaaccgactacttcagaggaaacaaatggtaaggaagggcacatcaatctttgcttaattgtcctttactctaaagatgtattttatcatactgaatgctaaacttgatatctccttttaggtcattgatgtccttcaccccgggaaggcgacagtgcctaagacagaaattcgggaaaaactagccaaaatgtacaagaccacaccggatgtcatctttgtatttggattcagaactcattttggtggtggcaagacaactggctttggcatgatttatgattccctggattatgcaaagaaaaatgaacccaaacatagacttgcaagagtaggtgtcttttcatttgttgatcagctcctgaagacctattttttcaatagcgttgtgttgtgagtgtggtaaaaagggcaagaccaagcaatctgggatacaactctgaaaggattaagagaaaaagttatttcataaaatgcacaggtggagtacgggggttcaaaattgaagtctgacatttgagctgagttcagaagggcagctgaagtagtgttcttggagatgggctaggggtaaggattgttttccagaggagaagtaaggggatgtgtttggaaaggtagcctggcaccaaattcacttagtttggattaagtctgcatctgggcttaaacccataggtagtcaggaaccaggaaaagtttttgattgtatactgagtgtcaaacactgcagagtgaactacagcagtgatctgggcaagctccccagcttacattctagtaaacaagtaagcatcatcacctcgaagtgcttgttttgtttgttcctttaact

SEQ ID NO: 7321 - DNA, 1100 bp, Homo sapiens
ccaggaacagcaagtgcaaaggtgggcagagtggagatgagtagatccggaatctccatgatgtgggggttgtaaatgcttgtctgtcataagggagtaatggggagttgaaatgggaagagatcccctcagccacttcggaggtgccttgttttggtagtgcaaaagaagaaaaaatagtgatctgtgagctcaagtctggacaagaacagccagtctcccaaactccctgttgagagaatgttgagtggaccatttgtttcctgtgaggctattccatacctaaaatcccttgatgatcctttctgttccagcaaaaacatgcattaaatgtacttgaaaagttttggtttagaaagctgtgtttcttaagctcagactgggtcagtttccctaccagagtggtgggtaatgattttaatgtttacaagtcacctggatgtactcttttctcattcagcatggcctgtatgagaagaaaaagacctcaagaaagcaacgaaaggaacgcaagaacagaatgaagaaagtcagggggactgcaaaggccaatgttggtgctggcaaaaaggtatagttcattaaggaaaatatagaaacgtcattaattgtaggtctttagtttctaggaaagaagggatcttattaatttttaaaataacttttcttaatgtttcttcttttccctcttcttctggattacagaaggtaacatgttttaagaaactatgtagcatagtgtcttaacacctcagtaaagtagcttggcccaccccttgtcagctcacagcacaatctggaggccacattggttcattgatcccagctggtgggcacctttcaagcctatcacaagaagttttaattttactaattggcatagaaccttcaatgcagagcggatcccattccctgtgattttacttattaatatggacactggtttaagaagcagttggatcaatgtggcccgtgttttcctggcacactggaaaggcaactgagatctcaggattgctttcctctccagttggccaagacaagtgattttagcgataagcagctttttaccagctttgctagctgtaaatagttggaca

SEQ ID NO: 7322 - DNA, 1190 bp, Homo sapiens
acctgagccatcactattcctgcttcaagttacactggtgcctctcactagcactgctctgaaaagccagctggaaaaatcaatgcatttgagtacataaattctttggctccaaagaaatgccatagcaatattgcttttaattcagttttgtttagatgttagaattggtatttgttcttgctttttggttgcgatggagttatatactaagttacttatactaaggcattagtagtctcatatctgaggagcaattgtatttttagttcagctaaattaatgcctctttttaaatactaacttgtactacttttgtggctgtgaatggtatcttttattgaactgaggcagcttttaaaagacttgcctgatcatttagagcactcccattgaggttaaattagacttgaatctgtaatgattctcgtaactgttcctggtgtgtgtccagcacaatgttgctgggcagagcagaggggcagaggctcaggtatgtacttcattgacaagtgggcaaggccatcctgggtaccacattggcttaatgatctcttcattgtgaagtccggctacctcgtttgcataagaactacagtaatcaggcaaggcattgtcagaattgggaggaataaaatcagtgagtctggaaggagtgctctgtatacaattgcaaagaacaaaatggtcatctttaaggtacctgattgcatgcacttaaatgcagattattttggagtttgaaaagggactattaatgaaatctttcttttccctcctttctctttttcccttccccgccactgattcagtgagctggagattggatcacaggtataattcaagcttttcatgtagtcatgtagatcactagactccttggtgtactgacgtagcaatttaaaagcagatcatgtgtagtacatctagaagtagatttacaaatattctgaagagttgtaaccttttaaaatactaacagtgacatggttttgtttttaaggtttagcaatatttagcccattatttttgttttattcttaacttgaatgtttgtaaattttatttcttgatgctttcattgtgttatgataacatcaaaataacttgatattctaggttactaataattgttgtgcatgagtgttactacttttggaattgaagactttaaagaattttaaaggcag

SEQ ID NO: 7323 - DNA, 1110 bp, Homo sapiens
aaacaggagcggcaacttctaactttgctccaagccactctctttttaaacagcaacaatttaaagctatgaagtcacctggagaaaaggaacgttgctcttggacagcaagcaaaccatttctctccgtctgttctgtttttctcctagtccctctcctgccacctctccaagacttccgtgggacacccacttccctctgtcctagttctctttgtccaatcagatggcaagggcagtgcgtggaaaggccggggaggtgcagaaaccagagcccagggcaatggtgtctgtccagcccctccctctgtccctgtgctccaagctgcccccggctgcagcccaggccatggacatgtgcaccagtatgtacctgcaggcatgggggggaggggggcgtgtttctgggcctgccccagacactgcccttggctgccagcctaccctgcctgcactcctccaccatcacaatctcacccaaactcctgctcactcaagcaaaagcagcctctggccttccctccaccgctttgctccatctggcttaccactctccagggcctcctggggagcctgtcctgtgttcactttgtttcaggctggtctgtgccccgtgagccacatggcctagggtgatgccaggttgtcccgtcactggggtcccatctgtaaattctttgcgcccttcccggctgctgcctggggccctttcctgctctcccgtccgctgtgggtggtccccagctctcctctgtgggttttaccggaaaggtggccccagctgttgacttccagtcactgtcccagacggcacaaggttttctgtaggaaagctgccattgccccggccccttttcttcctttgtcccgttgtcgaggttttttcaaatagcgtgttgttcagtatgcaaatcaattattttaagaatcgcttttgtaaatatctttgtgaatattttagtatcgtctttgataatattcaacattttcatgacctggttatagcctttgctggtgtttttaaaatacctggactcaatgacaaagaccgagtcttctttttttttaaacaaaaacaaaaaaagcaaccagggctatttgtacagttga

SEQ ID NO: 7324 - DNA, 1096 bp, Homo sapiens
gtgaaaaagggaatggtgacccctttgtgcctcttccactgaggataacaaacagcattgtaatccattctcttgcaccttcttcttcttatcttgttattacggttttattaattttgtagagggacagggagtgggcaaggggaagaagcagcttatttgactaaccagcccctctgtggtccaccagcgtcttggcttggtgggagggctctcaatcagcagggccccaggagggaagaagaagtggggcaaagcctggcctcgccgctcgggagctttgccatctgagccacgcctcctccaggccatgctccttgaacttggaaatgtcaaccggagcccttacaccagccctccagcatctaatagacttgaatctactctaaacgaatatttaatccaacctcactacattgtagctcagtccaacgactaaccctgaaatgggggtgttccagccttcagcgagatggccaagcggtcccctgggggctgtggcagcgggcttatccttctctgttgccaaccttgccgtccgacctcctccgcccccatgcggtgaccccgtccgtgtctgtgtctgtccatacgtgtgagtccagctaaaaagacaaaacagaacccgtgggcccagctcggaaggtgcgtggagaaggctccgacgtctccgaagtgcagcccttgggatggcattccgttgtgtgccttattcctggagaatctgtatacggctcgcctatagaaatatagcctcttcatgctgtattaaaaggacttttaaaagcaaaagaggctcacaggtttccttgttcacgcaagcatgtagggaggctggactctttcagaggcaggagacggggcaggcatcagagagacttggggctggcctcagctcccctgggtctgggtcatcttgtcattgccctgcctccatgccattgatttgcctcctcccagcctctctgcccccaactgtacactctccagggcaacggccctccccaggttggccccagactgggtgagattgtcggcagatgaggtcacgcgttcactcagcggggggactcccgggtgaccatatataggagtg

SEQ ID NO: 7325 - DNA, 1225 bp, Homo sapiens
tccttcccctctgcctcccacccactctgggggtccacatcaagatagctgggcccagtgtggaagcccagcgtgtctgttccagcagaaaggacacaagcctggtgttctggagacctcggctcaagtctttgccctgctgccgacgcattgtgtcaccttgggcaaggacttcgcatctccaggcctcagtttccccattagttaaatgacagcataacactagagagcagagggcccatttcagctctgttgttctgggattcaggctggccggtgctgtgtcctggagctttatttggggagtttcacccagaatggtgggagaaacctcccaggtgccaggtaccccgcatcgtgacccttcacttggtgtcttaggaagtcaagctgagggatgctgagtcctcccctgctggcccctgcagccccagccctgcttttcatcccccacccctgcaaacatggaggagccccctccttctcacctcggtctcctagcccctgacatggagaaccctgagacaagccacagaacccctcttttctaaaatggagacaataatttcctacctcccaagggagcagagaggcctcgtggcacgtccgtggccagggagcccactgtcctggctggcggcgggatcgtgcgctcctctgtctcccggatgagaagccccgtttccatggtcttgacccttcctttctcccggctgtcagaactgggtctcttgattttgcccctacattatgcctctgtgggaaaaaaaaaaaatcagaccaagaaatgagcctgaaattcagtgtttaccatggctcaaggatgcccatctggtgtccagttgccttttgtattcaaatgaaaatgctttgtacaactgaggagttacagtgaagtgttaaccaggggtccagggagcgagttgaaaagatggagtgagtgtatttgcagccagggagctgcagggtggatttgaggggccataccctctgagcacttaaaaaaggtatttgctccaggccaggcagcaggctgtggacacccttgccaccactggggactgccactgaggactccccgagcacgttgttccccgtcttctccaaggtgttgaggtgagctggggttggccccggcccaggcttctgtcccaaggagaagctgccactgacagtcatcctaccgcactgctaaagagaatgttcgcagtggtgggcggcgtgc

SEQ ID NO: 7326 - DNA, 1449 bp, Homo sapiens
aaaaaggtgggtttgctgtgttgcctcacactacttgattcatggttctgattctaaaaatctcacttgatacttgatttcatatgaaagacgtgtaaaatgcctgggtagaggcggcggcggcggcggcggcggcgggctcggaggcagcggttgggctcgcggcgagcggacggggtcgagtcagtgccgtttgcgccagttggaatcgaagcctcttaaaatggcagatgatttggacttcgagacaggagatgcaggggcctcagccaccttcccaatgcagtgctcagcattacgtaagaatggctttgtggtgctcaaaggctggccatgtaagatcgtggagatgtctgcttcgaagactggcaagcacggccacgccaaggtccatctggttggtattgacatctttactgggaagaaatatgaagatatctgcccgtcaactcataatatggatgtccccaacatcaaaaggaatgacttccagctgattggcatccaggatgggtacctatcactgctccaggacagcggggaggtaccagaggaccttcgtctccctgagggagaccttggcaaggagattgagcagaagtacgactgtggagaagagatcctgatcacggtgctgtctgccatgacagaggaggcagctgttgcaatcaaggccatggcaaaataactggctcccaaggtggcagtggtggcagcagtgatcctccgaacctgcagaggccccctcccccagcctggcctggctctggcctggtcctaggttggactcctcctacacaatttatttgacgttttattttggttttccccaccccctcaatctgtcagggagcccctgcccttcacctagctcccttggccaggagcgagcgaagccatggccttggtgaagctgccctcctcttctcccctcacactacagccctggtgggggagaagggggtgggtgctgcttgtggtttagtcttttttttttttttaaattcaatctggaatcagaaagcggtggattctggcaaatggtccttgtgccctccccactcatccttggtctggtcccctgttgcccatagccctttaccctgagcaccacccaacagactggggaccagccccctcgcctgcctgtgtctctccccaaacccctttagatggggagggaagaagaggagaggggaggggacctgccccctcctcaggcatctgggaagggcctgcccccatgggctttacccttccctgcgggctctctccccgacacatttgttaaaatcaaacctgaataaaactacaagtttaatatgaaaaaaaaaaaaaaagaaagaaagacgtgtaaaatgccaagaactctaggaaacagggacaaaaacacttcaaagagaaagttcatgcacttgtttctgaccacccagggcacccttcagcaca

SEQ ID NO: 7327 - DNA, 1144 bp, Homo sapiens
cttcgtctccctgagggagaccttggcaaggagactgagcagaagtacgactgtggagaagagatcctgatcacggtgctgtctgccatgacagaggaggcagctgttgcaatcaaggccatggcaaaataactggctcccaaggtggcagtggtggcagcagtgatcctccgaacctgcagaggccccctcccccagcctggcctggctctggcctggtcctaggctggactcctcctacacaatttatttgacgttttattttggttttccccaccccctcaatctgtcagggagcccctgcccttcacctagctcccttggccaggagcgagcaaagccgtggccttggtgaagctgccctcctcttctcccctcacactacagccctggtgggggagaagggggtgggtgctgcttgtggtttagtttttttttttttttttttttaattcaatctggaatcagaaagcagtggattctggcaaatggtccttgtgccctccccactcatccttggtctggtcccctgttgcccatagccctttaccctgagcaccacccaacagactggggaccagccccctcgcctgcctgtgtctctccccaaacccctttagatggggagggaagaggaggagaggggaggggacctgccccctcctcaggcatctgggaaggccctgcccccatgggctttacccttccctgagggctctctccccgacacatttgttaaaatcaaacctgaataaaactacaagtttaatatgaaaaaaaaagaaagaaagaaagacgtgtaaaatgccaagaactctaggaaacagggacaaaaacacttcaaagagaaagttcatgcacttgtttctgaccacccagggcacccttcagcacacggtgtctggagtggcctgaagcaaggagtgtcttgtgaggtgcagaggatgcaatgggagcagggtcctgtccccaccctaaaggagttcacagtttaacgcaaatgagaagccagtgaggacatcactactcctgctgtgaacttgggaactagaaacacaaaacctgagcctggagggaagctaaggaagcattctgctctggagtagacatgagtgcatgtgaagcttctgatctcccatgagag

SEQ ID NO: 7328 - DNA, 1213 bp, Homo sapiens
gactacccccgcccccaggctccaaagccgggcaggaacgcctcttatctccaccacagccattttcctaatccttcgcccgctctccacggtcatcccgtgtatccctcgagacgccgcctcccacagctcgtgcttctcccaggttcggctccgacaaggccagagcggcgtctgcgcagcgcaacggctcagagcgctcccggcggctacaagtgcccggccccgggccaggcccggcctgcgccgcgcacccactgggagggcgcggaccggggccgccccaagcctccggcaccgcccagagcgggacaaaggggcgggccggcgacccggcctcgcggtccccggtgccgcgcgggccgggaggcggggtgcggtgggggaggggcgaggcggctgggggaggggcggggccagggcgggcccaggcgcccggggccgcaccgggcggcgcagggaagcggcgccccttcctcggcagacggcaggcgccgcgcctccggccccgcccctccgcgcccctccgcgccccgcccccgccgctcggacggcccgagtcgcgccctcccgccccgcgccgcggaacttgctctaacttcctcggccgagccgggccgcgccgccgctgccgccgccgcgcgcgggtgagtagagcgcggagacctggctggggcgtcgggccctgcccctttctttgtctgaggccgacttccccgagcgttctccgggggcgagggctgctccttaggtccctgtttggcccctcagcctccctccccgcctgcccaggagcggccccgcgggcggcgctggctttgtctgccaggattgctcgctagaggttggaggcctccgccgggaccccgctgagccgaactccggcgccgcgcggacgagagccgcggcgggcccggggccggcactcctggttcggtagccctcgccccatcagcgcgccccggcgagtgcgcgcccgtgccgggcggggtgagggcgacgggagcctggacggccgctgctgctcggggctctgcttctcgtccccagcagcgagctcggggatgggccaccctttcggctcagtcacccaccctcggctcccaggagatcgggtccggggtgggggtgggcgtaggccggggcgggccgccccttcctcctgccccgccgtggttgtgctcagtctcccacgccgccgtgggtcccactc

SEQ ID NO: 7329 - DNA, 1135 bp, Homo sapiens
tgtgtgtgtctctccaaaattcacatgttggaacttaaactccaatgtgatggtatttaagaggtggggtcttggggaggggattgggtcatgagggcagagtccttatgagtgggatgagtgtccttatgtaagaggcccagagagcttatttgtcactccactgtgtgaagacacagtgagagggtgccatccatgaaccagaaagtgggccctcatccgacactgaatttgccagtgtcctgatcttgaacttcccggcctccaggactgtgagaaataaatttctgttgtttataagccacctaatctatagtattttattctagttgcctgaatggactaagataagaacctatatcaacatcagcttccctaattatgattttttttgccacttatattaatttgctaaggctgctgtcacaacataccacagacagaaatttaagccacagcaggcatttattttctcacagtttggaggctagaagtccaagatcaaggtgctggcgaggtgaggtgggtgccttcagagggctgtgatggaagggtctgttccaggcctctctcctggctgcaggtggctgtcctctccctgtgtcctcacgtgggctcccctctgtgcatgtctgtgtcctgatctcctcctcttagcaggatgctcttcatattggattagggggcaccctgatggcctcattttagcataattacctctgtaaagagcctgtctacaaatacagtcaccttctgaagtcctgggggttaggacttcagtgtatggattttgaggacacaatttagctcctaacacctctaaaattaggggctaatactccatcatgttgccatggaggaggctgataggtgtgagggggctggggccgattgccctgtgtggggtgggcagggctggggtgtgtgctgggatggttactgacaccccaccggggttagcagtggagggagctggttggctggcgactgttgcctgctggctctgtctcctggagctgagcttactggtgggatgcccgctccgagaagcacccttcttctcttcttaggagactctggacccccttctccaggtttctctccctttagaggcacattttcctccaagccttca

SEQ ID NO: 7330 - DNA, 1087 bp, Homo sapiens
agtgaaagtatgtcttctgttacgcagaggtaactactattaggaatccttcctgaaaatgtccatgcatctactcaggtcatcacacccatggaatcattttacatactattttatgagtgttacttaatatactgatccacagtgcgttttcacggtcacgccatcagttgtaggagtgtgccaagaacagatgggccttgcctttgtaccagaggagtccatttacagttgcaggtaatagaaaacccaattcagactggcctaaacaatgaggggaggttttggctcttgaaactggaaagtcccaaggtggggtgagtttcaggtttgggttgatccaagtggctcagtgacgtcaacaggatcttgtttccatttctctgccttccacagcctccccttcatctatggtggagggaaggagtctaccacagacaaaccccgagcctccccctgatgggtggtgtggtggtgaagccagcaagggaagggatccccggacacacccctcctcatgctttatcccactgaaaccatgcggctgtgaaatgcagcatcctccaggagggggatgaaggccggggatgctgtcagctattgccattgcacttctgtggatgggtgttacagttttttgcagggttttgcacttacaaggacatatatatatatatataaactacagtgttattggaattgcttcttacagtttgtaagaaaaaaacatgtttttagaggagttctcctgggaggtgggatcacatttttttttttttttttttttgagacggagtctcgctctgtggcccaggcgggagtgcagtggcgcaatctcggctcactgcaagctccgcctcccgggttcacgccattctcctgcctcagcctcccgagtagctgggactacaggcgcccgccactacgcccggctaattttttttgtatttttagtagagacggggtttcaccgtgttagccaggatgggggatcacattttaataagtaggtactcagggctggggtgtacctgttgctgcctgaccactgctggtgtgtgtgggtataaggtgacaaaacctccta

SEQ ID NO: 7331 - DNA, 1360 bp, Homo sapiens
tgtgtttgcatatttttttggagtgcagaatattgtaattaatgtcataagtgatttggagctttggtaaagggaccagagagaaggagtcacctgcagtcttttgtttttttaaatacttagaacttagcacttgtgttattgattagtgaggagccagtaagaaacatctgggtatttggaaacaagtggtcattgttacattcatctgctgaacttaacaaaactgttcatcctgaaacaggcacaggtgatgcattctcctgctgttgcttctcagtgctctctttccaatatagatgtggtcatgtttgacttgtacagaatgttaatcatacagagaatccttgatggaattatatatgtgtgttttacttttgaatgttacaaaaggaaataactttaaaactattctcaagagaaaatattcaaagcatgaaatatgttgctttttccagaatacaaacagtatactcatgattgctaagtgtttttttatttttgcatatttattgaactgtctaattgaatacagcttgctcttgtcacctcttcaagctttcaagcctttatagaaaagcttctttgtggcttacactggaaattatgaaagcagtttttctcctaagacttttggtttctcgcattgcctctcagactaagcactaaaaagcaaagcaaaacagaactagttctgtcttaatgaaatatatcaacccaaaagtgtaatgaggaaaatgcttcattagtttcccctagcagacttttacttctcttacactgctacaccattactttcttgagacatttgtaagttctttgatacagaagagttatatttagaagtctttaatgaagggaaagaagtctgtatgatgactgaggtgattgctctttttgacaaatgtttattacagtaatgcagaaatactgttaatcatctcaaagtacataggaggcttatttctgaaacaaaggtttcagccagatgttgattagtctaatttttccaagtgaatcatatgcatgccatttgaatagggatttcttcaagaaagcaacttagtttcttgccagtatagtatagtgcagtgtgataagtacatgatacttgtagctagactacctctatttgaatctcaactcttatttcttatgtgaccttgggcaaattacttaacctctgtgtgcccagtttcctctcctgtaaaatgaatatattggaacctgtcttataggtttatggttaaacgtgcaggcacttagtaagcattacataagtcttagctattgatgcttttttttattagtaaaaatgtaaatgccaattttctatttttcttctccccatcctgatacc

SEQ ID NO: 7332 - DNA, 2385 bp, Homo sapiens
atgccctatgaccccccatctttcctccgcccctgacccccaccaccctgctgctcggactatgctccccttcctctgctccttaaggtcactgacccctgttttgcacaatggtataatccccactgtcctcatctctaccgccaccttctggcgcaacaagaagttgcgctctgacagggctctagtcagggccttgggcaagacattgggctctaggatgcaattggcaaatacgtccccgttactcaaatccttggcactactacaatgccctccattcttcagggctgagaattgacgagaagccagctcacccatcccagacctcacagtccctcaggttctactgggatctcatcatcatccttagtcaagcagcagggccctggccacgtggagcaacactgactagaatctggatcctgacgcctgcagctgagagcaggagcaggaaaaggaggctcagcactgtctcaggctggaggtcagcgaacctcgtgggctgtaggaaagcaaatgtaggtaaggggagagcaaggatgcacagaaaacacactgactgtgggactgtgccaggatgcatttggaaagatagagcattctgtctgggcagagactgtggaccctggtatgcccacgtgggacagaggacacagaggtggaagattgatcttgccaagagtgagggcagatgtctccagccaggactgccctgagccgcaaaatgtcaaagctggagctatagaggtagccctaaaggcaactagaagagcatcagggctgctctctgaggagctgccccaccagccatccttgaagagacaattcagggcagttgatgaatatcagggctgagatgtggtgagacttccgtttttatccagctcttttgctcacatcgcgtaaccttgggaaagctgtttaaagtcgctgatcatcctcttcctcatctgtaaatgaagaaagtaggccctgtctacctcacatgcaggtctagggtgaggattgaagaaaatagtggtgatgagggctttaaccaagtgcaaagcggcatgaatgcaaagtatttttctgcagcccagttctgtgggtgcagctcttccagaaagtattaggagcctcacatctactctgccaagcgccccagcaggcactgtgctgggcttaggggctaccactggatgatggcattgccgtgactcacacacctctacttctgttcttccctcactccatccccgctaccgtcctggccagctaccgtcagagagaaccagagctccaagtctttaatttgccaagatgaagaaaatgagttctcaaggagggaatgctttgcttgaggccacacagcaggttggtagcaaagatcttgtctagccagggcagcccttatcagcttgtgacaaccttccccaggacagaagtcatacaaggcctctggggttaatacaaataggttgtgccctgctttaaggaacctgctatcaggaaatctacatgtgtgcacagagagagaaaagtagaacagttctttgcatttggctctacttactaacaacccctctagaatacattggtgatttcatttaaagagattgtatgcatttgtggctttcctgatttctgagtctgtgtttggaggtgttactgagatgtgccagtgtgcagaatccttgctggggtttctacagtccccaacgtgaacagtattaagcaagaggtggactcgagcaatccaggagcccagactgagcaaataagtactttccagcctgtgtttcaggagaggactgtgctggatcatgcttgccctccacagggaatacagcatccttacagcttgcatgcaatcaacctcttttgtaaatggaaaataaagtctgttacccaaaggccatgctgatcccctgctccctgctttcatttatgtttgctgacctgtggagaccagtctttctgacacacagtgaagctcaacttgcctcctggctgcttcagcaggtggatccattcttcgacccccagatgtgactctaaagaaggctgaaaatttttgtccaaattgccatgcagatatcttgaacagcaggacatttgcaggccttgtctactggacttttctcccaaacaggacaagcccaggcagggctgcatggagaggaatggaacctggagctagaattaattgcccactctcccaccctaccagtgcagcccggcaagggcaggaattgggaggcctagggtgggcatgaaagcttgggaagcactgtcgtctctcagacaggcgtcctaaagacctctaggctggaagcttgggcttgcaagtggatccgggaccgagggtggtctcttggacaaccccaggaacttggacca

SEQ ID NO: 7333 - DNA, 1228 bp, Homo sapiens
aaaagaacaaattgagtcaagccaaggaggtgacagagtgcttaatggtaacaggagatgggtttggcacaagaaaggaaatggaataaccacattgttaaagacttattttattatttatgtaagtggtccaatccctggaaataatagaacagcctctcacctcttataccaattatgaataaattttgggcaattctttactatttttgattcttcagtattttaccagggaagatgttaaaaacatggacttaaaagttttttaatatgaaaataaaaatctattggggaggaaagactaggaggaagactaggagaaggatgttagaaatagcttaattaaactagttgaatctatttttatttttaaaaaacttgaaaacctattttattctttcagtgcagataatgagtgaattcaggatatcatatagttcgattttaaaaaataatggttgacatatccttagagctagattatggtatattttttactgcttttgttcacaggatattttgaataatcttgaatcatgtgaccttgaggatgatgatcttatgcttgatgtggatctgcctgaggatgcacctcttgaaaatggtaagttgagacaatattgaaccttcagaggtatatacttgagctactcgactgtagccaatttgatatttgttacttgcagacttcttaatcttaatggagcctttcagactgagaatcagtcttaagtgaggtaaaataggttcatttgcaaactaacttaaatatttaaaacctgattttgtaagtcttagatataattctctatcatccaataacattgtataccataaagtaagttgcagataagagttgtctttttttctgtgtatgtacccagtttttcctccctttatctcattttgattttaggaagaaatgtatttacagaaacataccatcttacttgtgaaacactataatatcttaatttgataaatattttatagagattaattctgggaatgtgatgaccttctgaatggatcattctgtacattttactcccaattctagtctatctttctctctagagccaagtaactgctggggtgaggctttaggtaatccatatgggagaggggccttaggttcttttcactccagtgacatagcacttgtaggattttttttatcttaaagactgttggagaaccagaaaccagcataaaaaagccctggagg

SEQ ID NO: 7334 - DNA, 1510 bp, Homo sapiens
accctctgtccttgctacccttgaggtacaaggcacacacctttcctaagggccccccactgtggcaaacgtttaagagccatggctggagcagaacgtgagatgctgtggaatgaaggggagcctgttcctgtcccctaagaaggcattacataagcagcatcgggagtcctcttcctccggggcctgtctgcagtttcactgcttgtccacatgggctccagctcccatggctgacgcttgcttgggggagcctaggcctgtggcctgggggtgcagttgagcctccttacatggcataatgtgaatctagccctgggcactaagctgaggctgagagggtggcagggaactgcgggcctcatcacaggctcacagggaatgactgagggcctcagaattccccacctgggccctatagggaattgatggccagctctggtctctggccccaggaggtcagcctcaggtggcagagtggcagccgactctggtgctgtcctctatcctggctccacctctgttgcacacaggggcttagtgggctgaccagtgaggggtgtggtcatagctgccagccccttctgcttgcccatgctgactttgtcctcttgctttcctgctgtattagcccatttcatactgctatgaagaaatacctgagactgggtaatttataaagaaaaagaggttaaatggattcacagttccacatggctagggaggcctcacaatcatggcagaaggtgaaggagcagcaaaggcatgtcttacatggcagcaggcaacagaacgtctgcaggggaattgttcttttataaaactgtcagttctcatgagacttattcactatcacaagaacaacttgggaaaaacctgccctcatgattcaattacctcccactgggtgcctcccatgacatgtggggaatatgggcactacaattcaagatgagatgtgggtggagacacagccaaaccatatcacctgcccttccataggcctcgcagtctggttttgaacagaaaaagaggtttaatagattcacggttccacatggctggggaggcctggctcccgtcccctgggcctcttggcactgctcccaggtagggcctttccaggactgggcacatttatgttgtggggatcaggcctgcattcctccttagaggaagaatgattattctctgtttaacataaagcaaatggtgtggcagcgccgggcagggctctggaacaccagccccagttttccctgtcaatgagtgggcatggggtaatgccttgtccacactaagccatctctgtgaaatgggcctgtgaccctttcttcagctgcccaggcccaacatcttgatgctgtctttgctgcttcttcctcatgcccctcataattagtccattagcagttctgacaccatgtgtctggattctgattacttctcaccaccccaatggctatgtccctggtctaagccattgctggcatcagcctcctgacctgcc

SEQ ID NO: 7335 - DNA, 2831 bp, Homo sapiens
aattttaataatcgtgttctatttcttcaaggtaatcattgcatgttatggcaaataactttatcaaacccacaatttaatctcggtgtactttgatttgtagtgttcagtttagtaaatctagaggtaaacttttatttatacttcttaaaatctgttaaatattaactgttacttcctttccccttcaccctgctttcagtgtgctgttggaacaactggccagaaatctatctctagagtgattgaatatttggaacattgctagctgctttacctttgcttcaggtgctcggtaatgctggagctatccttagacaaagaaaagtcaagtcatgaaagaagtccttgaagatataccaagaacattcatcagtatcattcgtgtttggatttttaaggccacctgatttcttcgtcatgcattcggcatttgctaaatgacagttactacatcaatctgcaactatcaaaaatgaggggaaaaggttcaggctgttaacaattccatgcagtatttaaatacatttactttggcagagtttataccctccccttgttttcttgctttattctgggcaagtttgaaggggaaaatttgtgctgctgttagtgcaactgctgtgtatgttgagccactgttgtcatgccagccaggtgcaaaggcagcttagctactgaggtagcgaatgttctgaggacattctagacaacagcttagttcctttttcaggctcatttgcttttgcttttttgttgaatgattccaatcgtaaataaagcttttaataattttgtgaattttttggttgttgttccctgaactactgtctatatttaaaattagatggaatccaaagatacacgggattaatagtatatttttttattcttgattaggtttgggttattgaactattttttacttttgagaccacaaccatattcaatatcataccataatgtgtcatagctataggcacaagaaaaacaacagtttgagagaatattatataagatgatgtgccctgttaaaaggaggaggcaaaatagtcaaacccagggtagtttacacttaatgctagggaggctcttaaaacattattagattttgaggaaagactctctagatatattttctaatgttcagtacaataaatataaggaagctaaaacaccaatgtggaattcctgtttccagataacatgtatattcttctatagagtgacaggatcaattgcataagcgcaaagccttaaattgctggtttagagaagacccttttttcattcagattctttgttcgtagagcagttatttgaaaaacagttatggaacacaaaacattttatagatttaatatcataacattgcaaatttttcttgtattattcacaccactggttatacttttttttttccttttttattgattgggcctgaatacaggctttctagagatctttttcattaatacttttaaatacctttcaggtagttacatcatgtttcttcattggatttgtaaaacttgaagccataaaaatattagtttggtgtgtattggggaaaatagctaaaagtctaatttttacccatttagactttgttatttccttgtataaagtgacaaatcggggctcttgtatcagtgccagctgtaatgtttttaaatgcagtggctgccttctattgtcttcctatttttgataatgcagattgttgggaaatctgtaaggaagtaactgattccaggcaaattgttttcttccttctacccaccccaacccctacccatcaccttttaagaacatagtacgccagtgtaacgtgggaaccattgagattgtatttgccctgagtattaaagctagcttagcaaaatacttttaaaaacatattggtaaatgatacccgtaaaattaaattagttatattttattttaaaatgcaaaatacattgatatttattaatcattggatttagggaaagggacagatttttggtgaacctgacttgtggcagatggtaaggaatattataaaacatttggatgagaacaatcagggcgaactgcatttttctgttacactggtaatcatttgaaaattgatttacctcagtgtttaacagttttttgttttgttttgttttttaaataataactaattgtcgagcactgatagagatgcagattttggtggggggaggtggtgggggagataatcacttcaccaactgcagtgcatttgtgtgtttttaaccctcagagaactctgcattttagggtacttgaggctgacttaactaaaagttttaaagtaaccttttttccattgtaaatatttctgtaaatactaccaattggaaattagaacagtagagtacttttctgaatccaatcctatttttattttatacagtatttctcagctgtgatctttggagcaaaagccaacggcaggaaaaaatagtttgtaccagtttcatgaagtatgtctttgggtttttgtaaataattttaactcaaataaaattgctactttcaatacacatgttgtctttaacataagtctattggaggacagaagtgtcacaaactttatatatagccgactctaatgggaaatacactatcacttaacacatttaaccagtttttgttaaatattttattatttctccatgtttttaataatactcatctgaatataatgtgaactcaacaactcaggccaattagggactggattttcagttaggcccttggcatacttaactgttttgatttaggttattttttgctcctatgagtatgatccaagacat

SEQ ID NO: 7336 - DNA, 1224 bp, Homo sapiens
taagggacttggttgcctgaggaaaggtcagtagaaggcatgagagctatacactgaaaagataggagaggaaatgtctgatatgtaaatgttaatttcttcacaacttaaaattatttgcagttcttccaagattgatcatatactattgattaaccacatatatgttatttattaacttttatgttgataccactcatgtttttatcctttgacttatttttacagataaagtggagaattttcatgaagaacatgaaaagaatagtcaccatattcacaaaaatgctgatgacagtactaagaaacccaatgcagaaactacagtggcttctgaaatcaaggaaacaaatgatacttggaactcccagtttgggaaaaggccagaatcaccatcagaaatatctccaatcaagggatctgttagaactggtttgtttgaatgggataatgattttgaagatatcagatcagaagactgtattttaagtttggatagtgatccccttttggagatgaaggatgacgattttaaaaatcgattggaaaatctgaatgaagccattgaggaagatattgtacaaagtgttcttaggccaaccaactgtaggacgtactgtagggccaataaaacgaaatcctcccaaggagcatcaaattttgataagctgatggacggcaccagtcaggccttagccaaagcaaacagtgaatcgagtaaagatggcctgaatcaggcaaagaaagggggtgtaagttgtgggaccagttttagagggacagttggacggactagagattacactgttttacatccatcttgcttgtcagtttgtaatgttaccatacaggatactatggaacgcagcatggatgagttcactgcatccactcctgcagatttgggagaagctggtcgtctcagaaaaaaggcagatattgcaacttctaagactactactagatttcgacctagtaatactaaatccaaaaaggatgttaaacttgaattttttggttttgaagatcatgagacaggaggtgatgaaggaggttctggaagttctaattacaaaattaagtattttggctttgatgatctcagtgaaagcgaagatgatgaagatgatgactgtcaagtagaaagaaagacaagcaaaaaaagaactaaaacagctccatcaccctccttgcagcctcccccagaaagcaatgataattccc

SEQ ID NO: 7337 - DNA, 1320 bp, Homo sapiens
agaagtgtttctaaacttagaaagtgacctatagttttttaaaattatgttttcctagaacgtgccaaattttgatttactctaacaatcagtacttttcttcagatgctttgttctgtttagaacaaaaatgcactatagtttttaaagaatcatgcatctttgggttggcccaggatcaaatttgatattgaataatttattccagggcagctttcataaacatacttcatagatgttgttttgaaatgtttctaaatatctaaaatcatttcaacagcagaaatgatttttattttaacaaaagattatgatagcccttgtagtgtttaaaagtggtcatatttattactgactttgagtcaggtgttaaaatagcagtgccacagctcgtctcttgccttagtgtgctgctgtgagagtcacagtggaaactgcagggaggaggtgtgttcctaagaaccaaaatccagcacagcatcctgtgaagccacgtgtaatgatggtcccataaggaaagtatgtgaatatggctcttgtaaaggattaactattgtaattttagcttatgctctgtattctgttttctatggaattatttaagcccttttagtgacctttgtcctggcccatttaaaaactaaaatgtagtatatattgtataaaatggaaatatcattattgcttcattaggggaaactgtacataggcattgaaagaagggtaaaagcaagcagttttatcaggcagttgtaaaacaccaaaaatatagattcgtctttgacgtgtaacacactaaatgtattttgtacagcatctggtttaaaaggtgccttaagagtttaccattacttgctttgttctatatacagattatgtccaatgtatcattttgaagtaaataaccttattttagtatactttagtgatgtgttttgtgatgctacactcagacggtattgtgcatcagaagtcatctgttgagatttttgtaatgattaagttagtgtatatacatatgttcctgagatgtacacttcaactaccagaaacccagtatggagcacaggtaggtacacgcttgccctgtggagatagagaacttctaaacctatcacggtgcaggggtttttcctttaaaaaacaagacaaaacattgttttctttttcctttttttttttttttttttgagacggagttttgctcttgttgcccaggctggagtgcaatggcacgatctcagctcactgcaacctttgcctcctgggttcaagcaattctcctgcctcagcctcccgaatagctggaactacaggtgt

SEQ ID NO: 7338 - DNA, 1198 bp, Homo sapiens
ctgcagataccttcccagtgttagcattattattaccttgaggatggatattttctccctctcccctgagtatctcaagattcctagcaagtggtggtcgtctgggagtcagagacccgtgttcctgtcccagcctgccatttacaaaccatgtagccttgggcagccggtgaaggattcaacctgttttgtcaatcagggatactgtctctcaaggaagttggaaggaaaagggatcaaacgagaaagtgctttgtggctgggcatggtggctcacctgcaagcccaacattttgggaagctgaggctggaggatcacttgagcccaggagctccagatcagcctgggcaacatagtaagactccatctctacgttaaaaaaaaaaaagggctgcagtgagtcatgaccactgctgcactccagcctgggagacagagtgagtccctgtctaaaaaaaaaatgaaagtattttgttaaaatgtacaccagctcagacaacagacttgcattttccttcctctctattagtgaaaaacagaattggccatctagcttttctcctgcaataacactgctgttgggaatatctaggttatctagaaatagtgacctatttccattgctaataaggtgaggacggtaggtctcagggtttaatttcccacccaatggtgtaagggatgaatcactaagcactgtcctgttatgtttcaggatcccctgtggccttctatgccagcttttcagaagggacggctgccctgcagacagtgaagttcaacaccacatacatcaacattggcagcagctacttccctgaacatggctacttccgagcccctgagcgtggtgtctacctgtttgcagtgagcgttgaatttggcccagggccaggcaccgggcagctggtgtttggaggtcaccatcggactccagtctgtaccactgggcaggggagtggaagcacagcaacggtctttgccatggctgagctgcagaagggtgagcgagtatggtttgagttaacccagggatcaataacaaagagaagcctgtcgggcactgcatttgggggcttcctgatgtttaagacctgaaccccagccccaatctgatcagacatcatggactcgcccagctctcctcggcctggggctctggccaaggatgggctggaggtcattcagttggtctgt

SEQ ID NO: 7339 - DNA, 1146 bp, Homo sapiens
acaccatcacaaggaggctcggctgccagggccaggcattctgccctgcctttgccacttacatctgtttccagagccccagggctaggctgggcccaggatgcaggccccaataagaccctttgcaaggagaagcttgaatagaaccactacgtcctcagacttccctgaggtggagaagcgaaggggttaactgcttcttaggttgccagggaccccgaggggcccagcccagggagccagcagcctgagcattaggactccgggaggaagaggctgtttctgtgccctggcttggggatgtctagaatgtgggtgcctcagacccaggatttgctgtcccagtggaactcagtctgcggtagggaccgtgctgagccccaggcaaggtgtcccatctatcacattgctatgatagcttggaggggtggggacgcctcccagggccacagagctcctaagtgacagtgagagcccaggcccacccaggctgtcctgtccccccaagagggtggccgtgtaggggatgctgctgccagcaggctggttggccccagtcaccagcctcaggcttctcctgacccttacacaaagagcactgagattttcccagctgggagcttgtggcccagaggagtccagcatatgactggaggtcacacaggagcagggcagagcacaggccgccttctctgggccacgatgcaccttttgcacttgttcctcccccatcctcacccccacccccgacccctgccgggcacagagcccttggtatgaacagggaagaacccccactggccagagctgaagcttccagaaccacgctcaggggttcttagctctgggctgatccctgagagcctcaggcttctctgccaaggcccttttctgactcaaggacaaaatcctgtgagtttctcccctggaatggtcaagttaatggctggcttcagggcctcagaaaacaaggctgctgagaacacgccttccttcccaaggaagacttgagggcccctgggagggcgtttcctggctggggaagggaaggcactccacacaatctgcataatggatgcgccctccccctcccacaggctccctctcccttccccccacaccagctctgatctgtgtgccgcagag

SEQ ID NO: 7340 - DNA, 1098 bp, Homo sapiens
cctccccttcctcctctggagagtgccaggagaggatgcgggggagggaacactgagcctaggtttcatcccccagcctgccccttctctctggggagggaggggatccgtgacctggctgtagccgctcccgtgtggagagggtgggggccacctgagcacaggctgctcatggcttcaggggctccaggctcaggggaggctggtatgcttgggaatgtgtgtgtgcgtgcacagacaggtagccagccctgtctgcggtctctgacacccagaggccccgaggaggccaaagacaaacacacataggtgtgcacagggcattgtgggtgctccagggtctggagaccccaccttgatagccagggcctcgccccctcccaaaatgcctccctggggctggggagtaaggtctggcgaaggtaactgggcactcaccctttggccaccacactgtcccaccctgccatgccccacttacccacatacatgaccccctccttggtcttctcagctgcttccgtcaccccctgcttggtcttttccaccgcacccaccacgccctccttggcgatggagaagcccttcttgaagacatccatggtgggtgtgcagggttgtgctgctgcaggcaggacggagctggatctccctgcgagctgcgggcttgagctggctcgagtgctgccgcagcggctgtccccgatgcctcctattgacgccgatgaaatattgatgcggaggccagctggagcccagccagccctgcgtgcagtgggggcggggagggagggagggagggaaggaggttcagcctcaccttcctccaggataggaaggcagagaccaggctccctgggctcctgctggctcagcccagctctcctgccccgtgccctccatgggctggagggggctggccacctcccaacctgtccctcattcatttactgccctgcccacccatgggggcagccctggctgggtgctcttggccccaggggtgctgtgtctatgctgcacctggacagacaggcacagagaggggaggcgccttggccattgtccccagcttcctaggtaggggtcagggccaca

SEQ ID NO: 7341 - DNA, 2219 bp, Homo sapiens
gacctcaagtgatccacctgcctcagcctcccaaagtgctgggattacaggtgtgagcaaccgcacccctgcctaatttttgtatttttagtagagacagggttttaccatgttggcaagtccggtcttgaactcctgagctcaagtgatctgcctacgtcggcctcccaaagtgctgggattacaggcgtgagccaccgcacccagccaccccattgttaagtccagagaattaggccctcctgcctagaggttctgctgctagagtagtttgtctttggctgcccaagtcctgccttgaaacaatgagagggtaacttggaccaggcctgtctgggccttgtgtgtttatggcctggccacttgagtcaggatcatcttcactgcattttctctttcatttcagcaaattatgcgcacagccatgaagtataacctgggattggacctgagaacagctgcctatgttaatgccattgagaaagtcttcaaagtgtacaatgaagctggtgtgaccttcacatagatggatcatggctgacttcctcactatcctcttcacatgtaacttctgcagacctatcacaagtttacatgtaaccacagaaatccctttctctcctgactcattaataatggataccattctcaacaagtcaatccaagtcagcccgttaaggagaaagaaattaaggttagcggatcatgtacaagctgagtgtgaaagtagaaatcacctacaccagagagccattttggtattttgcctttaaataaaaagcctcctttatctggctgtgcagccttgctctgtggcttttcccaacacaatcagtgctagtgctggggaggaacagtcaagagcagtcagttgcttgcttattttttctggatgagtctgggacacactgtaactttaacacatttaagaagtaggtgtgtggccttttcagaaggtggcatggtcctcaagtgagttcttagtattttatatcagcaaaataattcaattttgcaggttgcaaacaaatataaaacctgtttctgtttatgaatattattcttttagaatagaataagtacatgctgctgtaataaaattgcctttaatcacttaacaagcctaaccttgactcaaacagtgaatgcctatagaaataataaatgaaaaaaactagtatttttatatcataaaacaatgtcatttatagcttatcattcatgtattgtccagcagacattaaaagccctgtggataattaagttatcttcatacctgcaaaatggtggaggctattttcattaaaactgtcagaatttgcttactataattatgatacagtccaaagaatgcagtcactttttatcatgttaactaattgttctcttttgaagatctatggttgactaattaaacaataattcaagtagagtgtcccagaaaaaaaccacttgggctccctgtttggagtctggctggctctgagcattgccaatggcccctactcacctgactttgtatcctctccttttagaggctttgcattctgcacccagcttcactaacagtgggctgaaaacatccttgggttgagtgtttcatttgggagttatttggccagggccttttgaacagtagtgtccccatgaagtgctagataatatatgtgtaagagtcagctttttttttttttttaactctaacacccttcagaaatttctaactactttgtaactgcatggcttaacctggtgataaaagcagttattaaaagtctacgttttccaaaacttacgtttcttttctgtgtttttacatgtggtagtttctcttttcataagttataatactgcaattggatttctgaaatgtttatagcgaccacctgtataacatttccttccactttattgtgagctgcccagattttattcttgaattgttttttttttttttgttcggtgctttacacgttcagagaaacttcccgagtaacgaactatagaaatgatccctgaaagcatagtctttattctcgaattattttgtattttattaaataatatgaacagctgttcttgagaaagaggctctaatgttgaaagctgatagtgaagtaacttttagtgccgtttttcactaaaggggatttaatgtggaataatttagccacagaatgtaacaactattgaagagagaatactaactgtaatcagaa

SEQ ID NO: 7342 - DNA, 1168 bp, Homo sapiens
tgatcatcaaggactgaggacctggtggtgtacttaacaccactgccatttattgattgattgagatggagtctcaccctattgcccaggctggagtgcagtctcggctcactgcaacctccacctcccaggttcaagtgattctcctacctcattctcccaagtagctgggattacaggcacggaccccatgcctaatttttgtatttttagtagagacggggtttcaccatgttggccatggctgatctcgaactcctgacctcaagtgatccacctgcctcagcctcccaaagtgctggaattacaagcgtgagccaccatgcccgctcatcacattcttaaacagagaattttattgttgaagagaaaccagttagtacattgtttcttttggcaaaagaattttgagaattgcttctaaataaacagagtatggatttacattggtcaaaatatgactcttgctgtctataccaggactttaatttttgtgttatgggtaattgttcttcacagggatttggtaatgtgggcctacactctatgagatatttacatcgttttggtgctaaatgtattgctgttggtgagtctgatgggagtatatggaatccagatggtattgacccaaaggaactggaagacttcaaattggtattaatacatttttatagcatagacactaaatataaatatttaaaactctggtgcagctattaattgtgattttcaatcaatggcagcaacatgggtccattctgggcttccccaaggcaaagccctatgaaggaagcatcttggaggccgactgtgacatactgatcccagctgccagtgagaagcagttgaccaaatccaacgcacccagagtcaaagccaaggtgacaacattatagaaaccagaaccaacattatcaatgtgaatgacgttaggggggtcatagaagagtctgattgagttttctctttctttttagcagctttattggcacatactgcacataccatacagttcccccatttaaggtacataatttaatggcttttagctaccggcacagagttgtgcaaccattaccaaaacaaacgcatctgcctgacactcctgtaaaaaaaaaaaacaagcaaacaaaaaaaaaacctagataaatagaaaagtgaaagg

SEQ ID NO: 7343 - DNA, 1153 bp, Homo sapiens
tgtactggtcctggctagccctgaatttgagcttcaggaaaaatatagtacgtgaagaaaggggtcagataatgtttggtagtcactgggttatcctgtggtttaaatcatttaatgtctgtagatttggcctctgtagtcagattgctttcttcgagcaaataagagcttttttccccccaatacattgcatcatacctctttagtaacataaaatggaaaggacaaaccacttttgtctactgtaaaaaagaaaaattatatggaataaagagcccagggaggcgaggagtcttgttggaggtggattggctgagaagcacagaggatgttgggctagacccatgtctcagtaaacctggttctgtggtctttcagttatgcccgctgacttatgaggatttttagaaatcctctctgtaccggaaaaaacttgagcggtgctggtgttcccagcaggggggacaaaggttgtttttaaagatttactaaatttgcattgaccccgcccacttctaggacttaactttggagcttaattatcccctagctctggttgcctcagccaaaaccaatgtttgaaccactttgacctctgatttcctttctagcttcaaaattgtataaaatgtacacaccgtcagtctcctacatttgcctgccttcttcctaccactcccttattatccaaaccaggaaaacaagttcagactccaaagaaaggcaaataaggatgttggaggaagttcaggcaatgtttagcaaatattgagttgcatcgttttcttaaaacggacatcaagtttattttttactatcttgctggcagcatttgccagtcctttaaaaggtgtacagataaatcagtgtatgtggttttctgcaggatgatttggtctctgaaatcctttttcttcgattcttcagatgcccagctctctcctgtttttataagtcgcagctccgcaaactcactgaagcaactcgtttaccatagtttgtgagtcctctttctcttgttgccacagcagttttaatgccaaaatattgaacctagcaacaaattgggtcagccataccaaagcactgttactgtagcacttgcttgtactagagtgtaagatacaattttctgttccgtttatcccattta

SEQ ID NO: 7344 - DNA, 1435 bp, Homo sapiens
cacacggaatttcagccgtatgcttgtgtaatgtatataaagatttaaaaaaatagatgggattatttaaactaaaaaaagatgtggaagttactcctaagtgtaaatactatgttctatgacattaatatatataccttattttctcttaatttctatttgaaggtctcagccaatttcttctccagtcatcctccagtttggtcatgcagagactcttcttccactgctttctctcatgggctacttcaaagacaaggaacccctaacagcgtacaattacaaaaaacaaatgcatcggaagttccgaagtggtctcattgtaccttatgcctcgaacctgatatttgtgctttaccactgtgaaaatgctaagactcctaaagaacaattccgagtgcagatgttattaaatgaaaaggtgttacctttggcttactcacaagaaactgtttcattttatgaagatctgaagaaccactacaaggacatccttcagagttgtcaaaccagtgaagaatgtgaattagcaagggctaacagtacatctgatgaactatgagtaactgaagaacatttttaattctttaggaatctgcaatgagtgattacatgcttgtaataggtaggcaattccttgattacaggaagcttttatattacttgagtatttctgtcttttcacagaaaaacattgggtttctctctgggtttggacatgaaatgtaagaaaagatttttcactggagcagctctcttaaggagaaacaaatctatttagagaaacagctggccctgcaaatgtttacagaaatgaaattcttcctacttatataagaaatctcacactgagatagaattgtgatttcataataacacttgaaaagtgctggagtaacaaaatatctcagttggaccatccttaacttgattgaactgtctaggaactttacagattgttctgcagttctctcttcttttcctcaggtaggacagctctagcattttcttaatcaggaatattgtggtaagctgggagtatcactctggaagaaagtaacatctccagatgagaatttgaaacaagaaacagagtgttgtaaaaggacaccttcactgaagcaagtcggaaagtacaatgaaaataaatatttttggtatttatttatgaaatatttgaacattttttcaataattcctttttacttctaggaagtctcaaaagaccatcttaaattattatatgtttggacaattagcaacaagtcagatagttagaatcgaagtttttcaaatccattgcttagctaactttttcattctgtcacttggcttcgatttttatattttcctattatatgaaatgtatcttttggttgtttgatttttctttctttctttgtaaatagttctgagttctgtcaaatgccgtgaa

SEQ ID NO: 7345 - DNA, 2213 bp, Homo sapiens
atacccttttctacagttgaaaacaaaattttttttttaccacatgcatctcttttaaatcttggtaaaatattttagggaggcatattctaaagttatttgagtatttgatggttttgtttgcattttagccatgacgaagatgaaattcggcctgttcaacagcaggacctgcatcgggcaattgaaaagatgaagaaatcaaaggatgcagcatttcagaatgttttaacacatgtttgtttagattaagagtaaagatcatttgtacagttcagtgatctagtttggtgtgtcctcttatcagttagtggaaatagaacggaaagagtgctctttaaacaatgagggagctcagtgtttatggttttatactctgaattctaagttattgagatatagttgttacataggtggtattactgttggtcaaaaatcatgaggaggaacagttgaatccagcctgaacgtgggtgcttgtgtttgaccttttcagccatatattgtacagccttatagaatctaagctggtcttaaagtcataaatgattcattgggtcattagtgagaaacggggatgtggttaggtgctggttcctagacatgtgagtatgcgtttgtgtgtgtgcgtgtatgtatgtgtatattaaatgtatatatccacacattttatattgacattctgtagatatgtttgaatatagaaactttttttaccccaactactgaatccaggagtaccaaataatatatagtaaaactaagatttaaggttgtgtcaaaaaggtacagtgattcagccatttccatttgtcatttgtttcaaccttttttaagttgagtgtttttatttctgcagttattagttggatcctccacatcttgcatatatacatgggctcaattattatgtttgtcaggataatcaaatgaaaatactagttcagtgatcagcattgaatggttgttaggcagccatgtgctcaacactgatttcacctcttgagtataaactttttaaatttaaattggtttacatgaaagtggattaaaaggcctttcaaaagaatgggtttgaaaaacctcagtaccctttaatacatgtacatttctttccttttttcatttaatgtaacatgtctgttgtaactatgtttcttaaatattattttaaggttatgtgttctttaattatggtcaaatataatttggtcaccaaaaatgaaataatagtttaaaacaagtagctgttactaagtgtgctaaaaatactcattttataattaattttagttttcttagtatattattataaattgtgccctaagtcaggtacaaatgtacacatcaaaatgcccatattgtatctatctgtagtcgtttaatgtgaattatatgtgaatttttttcaaaattttactaaccagaattctgttataggcacctaaccacgcagcatgaggaaaacggcacaacacaatcttgaggtgccttctgaatcatcagattaaattatgcttcatatgtttttgcttttactgtatttctttaaaaactctaaatctttattcatgtgtcactggattaatttatctgataatgtgtctcacaagaatctgttagatcgtttattcttcagttgtactttgaatggtggggtggaagtttcaggtgaacaatggataacaaaaagcaagttatggaagattgtgaagaggatggaaaaactgaatacaagataccaaaaatgaaaaaaagtgtcccatttttaataactatattctattattttataaatgtgtaataaaggggtccctctttattggttgttctccacttaatctttggtctttttcagtaattttaagttttctgggattttttttggtttataaaacttgtgtttagactttatcttgctatggagttttcacacttctatagcacatatcctagtatctagtcatttctgttttaatatgaatttcagtaatttaattttaatctggtgacatattaatcgaaaataaggagtaatgtatacctccacatgtcctttctttttgtcttctcttaaattcacaatatccagtaggagtggttattcaatttcttcgtggttttaatcatcaaatgaagttagagaagtatactaatcccagcaactatgactcatctaggcatgttaagaccataaagtaattcaggaaact

SEQ ID NO: 7346 - DNA, 2818 bp, Homo sapiens
aaacagtagaggagccgtcaaatccagaggctagcagttcaacttctgtaacaccagatgttagtgacaatgaacctgatcattatagatattctgacaccactgactctgatccagagaatgaaccttttgatgaagatcagcatacacaaattacaaaagtctgaatttttttttatcaagagggataaaacaccatgaaaataaacttgaataaactgaaaatggacctttttttttttaatggcaataggacattgtgtcagattaccagttataggaacaattctcttttcctgaccaatcttgttttaccctatacatccacagggttttgacacttgttgtccagttgaaaaaaggttgtgtagctgtgtcatgtatatacctttttgtgtcaaaaggacatttaaaattcaattaggattaataaagatggcactttcccgttttattccagttttataaaaagtggagacagactgatgtgtatacgtaggaattttttccttttgtgttctgtcaccaactgaagtggctaaagagctttgtgatatactggttcacatcctacccctttgcacttgtggcaacagataagtttgcagttggctaagagaggtttccgaagggttttgctacattctaatgcatgtattcgggttaggggaatggagggaatgctcagaaaggaaataattttatgctggactctggaccatataccatctccagctatttacacacacctttctttagcatgctacagttattaatctggacattcgaggaattggccgctgtcactgcttgttgtttgcgcatttttttttaaagcatattggtgctagaaaaggcagctaaaggaagtgaatctgtattggggtacaggaatgaaccttctgcaacatcttaagatccacaaatgaagggatataaaaataatgtcataggtaagaaacacagcaacaatgacttaaccatataaatgtggaggctatcaacaaagaatgggcttgaaacattataaaaattgacaatgatttattaaatatgttttctcaattgtaacgacttctccatctcctgtgtaatcaaggccagtgctaaaattcagatgctgttagtacctacatcagtcaacaacttacacttattttactagttttcaatcataatacctgctgtggatgcttcatgtgctgcctgcaagcttcttttttctcattaaatataaaatattttgtaatgctgcacagaaattttcaatttgagattctacagtaagcgttttttttctttgaagatttatgatgcacttattcaatagctgtcagccgttccacccttttgaccttacacattctattacaatgaattttgcagttttgcacattttttaaatgtcattaactgttagggaattttacttgaatactgaatacatataatgtttatattaaaaaggacatttgtgttaaaaaggaaattagagttgcagtaaactttcaatgctgcacacaaaaaaaagacatttgatttttcagtagaaattgtcctacatgtgctttattgatttgctattgaaagaatagggtttttttttttttttttttttttttttttaaatgtgcagtgttgaatcatttcttcatagtgctcccccgagttgggactagggcttcaatttcacttcttaaaaaaaatcatcatatatttgatatgcccagactgcatacgattttaagcggagtacaactactattgtaaagctaatgtgaagatattattaaaaaggtttttttttccagaaatttggtgtcttcaaattataccttcaccttgacatttgaatatccagccattttgtttcttaatggtataaaattccattttcaataacttattggtgctgaaattgttcactagctgtggtctgacctagttaatttacaaatacagattgaataggacctactagagcagcatttatagagtttgatggcaaatagattaggcagaacttcatctaaaatattcttagtaaataatgttgacacgttttccataccttgtcagtttcattcaacaatttttaaatttttaacaaagctcttaggatttacacatttatatttaaacattgatatatagagtattgattgattgctcataagttaaattggtaaagttagagacaactattctaacacctcaccattgaaatttatatgccaccttgtctttcataaaagctgaaaattgttacctaaaatgaaaatcaacttcatgttttgaagatagttataaatattgttctttgttacaatttcgggcaccgcatattaaaacgtaactttattgttccaatatgtaacatggagggccaggtcataaataatgacattataatgggcttttgcactgttattatttttcctttggaatgtgaaggtctgaatgagggttttgattttgaatgtttcaatgtttttgagaagccttgcttacattttatggtgtagtcattggaaatggaaaaatggcattatatatattatatatataaatatatattatacatactctccttactttatttcagttaccatccccatagaatttgacaagaattgctatgactgaaaggttttcgagtcctaattaaaactttatttatggcagtattcataattagcctgaaatgcattctgtaggtaatctctgagtttctggaatattttcttagactttttggatgtgcagcagcttacatgtctgaagttacttgaaggcatcacttttaagaaagcttaca

SEQ ID NO: 7347 - DNA, 1117 bp, Homo sapiens
cttgaagactaaagcatatcctttcaacaaagcatagtaaggtaataagaaagtgtagtttgtacaagtgttaaaaaaataaagtagacaatgttacagtgggacttattatttcaagtttacattttctccatgtaattttttaaaaagtaaatgaaaaaatgtgcaataatgtaaaatatgaagtgtatgtgtacacacattttatttttcggtatcttgggtatacgtatggttgaaaactatactggagtctaaaagtattctaatttataagaagacattttggtgatgtttgaaaaatagaaatgtgctagttttgtttttatatcatgtcctttgtacgttgtaatatgagctggcttggttcagtaaatgccatcaccatttccattgagaatttaaaactcaccagtgtttaatatgcaggcttccaaaggcttatgaaaaaaatcaagacccttaaatctagttaatttgctgctaacatgaaactctttggttcttttatttttgccagataattagacacacatctaaagcttagtcttaaatggcttaagtgtagctattgattagtgctgttgctagttcagaaagaaatgtttgtgaatggaaacaagaatattcagtccaaactgttgtaaggacagtacctgaaaaccaggaaacaggataatggaaaaagtcttttaaagatgaaatgttggagccaactttcttatagaattaattgtatgtggctatagaaagcctaatgattgttgcttatttttgagagcatattattcttttatgaccataatcttgctgtttttccatcttccaaaagatcttccttctaatatgtatatcagaatgtgggtagccagtcagacaaattcatattggttggtagctttaaaaagtttgtaatgtgaagacaggaaaggacaaaatagtttgctttggtggtagtactctggttgttaagctaggtattttgagactacttccccatcacaacaacaataaaataatcactcataatcctatcacctggagacatagccatcgttaatatgttagtgactatacaatcatgttttcttctgtatatccatgtatattctttaaa

SEQ ID NO: 7348 - DNA, 1209 bp, Homo sapiens
ggttatagttttaaatcatggcatgctatttctcaatctatttccttgtctgtgagataaattagtataatgtgtaccaagcagctggcatatagtagctgcttaatgaaaagtagctatagttattatttttatttttatcactaattgtaggagtagtttttgattcagagcaggcactgatagggaagtccaaggatgccaggtagggatgaattcccactaaattagaaagaaagtaaaggaagagagctggaggacagtagaagacagtcttggccattttgttcacttgaatggattcagtttgtgactactcacatcccctttattcatatatgcaattctgataatggggacatgattttgcttttggaacaggtgcagaagtctacttcagacatcgtgtgacacagatcaacctaagagatgacaaatgggaagtatccaaacaaacaggctcccctgagcagtttgatcttattgttctcacaatgccagttcctgagattctgcagcttcaaggtgacatcaccacctgtgagtctgcttttgccatttacctgcctcagggaatgggatttcttttgacaaagcatgaatttggtttaactctcttcgcaaaggacaagtgatagactctattgatttgcctgtcttaaaaactgatacttacggccgtcgtcatgatattaatctaggccaaggtgaaacccatagaatgtttttaaagctggttaaaagttgaacacttttcttattgcccatgtcttcaacacgtcagtatttttgatggatatgaaatgattttgcctaaaggaagagcagtttttgtggccatttttgagaaaagatttttatgtacaagtacttgcttggattgcctcctttcctatgttcttgttctctgggttgctctctaattgtgtttacttctgtctgaggcaattgtctagctagctcttttgtgaacgagaggcatgacaagggatgggtgagaggggatgagtaaattttgctgaagaagctgaaattatgccagaagagccaaattttaataaaggaactaaaagtcaaagaaaatttttatcctttctaagcctttggatactgcagttggtttagcattattcactttaccttagatagtaacctttgtttaatttctttttgatataaaacatgtggtggggaaagtatgtgcagagg

SEQ ID NO: 7349 - DNA, 1282 bp, Homo sapiens
aagatgcccagttcactctagtttcaattagaaacatactagctattttttctttaattagggctggaataggaagccagtgtctcaaccatagtattgtctctttaagtcttttaaatatcactgatgtgtaaaaaggtcattatatccattctgtttttaaaatttaaaatatattgactttttgcccttcataggacaaagtaatatatgtgttggaattttaaaattgtgttgtcattggtaaatctgtcactgacttaagcgaggtataaaagtacgcagttttcatgtccttgccttaaagagctctctagtctaacggtcttgtagttagagatctaaatgacattttatcatgttttcctgcagcaggtgcatagtcaaatccagaaatatcacagctgtgccagtaataaggatgctaacaattaattttatcaaacctaactgtgacagctgtgatttgacacgttttaattgctcaggttaaatgaaatagttttccggcgtcttcaaaaacaaattgcactgataaaacaaaaacaaaagtatgttttaaatgctttgaagactgatacactcaaccatctatattcatgagctctcaatttcatggcaggccatagttctacttatctgagaagcaaatccctgtggagactataccactattttttctgagattaatgtactcttggagcccgctactgtcgttattgatcacatctgtgtgaagccaaagccccgtggttgcccatgagaagtgtccttgttcattttcacccaaatgaagtgtgaacgtgatgttttcggatgcaaactcagctcagggattcattttgtgtcttagttttatatgcatccttatttttaatacacctgcttcacgtccctatgttgggaagtccatatttgtctgcttttcttgcagcatcatttccttacaatactgtccggtggacaaaatgacaattgatatgtttttctgatataattactttagctgcactaacagtacaatgcttgttaatggttaatataggcagggcgaatactactttgtaacttttaaagtcttaaacttttcaataaaattgagtgagacttataggcccaaagaattgtgtgtatgttttttctcttttatttaacagtcatccggttcttccctttctctcttggcagtacttggaactcttctcaaggttaatgtgtttactccgggaaatgaagggctaccaagtaacgagtgatttttaaaaatcatttttttgtatgc

SEQ ID NO: 7350 - DNA, 1271 bp, Homo sapiens
atcattgaaatgcgccctaggttagagaccgacataccatctcttggtacacccagcatggtcagtttttcctctaggattgaagcagatccgtttctttggtaaagattctgacaaaaatagttagcaattgggatccaggatgtatgcaaaaatatatatatctatctttaaatattagtataacactcagcttggtgagatacttgagccctaggaagcacacaggaattgagactgccttagggaactgcagaatcctatttctcatctcactcaattctgagtggagtgcagtggtgtgtgagcagagccttgggcactcttttgattgtaaaattttctctgtctgtgccaccttttaggcacatatagttgaattcaaataaattgaatgttaaatgcacatgtagatatgataccactgcttttgcttatttaatattcaaaaactgaacacttctttgcacgcatagcattcagcagcactctttctttctgtcctttagcattcccatggtttggcatggacatcggtggaacgctggttaaattggtgtatttcgagccgaaggatattacagccgaagaggagcaagaggaagtggagaacctgaagagcatccggaagtatttgacttctaatactgcttatgggaaaactgggatccgagacgtccacctggaactgaaaaacctgaccatgtgtggacgcaaagggaacctgcacttcatccgctttcccagctgtgctatgcacaggttcattcagatgggcagcgagaagaacttctctagccttcacaccaccctctgtgccacaggaggcggggctttcaaattcgaagaggacttcagaatggtaggtcgggtttgtctttgttaaaacatcaaaacctctcacatgtccataatcatggccactcataccgaagaaccatactactagccttgggactctggacaagcttatgtcaccgctctgtgcctcagttttctcacctatacaagaataaaaacagcttctacctcatagggttgttacatgtaggattaaatgagataatatgtacctggcacttagtaagtgctcaatatagttatcatcatcatttcaattacaattattgctgggtaatacgctaaagacaagatgctaaaatcccttctgaagtatttcagttagaattgaccacagacttttactatataatcgtgatgccaactttatgcatatataaacagagacccatgggaaggcttctatgaat

SEQ ID NO: 7351 - DNA, 1200 bp, Homo sapiens
gcccgggactgggagcggctgaggcaggcgccgcagcacgccccgtgcgcccccgcgtctgcggtcgagggactgcacagagtaggttcccgggactgattcttttcctaggggacatcaagcactacaggtctttgcctgagcctgccctttgctcgcttctatcagtagaacgaggattggacacgaagcttgagcgggtccctaggtcaaggatatataataagcgaacgctctgtccgcccttctaattggtggctgggaaaacgcaggtgtgtgaacatttgctggggtccaggagtgaggataaagtgggcggcacaccgagggtgctctctcctttctcacccctctcgcttctctgagcgcgtcctactggggttgcctgccctttgaatcacagagtagccagcagcgtctcgggtctattggagagcgcaagtctggaggcgtggagtttaactaccccccaaaatcacagcctattagaagctgtttcttcacggccaatgagagggttttttgggagggacacacccactgataccatgtgggccggaactatgtggaccaatgaggattggaggtggattttttttttcaacgaagggggaggttgagttgagggtttgtaattgtaatgtacaccggagaaagccgaagtgcattatttcacaatctaaagcttgtatatataatggtagtttgtaaagtgtaccttccccacaggacgctgtgggatgtaaatttgtaggtcgagtttacagctggtttttcttgactgaagctcattcaactggttacttctttgtgggtgtctttaatgaagcttataaatggcaaaaagcaaagtaagtacagtaaatgctaataaatgactgcatttgcatagaggttatgctgttcgatatagggaaattgttaagtaggttttggatttctgtgaaagtttaatgtttggcaaataacaccttcacttttccctgtttctatgtctttttgactcttagcttttctgtattggattaaggtttctaagaccttggaaagccctttgacatgactgtgggtgactctggtacttgtattttgtgggtttgaaatgttaaatttgtaggttaagattttgtgtggaactttaaagccaaacagcagatttggctacagttgtaaggtgtaaggttgtaatctagcacctga

SEQ ID NO: 7352 - DNA, 1190 bp, Homo sapiens
aactcaggaggtggaggttgcagtgagccgagatcgcgccactgcactccagcctgacaacagagtgaaactgtctcaaaaaaaaaaattttcaccttgtatttatttattttttttctatagacctcttctttggttactaaggatttaatttctataatgacatagtcggtgatacctggaaaatgatacatatttatatgaaatgtcagtcattgtgatgtttcgtttgtattaaatattacagatatcccttttactggttacaattttaatattgaatttgaaagacacttgtttttctttgtcctttacatttaatttctattggttcattaacatattttcaaaaagaaaggaattataagaagttgtctaactttggttaatccacatattatttacatcttcctttgttccaaaaagtttttaacatagatggtcaaaagattaagcatacttggtttttcaagtgtgagaatcgatttgtacttttgtcacgtttttagtcagttgcttactttcgtgattgttttttctttttcttttttttgtaggaagtttaactaactctttgaatatctcagagtttgaagaatccataaaagattatgaacaagccaacttgaatatggctaatagtataaaattttctgtgtgggtttctttctttgaaatttacaatgaatatatttatgacttatttgttcctgtatcatctaaattccaaaagagaaagatgctgcgcctttcccaagacgtaaagggctattcttttataaaaggtatactaatgaatatttttatcttattgctctgaagttctcttcctgggctttgtgatagctgtaagactaaaacaaatagaaaattgaaaattgtaatgctaattattaacattaagagaagaagataattttgtgctttggaagtatgttttggtatatttattaaacttgaatataaaagggtctattttggtattgtatttgcttgagtatcattaattggatttgtggtgatgggaaaagctgtgtatggttatgttcacgttattctcctgctttgtaacagtgtccaaattttggagctatgaaatgttactattcttccggagtggtttttctaaccttttaaaacaattattcacagtaggaaacacatattaataacatcatgattcagtacct

SEQ ID NO: 7353 - DNA, 1193 bp, Homo sapiens
aaaaggaagaaaaagcagaattaaataaacagattgttcattttcagcaggaactttctctttctgaaaaaaagaatttaactttaagtaaagaggtccaacaaattcagtcaaattatgatattgcaattgctgaattacatgtgcagaaaagtaaaaatcaagaacaggaggaaaagatcatgaaattgtcaaatgagatagaaactgctacaagaagcattacaaataatgtttcacaaataaaattaatgcacacgaaaatagacgaactacgtactcttgattcagtttctcagatttcaaacatagatttgctcaatctcagggatctgtcaaatggttctgaggaggataatttgccaaatacacagttagaccttttaggtaatgattatttggtaagtaagcaagttaaagaatatcgaattcaagaacccaatagggaaaattctttccactctagtattgaagctatttgggaagaatgtaaagagattgtgaaggcctcttccaaaaaaagtcatcagattgaggaactggaacaacaaattgaaaaattgcaggcagaagtaaaaggctataaggatgaaaacaatagactaaaggagaaggagcataaaaaccaagatgacctactaaaagaaaaagaaactcttatacagcagctgaaagaagaattgcaagaaaaaaatgttactcttgatgttcaaatacagcatgtagttgaaggaaagagagcgctttcagaacttacacaaggtgttacttgctataaggcaaaaataaaggaacttgaaacaattttagagactcagaaagttgaatgtagtcattcagccaagttagaacaagacattttggaaaaggaatctatcatcttaaagctagaaagaaatttgaaggaatttcaagaacatcttcaggattctgtcaaaaacaccaaagatttaaatgtaaaggaactcaagctgaaagaagaaatcacacagttaacaaataatttgcaagatatgaaacatttacttcaattaaaagaagaagaagaagaaaccaacaggcaagaaacagaaaagtaagctaaatgttattcaaaatattttaaaatacacaaagcattcattttgctatgcagctttaaaaaagttagatagtcatacttaatctggtaaagcgtagcatgtatgatgagt

SEQ ID NO: 7354 - DNA, 1085 bp, Homo sapiens
catattgtacattattcttatcaagatcagatgagatgaaaaaatgtaatagtactttgtaaaccctaaaactctattataactgtattttggtggatgaaattgtgatgaggatgaggacagtgagtctgtgtgacttcatacttttctagccactttcatgggcatagaaaacttttttcttgaggactgcatgaagttttctatataataaggttgacaatgaatttattatactatactgtgaatactattcattggattcctgagaagtccctgtagttcctcttcactaagaatttagtaagaactcctaaaagttaaactatagaatagcctcagttccatcttggtctgtgttctttatctgggctctactgatttgtgtctgtagcccatgtcaagtgtatctctacatggtataacttttgcatatgctttaaaacataattttatgtcttcaaatcagaattggaaaaatggaaggaaaaatgcaatgatttggaaaccaaaaacaatcaaaggtcaaataaagaacatgagaacaacacagatgtgcttggaaagctcactaatcttcaagatgagttacaggtatgactttatgtatgtttttatgtatgaatgtatctgtcttcattatatttctaataagaggagaattcagtattttatatttagtaattcacttagatatgggtgaaataatacctggcaaatgttaatatgtaaatataacttttcagtgcacattgaaatgacatggggaagaaattccaagatatagcctattaagtgccagtgaaatatagtgattgggtccttagttttatgtttcacatatttaattcataaaccactgcttctaatgtccttgtgcccatttttctactccttaaacttcttactcatcaaatactgctgtggagaaaatgaccatcaggagaattattttgattactttaaatctcttcaaagtttaattattggaatagaattgtatatctgaacacatataaaactatactatatagaaggtattctattttgtgtgtgtgtgtttttttcttgttcagctttaacat

SEQ ID NO: 7355 - DNA, 1157 bp, Homo sapiens
cacggagaggaaaggggcgagcgagaggcgcgttggggagggcgcggtggccttccgcgagtggcagggaggggcaggaggcaggacccggcgggacccacctgtacgccctccgcgccccctgcgggcgctgcccgcgcgcgtgccggggtggtggggtgggggggcacggacggacgtgcccgctgctcccatcccctccccgccaacactcgggcagcggccgaaacgtgctattttttcgctgccacctctcctgggtctacaggtttctggccccaggcgtttgtactttgaaacatttgtttaatattaagaaagctgcgtgtgcggccgtcatagtacacccggaacgtgtggccgtgagctccagggcggtgaatgaatcatcgccccgcggaccgggccccgatgattcatgcggggtacacacacgcgcgcgtactcgctatgtacctctgacccagggagagtggcccctctgcagtgatgacgcccggaggggcggggaagacttagtgcaaaaggacagcggggtcccccccttccacaataacttgtgggggggtcagggacgcccggagggacgggggagacttagtgcaaaagggcagcggggtcccctcttccacactaacttttggggggtcagggtccacacattccccaaggcttgttttgcgttctcgaaagagttacaaaattccacctggctacattaaccggttgaggagcgctggttcgctgcagggctgggtcctgtctcattcagtatttggtgtcaagtgagggaggtatcagactctgaaggaatcctcctagtaattgcgtctacctaactggttctgaagtaattagaaaaattttaaaagtggatcttaaaagaagactccttaagactagttttttgagggtttttaaaaagccagatcctaaaaggaacctcggttgccattcatgaatacagaatttttcccaatgtgatcactctcaaagattaacttgactcattcccacctcacattagtaagactgaataaagttttctcatcatttaagactcacctcaaacggcatctactcagccaggccttcttgatcgccttcattatctcctgtcccctcccccaggagccaccccataatactattttatt

SEQ ID NO: 7356 - DNA, 1147 bp, Homo sapiens
atttacccttgagcgttagaaaaagtagaatataaaggcatacgtgagaccaggcacggtggctcacacttgtaatcctagcatttggaaggccaaggtgggaggatcccttgaggccaggagttcaagaccatcctggccaacatggtgaaaccccgcctctactaaaaatataaaaattagccaggtgtcctggcatgtgcctgtagtccctgctgctcgggaggctgaggcaggagaattgcttgaacccaggaaacagaggttgcagtgaactgagattgcgccactgcaccccagcctgggtaagagagctagactctgtctcaaaaaaataataagacaaaaaaaaagggcatggatgagaggaccagagggattcccagtaaatgacaaggtgaaataagaatactaaatagtttctgagaatactgatttaatgagacaagaaaataagtcagacactttgaaaattcctactaaatgacttgaaacaagaaataacaatatgtagatgtagtatcatgtatgttgtgttttgtccttcagaaactgtgtactgttcagagtgtcaactgcagagacattgaagggcgtcagtctacaccacttcattttgcagctgggtataacagagtgtccgtggtggaatatctgctacagcatggagctgatgtgcatgctaaagataaagggtaaatgccaatgattgttatggactctcttccttacttttacttgacctttttaggaaaacctggaaatataatatgttttatttttcaagaaagcctgtttcctaacattggcctaaatattaaatagagcttcttaatttcaattaagattttatatggttagcattcatataaagactttattggcataatgcctgagaattttataatggccaaggagattataacattagtgtgatattgacttttaatgtagtaaatttttcagtttccatggagggttttttaattcttccagtttatcttgaagttattttttattaaaaatatacaattctagacgttgcatatatggatgaatgttatagtctctgcatttaaaacattttttaaatgttctcccctgactcaccaaaaagaacttatttctgccttaaatagatttaggt

SEQ ID NO: 7357 - DNA, 2916 bp, Homo sapiens
gtagttctagagcagtgttgtgaactgggagtaggtatcggaatcaccgcagttactaaaatcagacatgattttagtcttatctgatacttatgaacttagtattcatcttagacttgctgattgaaaatctgaagaactgtactcagggtaaagatgttttgagaaaatgtccctagatgattctgatctacaacagtaatttagaacctcctccctaagattaggaatacttccggaaagtctgtttatctttcaagaaaatttttgtaccattatttgaatttatctttctcttccaggcttatcctgagtatttaattacttaccagattatgaggcctgaaggtatggtcgatggataaatagttattttaagaaactaattccactgaacctaaaatcatcaaagcagcagtggcctctacgttttactcctttgctgaaaaaaaatcatcttgcccacaggcctgtggcaaaaggataaaaatgtgaacgaagtttaacattctgacttgataaagctttaataatgtacagtgttttctaaatatttcctgttttttcagcactttaacagatgccattccaggttaaactgggttgtctgtactaaattataaacagagttaacttgaaccttttatatgttatgcattgattctaacaaactgtaatgccctcaacagaactaattttactaatacaatactgtgttctttaaaacacagcatttacactgaatacaatttcatttgtaaaactgtaaataagagcttttgtactagcccagtatttatttacattgctttgtaatataaatctgttttagaactgcagcggtttacaaaattttttcatatgtattgttcatctatacttcatcttacatcgtcatgattgagtgatctttacatttgattccagaggctatgttcagttgttagttgggaaagattgagttatcagatttaatttgccgatgggagcctttatctgtcattagaaatctttctcatttaagaacttatgaatatgctgaagatttaatttgtgatacctttgtatgtatgagacacattccaaagagctctaactatgataggtcctgattactaaagaagcttctttactggcctcaatttctagctttcatgttggaaaattttctgcagtccttctgtgaaaattagagcaaagtgctcctgttttttagagaaactaaatcttgctgttgaacaattattgtgttcttttcatggaacataagtaggatgttacatttccagggtgggaagggtaatcctaaatcatttcccaatctattctaattaccttaaatctaaaggggaaaaaaaaaatcacaaacaggactgggtagttttttatcctaagtatattttttcctgttctttttacttggttttattgctgtatttatagccaatctatacatcatgggtaaacttaacccagaactataaaatgtagttgtctcagtcccctccaggcctcctgaatgggcaagtgcagtgaaacaggtgcttcttgctcctgggttttctctccatgatgttatgcccaattggaaatatgctgtcagtttgtgcaccatatggtgaccacgcctgtgctcagtttggcagctatagaaggaaatgctgtcccataaaatgccattcctattttctaatataaaactcttttccaggaagcatgcttaagcatcttgttacagagacatacatccattatggcttggcaatctcttttatttgttgactctagctcccttcaaagtcgaggaaagatctttactcacttaatgaggacattccccatcactgtctgtaccagttcacctttattttacgttttattcagtctgtaaattaactggccctttgcagtaacttgtacataaagtgctagaaaatcatgttccttgtcctgagtaagagttaatcagagtaaatgcatttctggagttgtttctgtgatgtaaattatgatcattatttaagaagtcaaatcctgatcttgaagtgctttttatacagctctctaataattacaaatatccgaaagtcatttcttggaacacaagtggagtatgccaaattttatatgaatttttcagattatctaagcttccaggttttataattagaagataatgagagaattaatggggtttatatttacattatctctcaactatgtagcccatattactcaccctatgagtgaatctggaattgcttttcatgtgaaatcattgtggtctatgagtttacaatactgcaaactgtgttattttatctaatccattgcttaatgagtgtgtttttccatgaatgaatataccgtggttcatatgttagcatggcagcattttcagatagctttttgtttgttgggaagttggggttttggggggagggggagtattagtacgttgcatgaaatagcttactttataatgatggaattgctttttcttttgtcttgtgatttttttttttgaagtgaaatttaactttttgtgcaagtagtactattatacccatcttcagtgtcttacttgtactgtatcacattccataccctcatttaattcttaataaaactgttcacttgtttttctgggtagcatggtaattactggaatagtataaatgtgttgaatggtctttgagaaaatgaattaagattacaataaaccacaattgcaggaaaacaatgtagttctgagtctaatagtgataaagaatgcagtttgaagtttgaaatattgaatattgtagctgtacttgctcattaaaatgaaagtagctgtgagatgctttcaacatttagtctattcagcacaactggtaaaccttaaagctcattcctgggaaattaatcttctta

SEQ ID NO: 7358 - DNA, 1168 bp, Homo sapiens
caaaggggatatgagatatgtttaatattaaagacattaattgggactattctactttttggttgttgttcctacagctaaaatctgtccccattttttatttttgattttggacctaaggtgtcccccaagtccccagtacaaagtatgatctttgtttttaaaaaaattatgttaaaaaaatgtgtgtgtgtgtgtgtgtgtgtatatatatatatatatatatatatatatattatattttaacagatgattcagcagcatcaagagtggttggaagacttggttattagactcctttgtgtttttgcattagacagatttggagactttgtttctgatgaagtaagtatcatttaagggaggctttgcccaatcaaatttcaaattctacaaaatacgttttttgcaaatatgagttttcttcctttttcgtctgtaggttgtggcaccagttcgtgaaacttgtgctcaaacattaggtgtggttttaaaacacatgaacgaaacaggagttcataagactgtggatgtgctgctaaaattacttacacaagaacaatgggaagttagacatggtggtctgctgggaataaaatatgctttggcagtccgtcaggtaaatatttcaagttttgaagcttatgtgggagagttttttcccccttatagtttattttcactaattagacgaaatggccgtagattcttactgttacagagaagccagtcttccaagatttgccgtcttgagagagtgtcatagagataggtggcgctcataagaatttaagtataaatcaaaagatggttagttacattgtttgctctttaagttcaaagattatttttcctttttaatccattgctacagttaattcagtgctcttcatgatttggttttactgttttaactcatttaaatattgaatacatgctctgagggctatacaacatggtgccaagttatgcagtatacatacaggagtagacatcaaagtgtaaagcagacaatctgtatggtcatgtactttttacataaactgtcagtgttttttttttttttttaatcctttatgacaaagcttagaagaagaaaatgcatgtagtcttattattttcatatagggaaataagttctgaaaaattagatgccttgctgatggtc

SEQ ID NO: 7359 - DNA, 1634 bp, Homo sapiens
atcaagagcagtatgattcagagtacagcctggaaaattttatgcattctctcaagtaactatcaaatattgtaaatgcaattgctgctagttcagttacatttctgctgatattcagcaaatttctaagtttatggtgaacttttaactcaatgtgtaaatagatctggagaatattcagcataatgctggctcttgtttcactgggggaaacaagttattctcaaatatttgcactgtattaaatttaaatgttaatgtgaaatggtttaaattttacatgctgaaaagctgcagagcagaggaaccaaaccaggtttatttgtgctaccaggaggtgttcttaatgggaacaggcctcctatctttagtcactttgtacaggatgatatccatgagtactttagtgtttgtatatgttttttcttttaaatagaacttgtttttataattgatttaaaatagggctttttttctataaaagccttaatgagccataattttaagaatataagaataatgactatgatattggtcagtcttagaacatgaaaatgtcagacaatgaatttaatcgggcccttggtggaaacatttatatatttaatgcagatgcatagtgtttttcaaatctttaacatcattttttcaacttttaagatataatatcaactattctaaatacaggtaatggtatatttaaggctaccataacatcctatttagagggtggttttttttaatttatctaatggctacgatatagccagattcaaataacatatgtactcaataggtttcaatcatatatataatatattttttgtaactatgaacatacacagttttccagaaatagattttacactgtttagaattccaacacctacagtggaaagactgtttattgtagtaatgcatggctgaagcataaaagggagagagaatttctttatatacacaaacatacatgaatatgcatatctatatgcatagatgtacctatcctgcacccaaaaaggtgcctggtattggcactaaaatcatgtagttatactgggcagcaataataattgggcatgaggctgattactcaatggtgagggtaggtatatgtagatagatgtgcatgtatgtgtttgtatatataattttataagtttcacgcataaattaatacatgcctgtgtgcatacatatgtatgggatatatttgtatatatatgtacaggtaataaacatccccaaggtttgtggctggccatacacataggcatcagtttaacaaccatcagacctcagctgtacaataacaggtgttttgtttaattaaaattatactgttctgcagcatttagacatttgtcacatttcattagctttgacaaccatactgtaacattaaacctagcattccacaagagaataaatataagattgaaactgtaaaatatatgcaactgtgtgttatttgtaggaaatggtcactagaaagagcaaaagattattcaggtatacaggttttttttcattgtttaggattttaactcaaaactttatgtagaacatttcagtatatttgagttgaatatttttttattaactatttatttgctagttccataaaccagctc

SEQ ID NO: 7360 - DNA, 1223 bp, Homo sapiens
tgtgacatctctacttgcaaggtttgagtgaaagattagtcacagattagtgaaaaaaatgtatctttttgttaaaactggcttatttgaatggattgttgcttttcactagcttgtatggtatgtcagctaacatttgtttttttttttcttttataataaccaaacttctctatctcagctgcaatagtgttccatcttaccacagagtgttttataattaatgctgttgactttataccccaaaatgggtcaagaagtggctacatgattaggggatgtttaaatttgtatgacgacaaagttaattgcaacaagtagaaaacttgggtgctaacacaggataacttctgctctttttctttcctggatatagttctgttggggtataaagtattaggtatttgtattttttgctgtcaaaataatggacttaacttttagagtgttcacagctaggatctctgtatttgtttttcaactaacaactaattttaaatgtattgtatcttttattacctgttctcttagattgttttttgctagtaacccttactcagcttctgcctttggggcttggactaatattgcttgtatggaactacagtactgtgactaaacatggagctcaatgcagctactgcttacaactgcttaaactttgtagtttggacttcatttttttctgtaataacaacttattaaatctagttgtatgaagtactgacacttgtcatccgttgcatttgctgaggaataacttggagtatatggttcacatctgggaacattggtgcattccaatttgcttaactcttttttttgacaaatccctttaaagcagactaagtacagcagaattcaccctttctctgacacaagtaacactcgtttatgaaaaacatgcaagtatatttgcaacaaagtatttgttgacacatgtgaacacacctttttagaggtgcagttgggtttttatgccagacttgctacatgaaaccaattctcaaaatcgcaaccaaaacagtggaaaggtaggtgtgccacttcgctttatctttcacacctggctctccgatttttcagaaaatgcgtcttttaaaaatccctatcgattttgggtgtgctagaagccatgtactgactaatccatttagaaaacggatcacaagtggctgcaccagcgaatcccctgcggggccttcagaacaagcagggaccag

SEQ ID NO: 7361 - DNA, 1100 bp, Homo sapiens
aggactgatagctttccagcttattttttaaactttttatttctgtgtattcttttgaaattaagcattttctattaaaaaaatagagcttaacatgcaacacctcatttgaaaaagaagtaattctaatatatgctatctgtttcacaggttgtaggtcataaagaaggtctggatgttatggagagagctgatcctttattccttttaattggacttcctactattcctgtcatgctgatattaggcaagatgattcgctgggaggactatgtgcttagactgtggcgcaaatactcgaataaactacaaattttaaatagtatatttccaggtaaggcactgaactgtggttgtaaagtgcataccaaattgatcttgaagaacaataacatgcttttttagccatgtttgaaggtagtctaactcttctgatttattagcactaacgcactgcatttttttcctctagggataggttgtcctgttcctcgaattccagctgaggccaatcctttagcagatcatgtctctgctactcgaatcttgtgtggagcccttgtctttcctactattgctacaatagttggtaaattgatgttcagtagtgttaactctaatttacaaaggacaatcttggtaagacggctttaacattacttatattaccttgcaaaagagaatgaagtgtatttgtttttaaaaggtggggaactgtataaatattcggtctgtggctcctatgcattaagcctctatttgagcctcactatcattcaatagcttgagtggaaataaaaagaggagaaaccactgcagcagttctggccttttggaactatgttgtaggtgctttctctcctggcatatgcatgaatcatcacacctgtccctcttgccagtgggattacagtactttacgatcagaccacctggttcaaatcccatcacagaaattgtcttgctgtgaaatctaaatcaaatgtctggactttttgttcctgtagtatggtgatggtaataatcaggattattgtgaggattgtataagtactagcacatagtaagcactcatgttgtttgctattattgttactccc

SEQ ID NO: 7362 - DNA, 1343 bp, Homo sapiens
cagttattgagatattcgttgatcacctcctatttcccaggcactgtgcagagtgctgtaggacatagtggtgaacaagacagacttggtccaagctcttacagagttgacagtctagtttcagcacatagaaaaccagcagtgaataaaccaaggtgaggccttgagctctttgtttttatattaatgaggagaaaagtatgaaaacaagaagtcttaagtaaatattgaggtcattgtttttggcttaagtttattatagaaaatcaacactaatgtttttagattttaattgtcctattgatgaggctagcaccttaatcactgtttagttttgtattcatttttaaaagcaattattgaagccattttcaatagattggccattttaatgttcagcaacctgaatggttatttttgttaattaaaattaaatttttaagagatattttcaaaaccctatttattttcttgttcacagtaatgcatgtcaataataaatgtttccccttactgataagcggccactttaggagtgtagcaaatatagattgagctatgttagtttgcaataatatatgttaactttagtaattaaagactggtttctatagtatgaatgtcttaattttgagttatatgatgtttatttgaatgactgttgaacattcaaatttgtattatttggagatgaagatttgactaacagtgagccttattaagaacactactacagttctgaaggggaaatataacatctatggttatatattttaaaaacttagattataggctgtaattataaaatatattggcttttgttttcaatgtgaaagatacattaaatggacacatatcttgcaaaattttgttgtatagaacagtttttaggcagcctttactaaagttatgcaaacacacagttccccatttactacattaatgcccttgacagggagtagctgcttggttttataggtattagggctcatgaaggccggggaacaactctaatccttttggggcaggagggagggtttttttagggttgcggggagggaactgcaagtgcctgaggaccagagtggcctctagccccgaattgaacacttttaaacctaaagagccttattattattagctcgagaaataccacatgccagtcttcccaggaaggtgacctgcctgaccatgaagcaacaaaagagcataggcagacttaaagttggatagacctgggttcaaatcatagttcagctttcaataactgtatgtatgattttggctaaaggatttgactttctctcaactgcagttttcttaatctttgaaatgcaaataat

SEQ ID NO: 7363 - DNA, 2103 bp, Homo sapiens
aaaatcttatagatgtagaatattttttaaatacatgcctcttaaatattttaaaatttttcttttgattactgagagaaatttccccaatataacaatgcttaaaatgaatgatattcctatagaatcttccttccctattctgtaaaatagtcacttgtccgaagaaagttaaaagttagctcttttctaaaagcctcctagcttgacatagaaggcttcacaacatttagaaaggtaataactttttaaaaattgatcctcaaatttgctttctacttgatggtttcatgtaaatcagtggaaaacattacatttggcagatgataaagcaatgtcatcttttattagtgaaatgctggttatataaggcatggttttaatctttttataaaatttgaacatgttttttatgccaactcgtaaaatgctagaaaaccctacttatttacaatgctagaaatacagacttaccttacatcaattttgtcctaaaccgaatttctcaggattactgtggtttctttcattctgattgaattatattgacctacttcttcatagttggtttgcagtgttccatgagttttacttttcctcatcaacatattgctttaacacaacatatttatttaacacgtacaaatagggtcaacttcagatcctactgagtgtgtgacatgcttttccaacatcagctttttgtaaccacctgtataactttttattacagtgaaattgcagtcagtatgtgaaccaaaatatcttgcccctttatgaatttaaaaggcagccaatacaaagccacctttttggaaatataaaaagtaaagccttgcattcttatatagcaggtcttcataaaactctaaaatcccttgttgctaccagtctaatcttgccttaaatgttaagttattttttgaatatataaatataaacatataaacacagatgatgactggagtagacttttaaaaaaatatttttttcatgagatactattttaggtgaaattgttactgtagatttaacagctgttttgaaatatttactgttattaaaacttgcttcaagagaaattgtgaatatatttccatatacaagcactagtaacagtaagtggccctgtcatccactaactcaggcaaagtaaagaatggcatttttgaaggacattttacctccccatatgatttgattggctaggactttcttctgtaaagtcataccttttcacatcttaagtttttacatttgccattttccaaatctcaattttgggcaagaacgatatagtcacaactatggggctgctttcaaaagcggggctccatttctactgtcagatcaatgtggtgctgtaaccatctttttatccctaccttcaagaacctccttatatgaagcctgtctttatccatcagaaggtgtgtgaaatcatcacttccttctggttttatgtatttgtagactatgcagcttttcattaaactgcaagtatatacaagacagatctgaaattaggcctgagtgttccgatccaccactgtactagtaaataaaaatccacctaccttttatgtggaaaattatgtgctattgagtaacttttagctcttttttaaaaaatgggtgaaatttaagtgtcttttttatgagaatgacacatgaagagatctgagagcaatctcatgtagtcttccatgaacctgcaattgtttggtatgcgtcagcattttccaatttccaggttggatctagagctgctgttgatcactcaggcatactaatggattcatttagatgggtccaagctgcagtccatgagcaataacagactaccccagatactgcagtttacgcagtgcttagtaaatgagatttgtggaactaagttattagttacctgaggcttcttaagaaagtcttcttttttgaccagttgatgtgaaagagggagcatgtgacacagccagtatggtggagtgctagggttatcctgtttacaataaatcgcctgaatttcacctctggagtctgcatttgtattatttttccagttttagtgaaatagtacagtggccagtcctcagcctacct

SEQ ID NO: 7364 - DNA, 1173 bp, Homo sapiens
aaaaaaaagtacaaaaaggctagaaggatgtgaggtgggtgagggagagaggcttacaggccacgttcctctctctctgcttttttttttttttttttttttgagacagggtctcactctgtgtcttggtctggagtgcagtggtatactcacagctcactgcagcctcaaactcctggggtcaagtgatcctcccgcctcagcctcccaagtagctgggactataaatgtgagccatggcactggctcccctccttctgatgagagggaacttagtgctgccaatttataattagtaagtttgactgttggtcaaagttggacatgatcagaaaagtgaaatcaatgaaatacaactccaggcttctctacctcccttttctattaatgtctaaattatcatctgtaagtgtgggcagacatagcattgactttattaaaccccaaataagtttttgaacttgctgctgtctttttgaaacttcctaggaggatggtttgtttatcagcagagaaatgaagttcacaataactgtggcatcgagatatactaccaaacagacatgcaaagcacctcagagaatatgtttctggagctcttctgtcagattatctcggaaccttgcttcaacaccctgcgcaccaaggagcagttgggtgagaggaaagtggggaaatagcagggtactgtagactttgatgaattattttccctgtaaaacattttccacattttcacctaacactgtatatcaggcatggtctacttagagagacttgagaaaaccttattacagagaatccacttctaaaagataagcaatcactatcttatggacattaaagcaattatttatgagatgatactgcatattacatacatgtcaataaagagggcattttaggtgggggaaaaggatactaaggacaagcttatgggtagcaagatgagaaatgagccatccagaggagcttagattcactaaagcctgagttccttgagggcaggtattatctctcattcgtctttatatcccaagcctgggacatacagaaggcacagcaagtgttcccagttttagatactgttaaaagtcttgaggtactggcagatttgatcaatgaggaaagaagctcaaagaagccccagtaatgacagaaaggaaccagtga

SEQ ID NO: 7365 - DNA, 1191 bp, Homo sapiens
ctcaagaccttgtcacattagagcacactatttgggtttgacatatcttccacttacattcaattcatgtttggcccagtaatggaagtatgggatgaacagctgcttctgaagctaaactatgacctttccttgtatactagaagaaactaccatcagttttcaaataaagattccatattttatatggctacctatttatgttgcttgcttatggagactttggggatggctttatagcgtagaacctaaagattccaaaagacttccctgaaaactagggataactttctgagggactaaagatatcccatagtgaaggcacttatagtccatgtcagatgctgaacaaatgtagcttggacaaagaaaaagcatgcacttttatgtaaagatcggagaggaataaaccccattcttaattatataacttcagaaaggggaaagaagggaatatcctagtaatacagtttatagagaattgaaatttgattataactggacttttgaaatgatttttaaaagatttataaaattaatgaacgcatgtctctttcactagtatatgcgatctcttaacaatttccgggctgaacagcctcaccagcatgccatgtactacctccgcttgctgatgactgaagtggcctggactaaagatgagttaaaagaagctctggatggtgagactttctacttaaagcttaatgctttcttcatttttttcctaaattcattttggtttattctgatattgactgtttatacttttaaataacttgtagttctattaaagctggctgtgtatatgttttataaaaacagtggtgggcaggatggctatagttaacagtaacatatacttttaaataggtagaaggaagatattgaacattcccaacccaaacaaatgataaataaacttgagatgatggatatgcttagtaccctgatgtgatcactatacattatatgtatatataataacattatatactctatgaatatctacaattattatttgtcaattaaaaataaaatgtaaaaaaacagtggtggctttgaagtggtttttgcattcaggcaggttagccacatttactgttttcaatctggacctacaccagttaattattactacttttagatttctgcagaagggctgggttgcacatacctgtaatcctagta

SEQ ID NO: 7366 - DNA, 1126 bp, Homo sapiens
attttactgacagttctctagctttactgttttggggaaaactcagggataagctaacattttcacaggtctcaatttttctaagttcatgtaattaccacagacacatttcccagtcctttattcctgtccaccaaggatgtgactttattggagagagagggaagacatgcaaatgctgtatctgttctgtcggccgtgctcctcccattagcctaagcacagccatgcattttggcccgttcccactgctcacataccctgcatttctaacttgtcagttctgccacaccatctggggtaggcagttccttctccttcttcactactaccagtgcgcacgcacacacgcacgcatgcacacacacacacacacactcacacacacttcaggcttctttttcagacatcttcttttttttcctcataagaaatagcctcaagaattcaaccatatcctcaggaaatcatattaaccggtgttcaatatcttgatccatctcaaaaggccatatcacattgagaagtaataaaatcagctattttactgtcaacattttcttccagcccatttgcttatgtggaccccttgcactgtaacatggcctatttgtaccttgagctcctcaaagactcactcaacgagtatgcatatgcagcagagctagcaggcttgagctatgatctccaaaataccatctatgggatgtatgtaagtacccacgccttagagccttccactcatcaacattttttatattgatttgatggaagcattttttgattgagggtgtgagtttaatttcttttttttttaatctttatggctaatcatattttctcatttaatttttaagttagcttttattctaagtgttcaactacataccattcatattatgcaaattttccttgatttctttttttttaaacgtctttcatcagaatgtcatatttttctactcaaacaaaattggaccctgatttaggtttagctcttacccattctgtatttgaaatcttggtctttggcaaaggaaaatgaagtcttccttttgtaaaacctaaggttggcatatactatttccctagaaatccagatcatgaggctgcatatccatactct

SEQ ID NO: 7367 - DNA, 1137 bp, Homo sapiens
gtaggtcacttgtttgtcctaaggtgcctgagtctaagtgaaattgcacctaaaactgtaaatttaagattggcctaaaaactatgacctgcctttttctttctttctctttttttttttttttggagcattagccacatgtaacaaagtttttatagacgtaccaaattaaaaatcttaaatagactgctattgtccataatctgccttttttggtgttaattttttaaattttcactgtttatcatctctggggtagatcaactcctctgcatttacctctgttcaacattagatttttcttctgttacatagcacttattttatactccttttttcttagtagcaatggtagttttgtttctgattctgcaaaatttacatttcctatctaataagttccaaaaatctttctaaaaggctattgttttaaaatgacatctttcaagttttaattatgtttcgtacccttaggtttgcacagttttttctgtgccccttgttcgatgaaagttgcaaagacagagaggtgaatgcagttgattcagaacatgagaagaatgtgatgaatgatgcctggagactctttcaattggaaaaagctacagggaatcctaaacaccccttcagtaaatttgggacaggtttgtcaacagctgctttccttgacctcatttaaacccatggccactgcatagtattatattttatgtatatataaaatatatttatgtatatatttatgtatataacccatggcatatacagttcatggcatattttacaattcaggatagatttcaaaattccacatttctacttacatcctgttcaaatagggttctaaacgtttaaggagcagagcagttagagttgtgaatagatattaaccagcattccatatggagaagataatagattcttttattccaaagcctaccttccaaagtacttttttttgtaaaggctcactgtagtattgttgaatccacttgtcctcattgcctctacttctgctaatccagatgcatagcgtctgctatggggttagctctgtgggagataggacactgtagaagacacacaagatcccagctcttaaagtgctacaatctcctagagggagataagaaatgg

SEQ ID NO: 7368 - DNA, 1176 bp, Homo sapiens
gggttatgcggtggggtgagagtggtgtttgtgcgtgttgcagcagcagggggtgtaattgctctgtatacatactttaagtctcagtttttaacccctaatcttaccccttccttctaagatacctgatgccttcaagtcccacatttttccagcattctgtggggcatatttatattctgtatccctgattatagacacttaggttgcattccctcctctctctactttgagttatagtccgtcctctgttagctttctagcttctcaaatctggaacacacatgcttttcccctcataggtagggattcttagtttcagaattgagggcaagggaaaaatatttcatttataaaacaaagacaaggaatataatttgttctttgtaatttgtatttattgcttattgacacaggtatcaagtgacacttgggtatcaagtgatggtgataaatgttggaaatgagtttgtgtagctgtcacaattgtgttagaatacattttataggagttagaaaaaaatattaactgttaaactcatattaaactttattttagagtcatgagtggaaaattaactgttcaagaagagcagattgtagaattgattgaaaaaattggtgctgttgaggaggagctgaatagggtaagcacttaaaatgatatttactgttatgtgaaaagcaaatattgaaagaaaattttagaatgaaagatctaatattttttccttcaagattttttttttttagacggagtctcgctctgtcacccaggctggagtgcaatagcgtgatctcggctcactgtaacctctgcctcccagggtcaagcgattctcctgcctcagcctcccgagtagctgggattacaggtgtgcaccaccatgcctggctaattttttttgtatttttagtagagacagggtttcaccatgctggccaggctggtcttgaactcctgacctcatgatctgcccatctcagcctcccaaaatgctgggatgacaggcgtgagccactgcacccagctccttcagatttttttggaaaaaaaaaaaagattttattttgctgacccttatactgaaagtaagttatatcatgattttttactatcattaatcacatcaaaaaagctgacagcttatattaataaaacattacaagaaatta

SEQ ID NO: 7369 - DNA, 2556 bp, Homo sapiens
aatactcactcaaagccagtagcactccctgattgtaacaccaaaaaagtctctcagcattgccaaatgtcccctgtggcagcagaatcactccctgatgagaaccactaccctggagtaaaatctataactatgtcttagaaaataacacagaaaattaatatttctttcactctactccttccattagtgatcaaataaagaaggcatttggcgctacttgccaaattgttggctcaaacttgtgctgaaccttttttggttttctacacttaagtttttttgcctataacccagagaactttgaaaatagagtgtagttaatgtgtatctaatgttactttgtattgacttaattttcccgccttaaatccacagcataaaaaatcacatggaaaagacaaagaaaacagaggcattaacacactggagaggtctaaagtggaagaaactacagagcacttggttacaaagagcagattacctctgcgagcccagatcaacctttaattcacttgggggttggcaattttatttttaaagaaaacttaaaaataaaacctgaaaccccagaacttgagccttgtgtatagattttaaaagaatatatatatcagccgggcgcggtggctcatgcctgtaatcccagcactttgggaggctgaggcgggtggattgcttgagcccaggagtttgagaccagcctggccaacgtggcaaaacctcgtctctgttaaaaattagccgggcgtggtggcacactcctgtaatcccagctactggggaggctgaggcacgagaatcacttgaacccaggaagcggggttgcagtgagccaaaggtacaccactacactccagcctgggcaacagagcaagactcggtctcaaaaacaaaatttaaaaaagatataaggcagtactgtaaattcagttgaattttgatatctacccatttttctgtcatccctatagttcactttgtattaaattgggtttcatttgggatttgcaatgtaaatacgtatttctagttttcatataaagtagttcttttataacaaatgaaaagtatttttcttgtatattattaagtaatgaatatataagaactgtactcttctcagcttgagcttacataggtaaatatcaccaacatctgtccttagaaaggaccatctcatgttttttttcttgctatgacttgtgtattttcttgcatcctccctagacttccctatttcgctttctcctcggctcactttctccctttttatttttcaccaaaccatttgtagagctacaaaaggtatcctttcttattttcagtagtcagaattttatctagaaatcttttaacacctttttagtggttatttctaaaatcactgtcaacaataaatctaaccctagttgtatccctcctttcagtatttttcacttgttgccccaaatgtgaaagcatttcattcctttaagaggcctaactcattcaccctgacagagttcacaaaaagcccacttaagagtatacattgctattatgggagaccacccagacatctgactaatggctctgtgcccacactccaagacctgtgccttttagagaagctcacaatgatttaaggactgtttgaaacttccaattatgtctataatttatattcttttgtttacatgatgaaactttttgttgttgcttgtttgtatataatacaatgtgtacatgtatctttttctcgattcaaatcttaacccttaggactctggtatttttgatctggcaaccatatttctggaagttgagatgtttcagcttgaagaaccaaaacagaaggaatatgtacaaagaataaattttctgctcacgatgagtttagtgtgtaaagtttagagacatctgactttgatagctaaattaaaccaaaccctattgaagaattgaatatatgctacttcaagaaactaaattgatctcgtagaattatcttaataaaataatggctataatttctctgcaaaatcagatgtcagcataagcgatggataatacctaataaactgccctcagtaaatccatggttaataaatgtggtttctacattaacctgcttgctccataatttcttatctggcaatgggtatatttagagggttaggcaagctgcattcacattcccaaaataaactatgcaggtaccaccaaagaagaaggagcctagtaaacttgcaggcttttagttgcactccaaggggctatcctaggtgcaaggttagtgagaagtaggccctcacacagcctgaagtccagctttaagtcatctcattccatgactgtttaagttatctgagaatgctgatgcaactaatttcactgcctcacagaagcaaaaataaatctccagataattttaacatccagaaccataaattagctctaccaattttcatacacaatgtcgggccctcagaatgtaaccaagagtagcatcagcaaaaatggccaagtaggtagcttcaaggaccttttcctccacagaaacattgaaaaatc

SEQ ID NO: 7370 - DNA, 1225 bp, Homo sapiens
cccagctgctctggaggctgaggcaggagaatggcatggcgtgaacctgggaggcggaggttgcagtgagccgagatcgcgccactgcactccagcctaggcgacagagcaagactccatctcaaaaaaaaaataaaaataaaaataaaccagtggttcccaattaggggagatttttgctccccacccccaagaggacatttgccaacgtctggagacattttggttgcaacaacttggcgggggggtgctactggcactcggtgggtagaggccagtgaaagctgctgaacatcctacaatgcacaggacactccccaacaagaaagaatcatctggttcaaaatgtcaattttttctcaagattgagaaaccctaactgaaaaacatatatacatacatgtttttttaccactgtttttgtttcctttccagaactatttgtcaatgaagattgtaaagccaaatgtgtaacaaaggcaaaggcttcatttcaagagtcatccagcaatgagagaatcctgcctctgtagaccaacatccagtgtgattttgtgtctgagaccacaccccagtagcaggttacgccatgtcaccgagccccattgattcccagagggtcttagtcctggaaagtcaggccaacaagcaacgtttgcatcatgttatctcttaagtattaaaagttttattttctaaagtttaaatcatgtttttcaaaatatttttcaaggtggctggttccatttaaaaatcatctttttatatgtgtcttcggttctagacttcagcttttggaaattgctaaatagaattcaaaaatctctgcatcctgaggtgatatacttcatatttgtaatcaactgaaagagctgtgcattataaaatcagttagaatagttagaacaattcttatttatgcccacaaccattgctatattttgtatggatgtcataaaagtctatttaacctctgtaatgaaactaaataaaaatgtttcacctttacacctggctgtttgttgtaactgtgggtcaagtgaggaaggaggcatttttctggccttgttttttcagtgaagagaatgccctggcatacctcttggccatataccctttataaatatgctgcccaattttagccagtaggtcaaactgaatataacattgtaaataaaagctaacagttggctggacagagcggttcacgcctgtaatcccagca

SEQ ID NO: 7371 - DNA, 1177 bp, Homo sapiens
ggctataagtcagggtacttgtgccttactcatctctgagctgggtggaggtgctctggtgaacagctaatgggcatgtgatgataaagttaataatataatacatcattattattatactggcattggagcgatgcactcatgtcagatgctctctaaatatttcttcacttgacacttatagcgacactgatgggagggattattatcaccactttacagatgagaaaacttagcacagagaagtaactggtctagagtcccacagctggtaagcagcagaggtaggatttgaagctaggcatttaaagcccacaggtttccctgagcaagcatatgttctcttcttgttcttatttctagtatgtactatttatcaagccacccaccaccacccaccctggttatcctgctcagatgtcctccagcagccatactacacacagcctgggaattctgtgcacagagccccagtttttgtgaggtactcagatggatcatgaagattctgaccttgcatttgtttatttaggatgtacgaactgagctgctacttacctcaagaaaaagacctgaaaatttctgtctatgattatgacacctttacccgggatgaaaaagtaggagaaacaattattgatctggaaaaccgattcctttcccgctttgggtcccactgcggcataccagaggagtactgtgtgtaagttgctttgactgtacaagaggcactttgctgcctctgacattggcacctggggaggcctaggccctctaccttagtgccttccttcactgagccactgctcctatcactcaggtatggatttcaatcgcaggattattctagggaatctccgggccacctcatggcccctattcacatcacagtgtgtgtaaaatggtggcagctggagcagtgctgtgcgctggggaatggcacagttagcagcccagagaccagttcccttgctccccgtcattgagcccctcctggatgtcaaggactgaggactggcaacgtttgatagcagggatttcctgtccttgggaaatagggattctttgtgccctctacttaattttgtgactccctcttcccctgcctggtatacagtgtctttccacagtatctgattaagacatagcttgcaatttctagtttatgagtttgcct

SEQ ID NO: 7372 - DNA, 1169 bp, Homo sapiens
gccccaggacaacaatggcctggtaagagtttgggtgtggggccttctcctgtagcaagataattacagtcatcagccacaataattgtcatgttctttctttctgggcgtctgttatctcactaggggaaagatactccatcaaaacaatgtattcaggaggattgtccccatggggatttatctaagagcttgcggggggcttaaggtcccctggttcatccttctcattttacaggtgtgagccaggactcccccccgccccctgccaccacccctgcacccacacaactggctgcatgccacccaaaggagagcattgctcccttgtcttaggcacggggtgccatggcggccaccttgtcatcagctgggagtgggtgtggaggcgagctgagtctgtccctgaacttgacttcaccttgcgccctacaatgatgtaacatcccgtctattttgtcccacagtgtgacccttacataaaaataacactgggcaaaaaagtcattgaagaccgagatcactacattcccaacactctcaacccagtctttggcaggtaatatacattcttaaatgtttttctggccttcatttctccacggaacatgcatgaagactctaatatgtgtccaaccctgtcctaggctctgaaactgtgtttgtgaactagataaacattctagacaggggagcaggtaataaatagataaacccaaaataaaagaacttcacagaagtgaagaagcttggttctgatagcttgcagggtagacagacagcattagtactagtgttataggagcacaggccagttggagtttttccggggacccccctcccacctggctgtctgcggagctgtttatataaaacatctcaaaaaaatctcgcaactctgaggtgctattattattcctattttatttttttttaagacagagtcttgctgtcacccatgctggagtgcagtggcgtgatctcggctcactgcaagctccgcctcctgggttcacgccattctcctgcctcagcctcccgagtagctgggactacaggcaactgccaccacgcccggctaattttttttgtatttttagtagagacggggtttcaccgtgttagccagggtggtctcaatctcctgaccttgtgatctgcccgcctcg

SEQ ID NO: 7373 - DNA, 1152 bp, Homo sapiens
atgtatatgtaatgtacatgtaatgtgcatgtattaccacttcctcaattcaggccttgtatctgggtaaatggagggaatgcctcaaaaataactatgctgttgctgggggctggaggctgtgtctctgagtgacagtgtcacactccggaaactcatggcattactctgtgatgtccatggaaattcttaacaaatgggctgagcactatcacaagaaaagtgagaaataagtcttcggggaaaattggtcaagtgctagccagataacatggacatgtgtacatggccatctcaacaattaccttccaattccagtgcttaagcagtatgtcaacagcactcagcaaaatggcttctccagcgacagtgcatgtatgtatgataagcaaatgcatgaggctgcctgggactgtgggaccttggcctaaagacttgaattattcttacaactctttccattagtagattttggagtgaaaagtgatctttaaacaaacgtgattgttttaagcctaaaagaagaatcttctgtgccatttaatgatttgattcccattgcaagtttattattagatataataaagcaagtcacatcagttgcttccataacctttccacatgaactaatgatcatgtaggcatgaataaattctcccatactaattctaaagtttaaaatcagcaacttgtcttaaataatgccttttaggccgggcacagtggcttacgcctgtaatcccagcactttgggaggctgaggcaggtggatcacctgaggtcaggagtttgcgaccagcctggccaacatggtgaaaccccgtctctactaaaaatacaaaaaattagccaggtgtggtggcaggcgcctgtaatcccagctactcgggaggctgaggcaggagaatcgcttgaacctgggaggcggaggttgcagggagccgagatcatgccattgcactctagcctgagcaacaagagcaaaacttagtctgaaaaaaaaaaaagccttttaaatcatgaactattattttccttgaaatggtttgaattgtgaacaaacagattctaaaaatctgatctcaggaaccattgagaatgtaagagtactttggaaataaaatcactctctccaaaatctcaattcagctg

SEQ ID NO: 7374 - DNA, 1104 bp, Homo sapiens
caggagaattgcttgaacccaggaggcagaggttgcagtgagccgagattacgccactgcactccagcctgggcaacagagcgaggctctgtctcaaaacaaagaaacaaacaaccatgtgtcttgaatgttttacccattctctgatgggttctatcccatgtaacccctcataaagagagttgcaccatttcataatattaagttgaaccataagaaattgctgagattcaaccactttgacctataacaacagcaatttcacatgattgaacctagtactattccctaatagtaaaaacaaaaggtagtttaaactaatttttatttagcagttgtgaataaataaagattagagatttttctgagtgaaatggatctctaagatggtatctaagtaaaggtgtgaatgccatagttaaatgaggaactatattggaccctttgcctcttactgacactatggcttacctctcttctttgtttttatttttgttttgtaagaacggcgataaagcagcatcacccagcgagttgacttgtcctccaggttgggaatgggaagatgatgcatggtcttatgacataaatcgagcggtggatgagaaaggtaacattgtacatctgtgacctgattggggctctgcagcagggccttggttaaccaggataaagtttccttgggagggaggggcctcacttctgttggtctatggcaggagtccccagcccccaggccagactggtaccagttcatggccttttaggaacaaggccgcacagcaggaggtgagcggcgggcaagtgagcattaccacctgagctctgcctcctgtcagatccgtggcagcattagattctcctaagagtgcgaaccctattgtgaactgcacgtgagaggggtctaggttgtgtgctcctcatgggaatctagccatcctccctctaccccacaaccctgtccatagaaaaattgtctcccatggaaccggtccttggtgacagaaaggttggggaccgctggtctgtggcatctgggtcatgtggtaccgtctgtgactaaccaaatgtagaatccaagggaaaggcaagtgtatggacaag

SEQ ID NO: 7375 - DNA, 1475 bp, Homo sapiens
ccttctctataagcaaaaatagttaatatggtaccctccactccttgtaccattgatttgcctggaggaatattcagaagacagcatctactgtgtatttacaattaccaagattttttttgagctcttatttctatagtttgtatcatgaaaacagtaggcttcatttttttggttatttttcatatttgaaacatacaattataatatcaagtatacttttcctaactgcacttgcattttctccccgttttgtttgagaggcactagcgtcatagaaagaacaaggatacagaaatagacatgtgagttcagatcttggttttgtacttgccagctctgtgactctgaacaaatttgttaacctttatagccttagagacaatactagacttctccagacccctgttctaaatcttagtttcttttttttttttttaaacatataagctaaacctgagtttccacatcagtaaaatcaggataggaatagtgagaattaaatgtaaatatgtatgtaaattgcctcgcatagtgcctagtatatagtaggtgttcggtaaatggttacttattgatcagacctttgattcttttggagatttggagattcgaataatactaacattaatatcatctataggctgggcatggtggctcacgcctataatcccaccactttgggaggccaaggcaggcagatcacctggggtcaggagtttgagaccagcctggccaacacagtgaaaccccatctctactaaaaatacaaaaattagccgagtgtgacggcacgcatctgtaatcccagctattcgggaggctgaggcactagaatcgcttgaacccgaaaggtggaggttgcagtgagccaagattgcgccactgtactccggcctgggtgacagagtgagcctctgtctcaaaaaaaaaaaaatcatctatagtagaaaatctgtagctttcaaatatatctcagtgctgttaaggatctttctctgtactttatttcccatttaggggagatagtgatcagacctatacatttatgtgtattttcatagatgggcgtttgagtgtttctgcagatgagttcaaaaagttgaagtttttctagagaatttccacagagctgaaactcataaaacgttacagtcagattcaaagtagctgactaaaatttttctttgaagttcaagagttagtttctccacttttggaatgtgaaatacaaacttggtagaaattataatttttaaaatttttatttattttttattttttgagacagagtctcattttgccacccaggctggagtgcaatggcgcaatctcagctcactgcaacctccacctgggttcaagtaattctcctgcctcagcctcccaagtatttgggattacaggcacctgccacgacgccctgctgatttttgtattattaatagagacggggtttcaacatgttggccagg

SEQ ID NO: 7376 - DNA, 1137 bp, Homo sapiens
ctcttccccagtggctgtagctcctagcctaacaatgtctcctaagtagggctaccttataacttcaagcagaacttggagagacaccatttagtctcagaatgtattataaatggtgtaaagcagagatttttagtatattccaaaccagggaatagctatctctttcccttctccttcttcccccttaaaaaaggtggatagggaggagtaattctaatcaacaacttcttaagctgctcttcattcacctatacctcagcgttggctttgctccttggataaaccaaatcctcagccataagctgcctcgtttattaacatttcatggtgcttaggtgaattcttgctacgatggtacaataaatattttcttcatgtgctaataaaaaaatgtgagcatccagtcaagagaactagacagtctgtatcagctgtaatggtcttgttctgggccttttccagatgcaggcatgtactttagactttgaaaatgaaaaactcgaccgtcaacatgtgcagcatcaattgcatgtaattcttaaggagctccgaaaagcaagaaatcaaataacacagttggaatccttggtgagtctggaatgattaaactaaaatttgtcttcgtcttccatttatataccaaatcagttccgaacttaggaggatacagcttaacacacagctagctgtatctcaaatcagtaggtagagcctctgcctcatttgaagcaactgccctttgagcatcaattcagaggacatgaaagagggacatgatcacatctggaaacattcccccaactaccccagctgctgtgatgctggaggcactaaatagtgcctgagctggggtcaaaagggtagaatagagggtagtcacagaatcctgaactgaaattgtgtttatctattaaaaaagaaagaaaggctgggcacgatggcttatacctttaatcccagcgctttgggaggccaaggcaggcggatcatgaggtcaggagttggagaccagcctgaccaacatggtgaaaccctgtctctactaaaaatacaaaaaattagccgggcgtggtggcgggtgcctgtaacctcagctacttgggaggccgaggcaggagaatcacttgaacccgg

SEQ ID NO: 7377 - DNA, 1755 bp, Homo sapiens
ttgagaccagcctgggcaacatagaattaattttttgtagaattttctatttctacaaaaaatagaaatattatctggacgtggtgacatgtgcctgtagtcccagctacttaggaggctgaggtgagaggattgcttaagcctgggaggtcgaggctgcagtgagccatgtttgtgccactacactctggcctgggtgacagagtgagactgcctcaaaaaaagaaaaaaaaaaagctgaacattggccctatttacaaattctattatttgaaacttatttttcagaaacagcttcatgagtttgccatcacagagccattagtcactttccaaggagagactgaaaacagagaaaaagttgccgcctcaccaaaaagtcccactgctgcactcaatgaaagcctggtggaatgtcccaagtgcaatatacagtatccagccactgagcatcgcgatctgcttgtccatgtggaatactgttcaaagtagcaaaataagtatttgttttgatattaaaagattcaatactgtattttctgttagcttgtgggcattttgaattatatatttcacattttgcataaaactgcctatctacctttgacactccagcatgctagtgaatcatgtatcttttaggctgctgtgcatttctcttggcagtgatacctccctgacatggttcatcatcaggctgcaatgacagaatgtggtgagcagcgtctactgagactactaacattttgcactgtcaaaatacttggtgaggaaaagatagctcaggttattgctaatgggttaatgcaccagcaagcaaaatattttatgttttgggggttttgaaaaatcaaagataattaaccaaggatcttaactgtgttcgcattttttatccaagcacttagaaaacctacaatcctaattttgatgtccattgttaagaggtggtgatagatactattttttttttcatattgtatagcggttattagaaaagttggggattttcttgatctttattgctgcttaccattgaaacttaacccagctgtgttccccaactctgttctgcgcacgaaacagtatctgtttgaggcataatcttaagtggccacacacaatgttttctcttatgttatctggcagtaactgtaacttgaattacattagcacattctgcttagctaaaattgttaaaataaactttaataaacccatgtagccctctcatttgattgacagtattttagttatttttggcattcttaaagctgggcaatgtaatgatcagatctttgtttgtctgaacaggtatttttatacatgctttttgtaaaccaaaaacttttaaatttcttcaggttttctaacatgcttaccactgggctactgtaaatgagaaaagaataaaattatttaatgttttaatatgtctagtgtattcgtgtatatatagatattctaagattcttgtttaaaaaaacaaatgtgttggacataatcaaaattcaagattttcacaataaaatatttaagacataattcaaagcacattatcaaaaaagtgaaaatacaaccaacagaaagagaaaaaatattttcaaaccatgtatctgataagggtctagtatccagaatatataaagcaccattacaactcaataaatagatattctaagattcttacccccaaggacttatcaggggttacagattaacactcagtgtaagatgataaggcagttaaggata

SEQ ID NO: 7378 - DNA, 3352 bp, Homo sapiens
ttttcctcattctcagaggagtccttggttctaccgccatgatgcttatatactatgcttaccagacaatgtccctcgctgatgccacagttatcacgtttagcagtccagtgtttacgtccatatttgcttggatatgtctcaaggaaaaatatagcccttgggatgctcttttcaccgtgttcacaatcactggagtgatccttatcgtgagaccaccatttttgtttggttccgacacttcggggatggaagaaagctattcaggccaccttaagggaacattcgcagcaattggaagtgccgtatttgctgcatcgactctagttatcctaagaaaaatgggaaaatctgtggactactttctgagcatttggtattatgtagtacttggcctcgttgaaagtgtcatcatcctctctgtattaggagagtggagtctgccttactgtgggttggacaggctatttctcatattcattgggctctttggtttggggggtcagatatttatcacaaaagcacttcaaatagaaaaagcagggccagtagcaataatgaagacaatggatgtggtctttgcttttatctttcagattattttctttaataatgtgccaacgtggtggacagtgggtggtgctctctgcgtagtagccagtaatgttggagcggccattcgtaaatggtaccaaagttccaaatgaagcatcattgctgaaatacatatttttttcaagtacaccatcacctaattcacatacagcatacgcacacatctggaaaatctgcattttcttcattggttgtatttaataaattgcctaaagtaccatttttgaatatagtatgtctttagttaagaatagctagtctgtttggtgtaacaattttttggtagctttggttttggttttggttttttttgttgttgttgttggggtcaagttggtgagaggagagctcattgtttgaagaaaaaccaaaacattttatggctagtaatatttatgtaatttttaaaatgtatttttggtactgatgggatatgggtggggaggctattttagatattcttttagcagtgtagagcctaagaaacttggttctactaccatgatctttataaactatgccttccagacaattgataatgctgctataattagtattatgttgataattcatttgcaaccttattctatttaggaggatgaagttgaagcttagaataggtgcctgcttaatggtgttaataatacaaatgaattggccttattttcaaggattttataaatgattatcatacttgtaactcatatttgtgccttttcattttaatgctggaatttttattatgtcacctctaaaacacttaaattgccaaatttggctagtagttttgtttcagtggcattagcaactgcagctagcatactataattttaattgtcctcacttttttttgaaactgcactaaatttttcttaacattccaagatttcagatctctaaatcacaaagagaaatcttggcatgaccagtgtgcacgtttccatcctgaagtgttttctcttcactagaaatgtgattttctataaattccccttgaatttatagtgtgatgccaaataaaattttctcaggatcttattaggttgaaccatatgtaattgccaagattttactattttaacttagaaaaaccatcgtttcatatgattcaccctaatagatacctccattattctctaaatgaaatagaagactttggagtatatgtttttaaagtaattttttaaaatatggtaatgtattaaacttatttttatagttatgaaattatgtgtaataatgctttatgttatacattaaatgtaaagacttgtgaatccatgtttgattgactttcatagtttcctgcattgaaataaaatcactatgaattctagtttatcagcatgatgttaaatgtcagtgccataccatgatgcagcaccatgacactaacgccatgaattcaaacagcacgttttacacctggaacttcatcagaccaatactttgcagttagagagaatttaatatctagaaaagcttgggaggttagtcaggacttagggagtatacataaatggttacttgttgtaatgagccctttattggtgaggttgcaatagcttccagctcttactgtgtcagatgaagcatctgtcattatcttaagcctgcagagttgaaaggttataggctctttcctaccctctcatcataatttttccaaagcaaagaggaacttggcttctggggttcgtgccttagtgagaaagaatcttttccaatagttccaatgggggaatttttggcttgctgattttatcaattgccttgacacctgacaaaccctaaatgaagtctatgtaggtgagtcatctctgttccacctgatttacagtattggaatttagacttgcaaaaacatcattctgcaaatatcttagataattacagaatcaggagcatttgagaactctagaggtctcagaaatcatcacataggggccatgcttcgtagatagggatgatagagaggagacctgcccaagttgaatttccatggccttcctcccttccttagttccatgataaagtatggacagtaaaccactacttgagctacctaaggtgaattaactctcagggaaccctcttccagttctttaccttgcacagtgaaagaatcagtggcacctagaaagttaaatccctttaggcccatacactagagacatgttttgtttgaacaatgtagtttaagtacttgaatgtcacactatataactgaggttagagaaaatgtttcttctagcccttacagggtgtgattcttaaacacaatgtccaaggtgtatacaaggatatgtattgtaacaactatgggtatgtatattttgcagagcgtagtttctatatcttgaaaaggaaaatattttcataaattgtttttataagtactaataaaataatatgaaagaaagctatatgttggttgttatgattatagcaaatatataacttatttccctttcaaccctatgcttcaaaatatattttctgtaggagattgacctctagccattcagctgggatataatctcaaagtttaaactgtctgacccacttgtactatcaagagggtcagatgaacagtgtaatctgtttatctctccaaaataaaggcattagtcttctgtgttagtgagaccttcattcttctagatcctgagaacttaaagtagctttgaactctgtactttttgttcctgtagctaatccgttactaaatcctgaa

SEQ ID NO: 7379 - DNA, 1142 bp, Homo sapiens
tagcatttctttccataatcacaccattagaatgaagttttcacctacttcacaaggttgtgaggcggtaggaaaaagatctaagcgtgttgtatattaaagtgcttggcaaacactatttaaacctccctgcaagtataacttttctcctcttactccatgctctaaaggattcagagtgaggcacctggaggaaaaacagacacaaaactacagaggaggcaacaaaacaaaaccagaggcaccctgttttcctttcataaatgctgcaagcgcagtcgaacccgctatggaaacccgacgctttggtttgcctttcagggtgctggcatgaatgaataataacttcattttcaacttgagattagataacttttatcaccaacacctacttcattttatccctatgttttaatagaataaggaatagagaatcaatttgttggtagaccatgctgagtagcttagcttcagaaagatttagcaccaaattataaatggtgacactttaatagtgagtgtgatgtgcattgggagccagcctgtgggagtttggcagttggaaagccccatagcttcattttttccagatttttgtacccttccatcagatagtaactccttagccttgagaaactctcttccaggacaaggggaaagtttatttgagttctaaattgtttaatagcaaatgcattatttgtctctttaatgagaccaagaaaatggcttcagaccctggttgaaccagccagttctccttttgatggccacaaaccaaatatgggcagtgtaatgatggtatgactctggcctgactaatatttttgtgaggagaatgccattattatggtgaccatattttccaaacaaaaaattgggaactttttattcagaggaaagaggggcagaatatttgaaattgagactgacccaggaaatccagaatgaatggtcttggtagctattgatcacagcataaaggaaaaagaatgtgaatgaaccagtgcaaatctaattggttgctagaaaagtcaggagcctcaaaatgaatgacttgctagtggtggcaaagaatcaccatctacatgcaaagaaaacacattagatgccctgagaatccagtgactgtttttctcaga

SEQ ID NO: 7380 - DNA, 1194 bp, Homo sapiens
gttgttaacttaggatcttttctttttatacaaggaaagcttcctaagaatgtctaggaagaagaggaagaatgaccctttgcatggcacagggttctgcccctattctgaatatgtcattccatcaaggagatcaaaagcctttttttctccccagtatttggaaattactttcttgatgatgctgccttttaaaagcttcacgtacattatagttttttaaaaaaatctttggactggatcttactgaagtgcagttgctatattaaaattagggcatagagcacagaaaaatcaagaccatgagaagacattttaccatttagctactttttataactaaatactctttaaatatttttatttcaatactgtggatggaaatgagaagcattctaaatttgagttaatatatttttatgaagatatttgagaaaagaaaaaaatagcttgtattcaggttcattggcttttgctggatgatccacctaaagaagttacctaatttggccttttaaaaaaggtgttagtgtttattatagctactttcaaggaaagtttgaatatgattctagtctctaaagttcttcacgttttctgacattccctggagggtgactggggaagaattgctccagggtagaagaaccaggcccaagactttaccattctgatctagagacaaaggatactcaatgaggagcttttttcccctcttggaacaggtaaaatgctttttcttattaatataattataaaacagtattttatgtaacagctattcccatattctaggagtggcctaagaaatgcgtgtttcagtgactagattataaatattctctattgtgaatagttgaataaaacagctgtttttttctgcttcctattcttgtgatatgataattttttgaaaaaagcacagcagtccaactaaagagatctcttactgtttgaaagtcatagcagccagttattttactctggagcttagagttcttttttcacatgaagtaaacgaaagtagaaaattcctttaccattccagcagagtgagaggatatgagcttaacagtgtatgtcagtcttttagcatattatatatgatttttaaaagtggttctgaggtcacattttttaaggcttgattatttaatgagaaaggtatgattcagcatatgaatatttgctttt

SEQ ID NO: 7381 - DNA, 1135 bp, Homo sapiens
tctagttatactcttctttatattttaaaatgtaaaagttaaattattattgactgtagtcaccctgttgtgctaccaaatattaggtcttattatttctactttttgtactcattatttcaaatatttttaatttttattcatttttattatttccccttttgtatggtgctgataacatctcattctaaaagttgtgggctataactgaaacttcaaccctaagaaatacaaatgctacctttatatttttacttttaaaattatttgagatagattcttacagtttttaaaagaaaataaattctgaaatgctgcggacaactgtgagtttatcatttggtctggtctgggaaaatctcaagatattttcaccttttgagatttggcattatttatataggaagtcaaaagataaggtaaaggagtatatggggacagtattccttgaaaaacaagaatgtttaatactcatatttttctgttcatgttttaattttagattttaacacctttcttattgagaagactgaagtctgatgttgctcttgaagttcctcctaaacgagaagtagtcgtttatgctccactttcaaagaagcaggagatcttttatacagccattgtgaaccgtacaattgcaaacatgtttggatccagtgaggtatagtggttttgaaatgtactgtaaatgaaacttgacatataaaatttctcttttttccctttttttttgagagaaggtgtcgctctgtcacccaggctgtggtgcagtggcacaatcactgctcactgcagcctttacctgcctggctaaattttttgtatttttttgtagagactggcatttcgccatgtttcccaggttggtctcagactcctgggcttaagcagtccacccaccttggcctcccaaagtgctgggattccaggttttagcaattgtgcctggcctaaattccagttttaaggtccccttgttcatttttaggacttgggtgaatttctaactggggtataaggcataaggcttagtggcaaaagttgtttcctagtatctggagtcctgctaaaatgttaagtgataatctttgtattaattgctttacagtcatctggaatacttactaaaaat

SEQ ID NO: 7382 - DNA, 1154 bp, Homo sapiens
gtagctctctcatgagggaatttcaccagaaggtgaaaaagtctttgtccacaatatttagattacttatcagctcctgtattttctcttaatttctggtaagaattctagcagtagtttacatatacatttagttggaaataactcacttataaagaataagcctgagtatgtacccattaagtttgacataattgttttctttcacaatgactttgagagaggagtgttgaggttagatcaaagttatatttgtactttgtttttgtgaaattgctggttttacattctagagtatgtctttgagtaataactatcttctgattttacaaagattgaataacaggtcagtttttaagttttttaagtgacttggctttgaaaattgaactttccaaatggcttttgttttaacaaagcaaataacagttttctctctattttttcttcctttgcccctccttaagatcgatgaagaattggtaacaaattctgggaagttcttgattttggatcgaatgctgccagaactaaaaaaaagaggtcacaaggtggtacttttgattggaattttggattgttcaattatttttttatcaatcattagaaatattaagatatgtttaatttcaggtgctgcttttttcacaaatgacaagcatgttggacattttgatggattactgccatctcagagatttcaacttcagcaggcttgatgggtccatgtcttactcagagagagaaaaaaacgtaagactacttatgtcatacataccaaactattcttttataattcctatcttgatttctgaagtaatattccaaatagacccacaaattgataaaaagatagaaatgaccagaaaccctgtggttttatcaaaaacaaacattttgatttagtactaagaagtcttaatttttgattcacaaatatatatatcttctggcacaatcttattaataatatcctacttaaccatcactgtaagaatattgggatagcaggaaattttttgcctttttgccctgtcctcaactttctattatgaaaatatcaactatatggcaaagttgaaaaaaaaaaagcaactgtaaatccgcctacaatctgctgttaacatttgactatacctttttaaaaacacatt

SEQ ID NO: 7383 - DNA, 1314 bp, Homo sapiens
cgattttgactagcaaactgatgctttagattgtatgctcccaagagtctgattctagttgttgtattaagaatagtgtacctttttgctttcactgctattaaatcttggtgattaaggaagagagtgccctgtattactgtgagttttataattttggacagatgactcacttctcataacatcatattggatgtttcttttacgatttcttcttcttatacttctaaaatgtacctgttttaatgtttttcccttagatcaaatgaatgcttcaggaccaattaaagagaagatggggatattcaagatattagaaaattctgaagattccagtcctgaatgtttgttttaaagtggagctcaagaatagcttttaaaagttcttatttacatctagtgatttccctgtattgggtttgaaatactgattgtccacttcaccttttttattatatcagttgacatgtaactagtaccatgcgtacttaaatagatggtaattttctgagccttaccaagaacaaagaagtatccatattaagtttagattttcagttaatttttgagactgagtagtattcttggatacaggctgatgtgtacttaaccacttccagatttatacagtcttcctgtggaagtttagtaaatgtctttttccctcctttcttctagtaatgcagttcatgggctttaggtacttcagttatgaagtaggcttttcatggggagagattgggattatgctctctgttgtttaagaaactgtttgattttagagtctatttctatgagatagtttaccaaataaatgttccttataagatgatctcattaaattatttcttcaggaatagcttaggtgcaataatagcaaaagacttggctgtcggtaggatttggttattttgttttcttggtttcattcactagtactataggagtgtgtcatatagagatttcaagtggacattgtgttagcacaagagaagtttctgaatgaaactttagggtcttgagaaacgactagaaattggaaatggtagtgtatcatgcaaaacaagacagaccctgaaaatttatagtagtgggttaactagaaccaaatataagagaataggccttaggaatatgtaagtaatgcacaatctgtaatagaacagcataaaggccaaaagaggcacaatttagaccctgtgtgaaaggatatcagacaatgaggaagagaaatcctgaatgtaccctggagaggggacatactccataagccatacatttctgtgttagtgtttatttcatggaaaaatattg

SEQ ID NO: 7384 - DNA, 1143 bp, Homo sapiens
atgaacatgtaaaatgagaaaaatcagggctgccctgttgaagtaggaggggtttttggaaaaatgtctctggaccctgggaaggagaagcaagtcccttatgattggaggccagttgggaggccctggtttcccctgtgatgggttcctggggagaagccccaggcccctgctcaggaaggatggtgccacctgctcaggtgccacctgcaggtgcttgtcactgatggagtcccttccctcccttgcttctgtagtggtgtgtttgtgaagctgcgggaccgtcaccgccaccctgagtgttatgtgtgcactgactgtggcaccaacctgaaacagaagggccatttctttgtggaggatcaaatctactgtgagaagcatgcccgggagcgagtcacaccacctgagggttatgaagtggtcactgtgttccccaagtgagccagcagatctgaccactgttctccagcaggcctctgctgcagctttttctctcagtgttctggccctctcctctcttgaaagttctctgcttactttggttttccctctgcttgtaaaacattgagtcccctccctgccttggttaattgactcacaccagctgtgcgatgcccgcttttacaattaaaggaaaactgttttgttcagtgtcaccttgtcagcaacactgtgtcccttcgccccaccgttcttctctgctgcatttggacatcagccaaatttgaacccaatcaaatataacgtgtctgacactgattttgtttttactcaataaatgtatagactacaaagcagtgtggtgtctgttatctgattatgtgtcccatttcctactcaagcctgatgagatttctgaggcctgtcttcttgttttgggtttcttgtttctctcagatttactggcctttcccccgcaacttgcatcttaacaagctctgttcttacatttcttcgaagcttgcttgaaatcctctttctgtaaagctaatataagatacctagctctgttttttttttgtttttggagacggagtctcgctatgtcgcccaggctgaagtgcagtggcgctatctcggctcactgcaagctccacctcctgggttcacgccatcctcctgcctcagcttccggagtag

SEQ ID NO: 7385 - DNA, 1181 bp, Homo sapiens
ggtaaaggcaagccccaaactccttatcttttgcagtctctctgggatcagtaaaagaaaaaaaaaataatgtgcttaagaagtgggactgtaaatatgtatatttaactttgtatagcccatgtacctaccttgtatagaaaaataattttaaaaatttgaatggaagggggtaaaggaagtcatgaagtttttttgcatttttatttaaatgaaggaattccaaataactcacctacagatttttagcacaaaaatagccattgtaaagtgttaaaatttacgataagtattctattggggaggaaaggtaactctgatctcagttacagtttttttttcctttttaatttcattattttgggtttttggtttttgcagtcctatttatctgcagtcgtattaagtcctattgctagaataggttactacaaaaaaggttatattctgaaagaaaaataactgacattatatataaccaattaatttaaagtattgccatttaaattacacactgagagcatgtcctatgcagacatagatttttctgttcatttatttttcttcattgcagtggattgatttgataaatagatgtgttgaattactacatttgctgtacatattatttaataaactttattcagaattgcgtggcatatgtttgttctggtcattcattgtttctttcctccctttgccaagcttctcaaatgaagcttaaattcactgcttcaatttcttataccctcctttccatccttaatcatttaccatctgccttctgccgcctccttgaagacaccacttcttaccttacttttttctcaataacctaactcctgaccctctgaattaattgattactgttgaccattttgccattatttctaaaatatgttcgtatttgttctgataacaaaagtgatgcacaaatgtctttaaaaacaaaagtaaaacattataaaatatgtataatgggtctagatttgctttataaaacatgggtatgggaaatgacatagcactttgtttttctaaatcaaattaatctggctatgagtcctctcttggtatgggtgggcgaaaatgcaatctgtcctttttctcctccaaaccaaatgtgttaaggcactaggcatgcagtctcccctggcatcccgtggctacaactactgcca

SEQ ID NO: 7386 - DNA, 1222 bp, Homo sapiens
gacatttcacaattaccttcatttttatttgagatcagagaatttcacagttaacaaatgttcttcctttttttgaaagaaacttaattactcatcacagcaggtacatgtcttgcctctatgacagttgaaagaggcaaaaatatgtccttaataacagtgtgttccagtgctgaggtgagagtgcctccaggtatgacagctagtggatgttggaggtcttaggtgagatattgagggaaaggaccaccatgggccagggacgctgaacaacccatgcatctttatttgagctactctttgtagagaaaagctggcctgtttaacactacctggtcagctcctatgatgtggatcaggtgctcctgtgacctactgagacagatcccagtgggatggccactggtgagtttgcaggatgctgggggttggaataggaaggaagggcagtcagttaggtaagcaggcccaggattagggaaccagatcagccacaggaggctggctgtctagactcccctgtccaaggggacacagtgacattctgagtcccagaacctgaatcccatctggtaggcaggaagggctctgtagtggaagtcctcagggaagcagatggcatcaggtagcaggacacttatgtattcaacaaatatgtattaatgcctgctctgtgccaaggcactgttctggggattcagtggtcgtaagatagactgtgcctatgcctccctggatcttagatttgagtgggaatgatacataagaatgtgagctccatgaggacaggggtctttgcttgtcttgtcttgttcactgttgtatcctcagctcttagaagagcacctcacacctgatgggtgttcactaagtattgtgagcaatacttatgaaggaagcaaacaaataactaaatagacaatataatttcaggtggtaatgagtggtatgaaaacagtaaaacaaggtgaagggctggcggggctctttttgaaagaatggtctaaaaaggcttctatgtatgtgagagagaaaaagaaggagattggttttgtgcagagacctgagtggagtaaaggaaccaggggaggagaagtgttcaggcagagggaatagcaagtgaaaagaaaggcctttgacgtaggataagcttggcttagtagaggagcagtttggctggacttgggctggggggtgttcatagggagggagagtgatgtga

SEQ ID NO: 7387 - DNA, 1353 bp, Homo sapiens
gcccggggaccagtaggacttgagggactgcttactactaagtggctgctgcgagggaaggaccacgtggtctcagatttctcagagcatggaagtttaaaatatcttcatgagaacctccctattcctcagagaaacaccaactgaaaagagccaggaaaacccgggaattttccaaaaggtcttcacgttaaacttgtcttatctcaggagagagcccgctcttgtctcccagttcctggtagggtctgcctgttggaaagtgtacctggatgcttctgggctccgtttggcaatagcagtcttggctgatgtgcacagtctggctcccagctcaccctttttttttaaagtaagaaaatagttgctaccgatagggactttgccaagtccaattatcttctaggattgaaaggtgcattttccccataaaaaaggcgaggaaaacccatggctgctttgtgtcacctcagtgacttacagtcccccttggcatttagttggtactagagccagtcatccttaacaaatcttttcacattttatttctttcacatgtagtcatcttcaaaaaggaaagatttggaattttagaaaaggggcaactcttctttttagcattctcatcagaaagtcacaaaaatcgatggaatcatttccactgggaagattgaccttttgtatttatttgtggggtaaattaataagcattccagatgcttgcagcttcctgcatccaggagatgctgtgttccccgtgatgcagctggaacccaagctgcagcaggagatgcaagtttcaggatgttccccactgagctggaggaatatctacagcagtgatgcttgaaatttttgtatgaattattttgtcgtcctacccttttcctccaaaacaaaaattagaggattattttaatactttggattcttcccccttttttgagaaataaagttttttatgaaaagcctgtgcgtgattgaagttttctcccttaattgttgttacccccttccttttcctctcttgtgaccctcgtgccctgcttgtgggcatggtctcttctctggaagctgtctggggagacaagacatctgcctcaacagtgtttgttggtggaagcaacataggcagtccccacagagggactcagacggagagacaggaaaggaaaacaggagattaagccccaagagcttgaagactaaaagtgcagtgaaggtctgaagttggtggggtccaacctgagcgagctcccgcggtggcacatagccccagctgacatccttagttcactgcatccccccagctcctccctgccagtcctgttgcctcaggatcacttgacagct

SEQ ID NO: 7388 - DNA, 1172 bp, Homo sapiens
ctttatggagatgtaattcacataccatacaattcacttatttgaagtttacaattctgtcctggcgtggtggctcacacctataatcccaacactttgggaggccaaagcgggaggatcacttgagcccaggaattcaagatcaacctgggtaatatagtgagtccctgtttctacaaaaaatagaaaagtcagctggacatggtggtatgcgcctgcggttccagctactcggggctgaagcagaaggttcacttggagctgggagttccaggctgcagtgagctgttatcgtgccactgcactccagcctgggtgacagagcgagaccctatctcaaaaataaataaataaataaaagtttacaattcagtgatttttagtatattcacataattgtgcaaccaaaaccacagtcatttgtagaacactttccctttcatcacccaaataagaaattccataaccattagcagtcactccccacttctacccaaactccccatccctaggcagtctccagtatattttctgtttctatggattaacctgttctggaaattttatttaaatggcatcatatactatggtggccctttgtgaccggcttttttcacttagcatgttttcaaggttcatccattttacagcatgtatcaatacttcatttgtttttattgctgaataatattccactctgtggatgtaccatgttttatttatcagttcatctattgatggacattagctgtgaacattcatgacacgtttttgtgtgaacatgtttttatttcatctaagagtggaattgcagggtcatatggtaactctgtttaaaagacttttgaggagctactagactgttttccaaagtaaggccccttgtaccatttcacattctcaccagcattgtatgaaggttctaatgtgtttacatcattgctgttattcagttgtttttttttttttttttttttttgaggcagagccttatcctgtcacccaggcaggagtgtagtggcacaatatcggctcaccgcaacctccacttcccaggttcaagcgattctcctgcctcagcctcccgagtaactgggattataggcacctgccaccacacctggctaatttttgtatatttagtagagatggggtttcaccatttgggccag

SEQ ID NO: 7389 - DNA, 1081 bp, Homo sapiens
aggcaaaattgttgaatcttcgaaagatttcaaagtgcaaggcatcttcccagttccacctggcagtgtgggtattaatgtgcctacaaatgatttgaatttgaaatttggaaaagaaaaacaagtgtcatcaataccacaagatgtgagagattcagagaagatgcctagaatttcaggttttggcacattacttaagactcagtcagatgcgataataacacagcagcttgtaaaagacaaactacgagccaccacacaaaatttaggttctttttatatgcagagtccacttttaaattcagaacaaaaaaaaactataattgttcagacttcaaaaggattcttaataccattgaacattactaacaagcctgggctaccagttattcctggaaatgcacttccattggttaattcacaaggtatccctgcttctctttttgtaaacaagaaacctgggatggttttaacacttaataatgggaaacttgaaggtgtttccgctgtcaaaaccgagggtgccccagctcgtggaactgtgactaaggagccttgcaaaacacctattttgaaggtagaaccaaacaataattgtcttacacctggactttgttccagcattggcagttgtttgagcatgaaaagtagctcagaaaatactttgccattaaaaggcccttacattttgaaaccaacgagttctgtgaaagctgttcttattcctaacatgctatctgagcaacagagcactaagttgaatatctccgattcagtaaaacagcagaatgagatttttccaaaaccacctctttataccttcttgcctgatggcaaacaagctgtttttttaaagtgtgtgatgccaaataaaactgagctgcttaagcccaaattagtccaaaatagtacttatcaaaatatacagccaaagaaacctgaaggaacaccacaaagaatattgctgaaaatttttaaccctgttttaaatgtgactgctgctaataatctgtcagtaagcaactctgcatcctcattgcaaaaagacaacgtaccatctaatcagattataggaggagag

SEQ ID NO: 7390 - DNA, 1208 bp, Homo sapiens
aattaccaaggaaaagaaaagtaaaattaccttagaagaaaacaacgggttcagttaccataatgcagacattttctacttcagtatagtacctgaaatcgaacattttaaaagttgattgtatttctgtggaagagtaaaagttgtatgtatgatatttgaaaatgctatccctgcactcaaaagttttgaaagaaactaatcacagcacagaagtaccttgatttaattttttaaacgtgttctcgggaagttagggctaaagaaaattttgataaaacaattttcccactttagttctttagtgactcttagtagagggtaatggctgacacccccattccctctcttcttccaccagccttatgcatctaagtgtagctcctctggagatggagagctctttcatcgtagaactgaaggagtttctcacatttgtgaagatactttgagagaacctgggtaaagaagtcactctatatctgctaaatatagttattttgaaggatattaggctccttgaaagtacatttaactcactacagttacacctcatacaatgcttgaagagtttttggcaagtaaattttttttccagttgaactctgtcacttgttagagattgggaacactctcccaaggtgattttctttttctaagtgactgtgtcaaatgttgcagtagatgggcagcttcaagagaagaatttaaactctttgtctcattgaaagtttggttaaagaacttgaacatatttctaaatttgattatattctctgatgatccctttgcacagaactatgcttatctcatgtttgtcctccataaacaaatggccatttttttcttcttggttcccatccctttaaaaagagtggaacataggagcacttccaagggagtggcttttcttgaaaattaaaattgtttaccaaaacagtattttgaagcaagatcatatttttgtctgtattcactttattatttgaacatgtccaaattaggacaaagcatttctgttagctgcttctcagtgtgactgacaacccaaaacatatatacagattgttggcatttgcaaaaggaagcatcaatagtggacccagaggcagtgcataaaaccttaggatagattcctaagggacatgcccaacagagttttaaaatggatgttttcatgatgacaacagaatcatagatttagattt

SEQ ID NO: 7391 - DNA, 1159 bp, Homo sapiens
atcaaattttgctggttctttggataatggagttcttgtgttaacaaattacgtgctatatgattttttgttacattgttacaagtgttaatgacattttcattaatggatgaaaacttcagggcttcttttctgtatataacaaattaagtctgtacatatttttgtaccttttatgtaaattttgcacagaaatttttggcataagtttattttctttcagtttagttcagtgcatgcactaataaaactggttgtttaatttaaaaggaatatataagactttacccatgttattttcttggtttttatttcagatgtagattttgtttttgaggtaaattcgttcttcagggattgaacactattgttagcaagtgcctaaaaaagatgtgaaacagtttacatatgtcaactgtaacagtaggtcccaaatgggcccattcccctaatagttttatttttaaagaaagccatacatagaatgcttcaagctatcttgctatgcacattatacttgtactgttttgtgcagtttgtctactttcttagtgaagtattttttgtataaaatgttacaattgtgtttcttaaattgagcctaagaatggagttaattggaaatatacagtatatattaataatgtacatggtgtttaaagaatggtaagcattgttaatttctgtaatgaacattttcaattaaatttatcttgtttgtgtttacacaataatttttttactgtgctaaaatctgatggaaattttgttctctaggaaatacagattttaaagtgtatgtgttttttcaatgctagttaactctacaagatagataaaagtgtgggattttttttcttcccaaaatcatagatgatatattgtttaagaaaggtaacatataccataattttactatggttatgctggcaaggtgagccatagagaggcttatagtcttcagtaccctaacagcaataaaattaaaatgctctgtttgttacatatagatctgttatgagacatcacctgctgtaaatagcaaggagagagaaggaactttcctgctaatattcgcagcactataacattacatttcagaatagccatatcaggaaaataatgtcgagatatgtacttcttgcctttaagttttaac

SEQ ID NO: 7392 - DNA, 1104 bp, Homo sapiens
acattaagagcattaaatgaatattaatcacctttaaagtcttttagaaaaggacttgtattggtttttggctgcatagaggggttgaataagtgtatgtatgtgtgtgcgtgtgtgtgtgtcttcttaaagaagatgtaattcacaaatagtttagctccctagcgctcagttgtagaatagaaaatagaacattattcaagttaattgaaaggtgaggtttttatacccccactaatgctgtgtatctgtctttcgtttgttaacattatttgcttaatttctttcaactcacactttggataatactatcaaaaactaaggctaaacattccttgtgtatctttaagcatgcttctcctgaaatttaactacattagtagttgacatttgtatacatatatcctaatacaagagtaggataaggtggaaatgtaatggcctgagggatggtgaagcattcttttagtatttttcatcatgttgggctcctagattgtactggggttgcccataaatcaaaccccatactcttagaattcattatattatggtgatatccgaacctagtgaatggtatgcttgggtgttttccattgagagtggatggacctctttataaagttggttgctgcaaaatccagttcttccaaaagccactttatttagggtttattcacaagtcatatccattttggtacagtgtttgtttcctaatatttattaaccaccttataccaaatgtcttgcaaagaaatgttattaaaaccttgaatttttacaaatgtaaaaaacaaaaagtgtattaatgtatttgttcaggaaaagctacataccgaagggcttttgtatatgaattctgtggtggggagacccatttgtaatctatatggcagttccatctgggttttaagtttagatttcaccgtgtcttagtgcttcattctattggtttattggaacatgtaataaataggagtagtgatgtattaaaacacaagtattcattaatgttttatatcttcactaaaattctatagttatgaaactatcaatcaaggtgttatatttcagtcagaagtgaaaatttatgaagagtatttg

SEQ ID NO: 7393 - DNA, 2217 bp, Homo sapiens
tattcttgctttataagagatgtattttaattctgtagttactgattatacaagaaataattgctacttgattagacttggcgtatgatggtcagactcagtgtattatggtatcaggtgatttgcaaagcaaatgatacagttttagtaagttcagagagaatactaacataaggatattttctttaaaaaagaataactttccagagcatagagtatttagtgtttttaaatgatggatactgctctgtatgtatttgtttcaaaacatcttattttatctttgcaggagcgattggttacatgggaacaagtgcctttgtccgaaaaatctatactaatgtgaaaattgactagagacccaagaaaacctggaactttggatcaatttctttttcataggggtggaacttgcacagcaaaaacaaacaaacgcaagaagagatttgggctttaacacactgggtactttgtgggtctctctttcgtcggtggcttaaagtaacatctatttccattgatcctaggttcttcctgactgctttctccaactgttcacagcaaatgcttggattttatgcagtaggcattactacagtacatggctaatcttcccaaaaactagctcattaaagatgaaatagaccagctctcttcagtgaagaggacaaatagtttatttaaagcatttgttccaataaaataaatagagggaaacttggatgctaaaattacatgaataggaatcttcctggcacttagtgtttctatgttattgaaaaatgatgttccagaaagattacttttttcctcttatttttactgccattgtcgacctattgtgggacatttttatatattgaatctgggttcttttttgactttttttttttcccaatccaacagcatccttttttttaaaagagagaattagaaaatattaaatcctgcatgtaatatatctgctgtcatcttagttggaccaacttcccatttatttatcttaaaactatacagttacatcttaattccatccaaagaagatacagtttgaagacagaagtgtactctctacaatgcaatttactgtacagttagaaagcaaagtgttaaatggagaagatacttgtttttattaaacattttgagatttagataaactacattttaactgaatgtctaaagtgattatcttttttccccccaagttagtcttaaatcttttgggtttgaatgaaggttttacataagaaattattaaaaacaaggggggtgggtaataaatgtatataacattaaataatgtaacgtaggtgtagattcccaaatgcatttggatgtacagatcgactacagagtacttttttcttatgatgattggtgtagaaatgtgtgatttgggtgggcttttacatcttgcctaccattgcatgaaacattggggtttcttcaaaatgtgtgtgtcatacttcttttgggaggggggttgttttcttctgtttattttctgagactcctacaggagccaaatttgtaatttagagacacttaattttgttaatcctgtctgggacacttaagtaacatctaaagcattattgctttagaatgttcaaataaaatttcctgaccaaattgttttgtggaaatagatgtgtttgcaatttgaagatatctttctgtccagaaggcaaaattaccgaatgccatttttaaaagtatgctataaactatgctactctcatacaggggacccgtattttaaaatctccagacttgcttacatctagattatccagcacaatcataaagtgaatgacaaaccctttgaatgaaattgtggcacaaaatctgttcaggttggtgtaccgtgtaaagtggggatggggtaaaagtggttaacgtactgttggatcaacaaataaaggttacagttttgtaagagaagtgatttgaatacatttttctggaactattcataatatgaagttttcctagaaccactgagtttctagtttaatagtttgctatgcaaatgaccacctaaaacaatactttatattgttatttttagaaagactcaaaacacctgtatttaaaccttaatatgaaaatcatgcaattaatagttacacaagatgttttcattacaaaatatgtacctatctattgatggactctacatcctatattgtgacatgtaagtcctttaaaagg

SEQ ID NO: 7394 - DNA, 1557 bp, Homo sapiens
aggcgggcgaatagcttgaggtcaggagttcgagacctgcctggccaacatggacctggtctctactaaaaatacaaaaagtagccggacgtggttgcaggcacctataatcccagctatttgggaggccgaggcaggagaatctcttgaaccagggaggcggaggttgcagtgagccaagattgcaccattgcactacggcctgggtgacaggatgacactccatctcaaaaaaaaaaaaaaagtatgaggtagacctggcacggtggctcacacctgtaatcccagcactttgaggggctgaggcgggaggattgtttgagctcagggttcaagaccagcctgggcaacatggtgaaacactctctctattaaaaaaaaaaaaagagctttcccaagcggctgccgaagatggcggaggtgcaggtcctggtgcttgatggtcgaggccatctcctgggccgcctggcggccatcgtggctaaacaggtactgctgggccggaaggtggtggttgtacgctgtgaaggcatcaacatttctggcaatttctacagaaacaagttgaagtacctggctttcctccgcaagcggatgaacaccaacccttcccgagtcccctaccacttccgggcccccagccgcatcttctggcggaccgtgcgaggtatgctgccccacaagaccaagcgaggccaggccgctctggaccgtctcaaggtgtttgacggcatcccaccgccctacgacaagaaaaagcggatggtggttcctgctgccctcaaggtcgtgcgtctgaagcctacaagaaagtttgcctatctggggcgcctggctcacgaggttggctggaagtaccaggcagtgacagccaccctggaggagaagaggaaagagaaagccaagatccactaccggaagaagaaacagctcatgaggctacggaaacaggccgagaagaacgtggagaagaaaattgacaaatacacagaggtcctcaagacccacggactcctggtctgagcccaataaagactgttaattcctaaaaaaaaaaaaaaaaaaaaaaaaaagaaaaaggaaaaaaaagagcacgagggaactagagactaatggaaacattctatgtcttggctatagtggttattacatgtaatacaaatttgtgacaattagtcaaagtgtatactttaagtgaatgaattgcattttatgcaaaatattcctcaaaaatgattaaaaatagaatacataagcaagaatattaagaaaaatgtggaaagtaaacaaaatcaggtggttttgattttctagctattttaatttgctataatttacattaaaactgtgcaataggccaggggcggtggctcacacctagtaaccccagcactttgggagtccgaggcaggcggatcacgagttcaggagatcgagaccatcctggccaacatggtgaaaccccgtctctactaaaaatacaaaaaattagccaggcgtggtggtggacgcctgtagtcccacctattcgggaggctgaggcaggagaatggtgtg

SEQ ID NO: 7395 - DNA, 2300 bp, Homo sapiens
cggattcttcctctgctgacagatgcctaagaaatcagagttcagattcttcctcagcttgtcttgaaatcaaagttcctaaaaatcctagtgcaaaacgttcaaaaaaagaagggcaccctggtgggacaacacctaagggccttctacctgacagtttccacacggaaactctggaggacacagaaaagccaagtgtcaatgaacgcccctctgagaaagatgctgagcaggagggcgaaggcggggggatcatcaccaggcagactttgaaaaacatgctggacaaagaagtcaaggagttacgaggagagattttccccagcagggaccccataaccacagctggacagccactgcctggagagagattggaaatctatgttcagtctaaaatggatgagaagaatgctcatatcccctcagaaagtattgcttgtaagagggacccagaacaggcaaaagaagagccagggcatattcccacacagcatgtggaggaggctgtgaatgaggtagacaacgaaaacacccagcagaaagatgatgagagtgatgccccatgcagctctcttgggttgtcgagtagtggaagtggtgatgctgctagggcaccaaaatcggtgccaaggcctaaaagattgacctcttcaacctacaacctaagacacgctcattctctgggctccttggatgcttcaaaagtgacttcagaaaaggaagctgcacaagtaaaccccataatgccaaaggaaaatggagcttcagagagtggagaccccctagatgaggacgatgttgacaccgtggtagatgaacagccaaagtttatggaatggtgtgctgaggaggagaaccaagagctcatcgccaacttcaatgcccagtacatgaaagttcagaagggctggatccagttggagaaagaaggacagccaacaccaagagcaaggaacaaatcagataaactgaaagagatttggaaaagcaagaaaaggtcacggaaatgtaggagttcattggagagtcagaagtgttctcctgttcagatgctctttatgacaaactttaaattatctaatgtttgtaaatggttcttagagacaactgaaacccggtctctagtcattgtgaagaagctcaatactcgccttccaggagacgttccccctgtcaagcatcctcttcagaaatacgctccttccagcctatatcccagttcactacaggctgagcgcttgaaaaagcacttgaagaaatttcctggagctacccctgctaagaataattggaaaatgcagaagctctgggccaaatttcgagagaatcctgatcaagtggagccagaagatggcagtgatgtcagccccggccctaattctgaagacagcatagaggaagtcaaggaagatagaaacagtcatcctccagcaaacctgcccactccagccagtacccggattcttagaaaatattccaatattcgaggaaagctcagagcccagcaacgtttaatcaagaatgagaaaatggaatgcccagatgctctggctgtggaaagtaagccaagtcgtaagagcgtatgcatcaaccctctgatgtcccccaagcttgccctgcaagtggatgcagatgggtttcctgttaagcccaagagtactgaaggaatgaagggaaggaaggggaagcaggtgtctgaaatcttgcctaaagcagaagttcagagtaaacgcaagagaacagaaggcagcagccctccagatagtaagaacaaggggcctacggtgaaagccagcaaagaaaagcatgctgatggagccaccaaaacccctgctgccaagaggccagctgcaagggacagaagcagccaaccccccaaaaagacgtctttgaaagagaataaagtgaagatccctaaaaagtccgctgggaagagctgccctccctccaggaaagaaaaagagaatacaaacaaaaggccttcccagtctattgcctcggaaacactgacgaaacctgcaaaacagaagggggccggtgaatcctcttcaaggcctcagaaagccacgaataggaagcagagtagtggaaagactcgggccagaccctcaacgaaaaccccagagagcagtgcagctcagagaaagcgaaagctgaaggcaaagctggactgttcgcacagcaaacggaggcggctggatgcaaagtgattggaaagatggtagccaagagtaaaactgttctatagaagtaaccttttattttgcattaactaaatctgcttttataagcttatcaag

SEQ ID NO: 7396 - DNA, 1139 bp, Homo sapiens
tgaaagacacctattcacactctaattaatcatgggagataagcatgttaccttctgcaccttgactttgctcgtgagcacctggctttcctcttcctccttctcccctctctccctgtctcagtgtgcatctgtgcagatgtgggccagtccccctgtaaccagtggttacagaatgataccatctgttctaagatgtggtcagctttacttctcaggagtcctgtcctacaattcagagcacccctagatgggatggaaccagtgctttatgatcatgttcctcttctctgtgccctgtccttcggcacccccatgttagtcatgatcctcattgtgcagggctggctggactgagaattgcaactccaggacagcagggagctttgggactaggcacgcaggggttttgtcatccatttgaaccataatttgcatattttcttacggcctccctttgtcttttctaaacaaatgaggcagacacttgaacagtaatgctggagaatgttttttctaggagactttgtaagcaaatctgattttaagatgaaatgtgaatgagaaactaggtgccagggaatttagcactgaactagacagtcaaaacttttttaactttgcaggaagaaataaattttgctctcgtctaaatgttcacaagaagtaatgttgtaaatagttttctaaaaatatttattacttgtgctgtatacaaattcatgttctgagtgatgttggtttgcattgtagtattatagaatatattttgagcagtggacttcctttcataacacagttcacacatggagaaagaacaaaaaccagcaggttgagagctgtttggggcctttgatctgtaatgttacatcaaatctgagctttaactgccccctcttctcatctggttatgttatattatatatatatattatatatatatatatacaggtgtatgataaactggtcagtggtcagtactcagatctgcagagcagatttccagatgttctttctgatgtgttgcccataagcaataagatcctaggtaataacatttattccagggcccacattggcccttgtctcagaggatagggtgggggtagaacagctcttgctaagacctcttgcctttg

SEQ ID NO: 7397 - DNA, 1145 bp, Homo sapiens
taaaatgaatctctaccgttcctttaaaggtctttctggttcctcccagtgttgtcattgctgaggtcgatctcgtagttgttcagttgtgctctttttgctgtcttgtgagtcttagccagtgatccagctgcccaaggacagggcctccagagggcctagcgccctcctggtaccaagcgtgtgctcctggcctgtgtgacagtgtctttcccgaagcagtgaaatgagaaattctgcaagtggccacccggaagatcagtctgtagctcttgggcctggatttctactatgttagtgagtgtaggaatatactgtgtctttaatggatgaaaattcaatgtatgctgtgaatttgttggtttgaaacattgaaatttttcattagacaatgtttacatacctcacctgaagaacctttgagagtgtatatataaaattttaaaatatattaagttgctttaaaacaatatgtatagctataaaagttggagttattttaactttgaatatgtaccaagtctcttaaatattgaaatcttgtagacttcttgtgcttctgtgttttgctttcctatcaggccatgtaggaaactgtgttcttgttattggtagaggggccctcactgaaatccaagcttggaaggatgtcctgtgttgtttcagattctcttgtttggttttgaaggatgcggtgtggagccagaggatgtgtgggaggggtttctctaacactgacttctattccatgagctttttcaaggcgcttattttatggcagcgtattaaacttctttgatattcaagtgtgtctgtgtagtcactgaagagggcacagaacgccttgaagccgggcattcaacttgcagcctaaggcaaaattgatgagttgccagaaggaaccacaaagcaatacttccaccaagtgtcagggcttagagaaaccttgtttgctaatgtaagtaataaatcattttgtgagttctgcctaacttcagggaaaagaaaaggcaatggaggaatccttgagattcccatggcagggttggaaaggtgccagcatttcatcctgaggggcagggagcaatggagggcaaactcctgacctcaggctagccactgggaagtgtgcaggccacaggcca

SEQ ID NO: 7398 - DNA, 3517 bp, Homo sapiens
acctgcagtattgaaaaaggagaattcagaatgatacagtattttaacaaatcttaattattaaactcttttccttccttccatttctccctcccttgtccatctctctctctctttccctttcctcagtgatgtgaaaataattgtgttttgctgaacttgttatcttcattcaatttcctcttgactaaaacatctctggtgccaacgtaatacttctgaaccaaatcactgtgactcaaggaaagtcactgacagcataagagaagtttgctaaaatatttgtatgtgggggaagctctggagtgtgcctaggagggggctggctgcctttatgtcccaggatgactctttatgggtgggattacattgcaccctctgagggtgcaggctagaccgtctcctgagaggaagttaggatcagaaagaagaagcaagcagcaacctctgcagggctgacaggatttaaaggagagaatgttcttatttggaagcagctgtggcttgtcaccaatgttcaaggagtgttactgttccgccctctctttgtcagaagggacacaggtggtaatttggagatggggccagagcttctggcttttggatttggtgtgttcacttgtgttggatagagcagtggcatggctttgacctagtatgaactggtgtctgcccagagagcagcatgtagcaggggggaatgctcaggtttgtgcctggctctgtggagctgtacaacccttctcaccctgtgggttggagccgagtcaggccactatggggaagcagttgccccacaaaatgtggtttgctgacctatttctaaactgttgaatatgctgcaccattgctgaaatgaaagatgactctgggggagcagagcttggccttgtgcccagctggcagccccctctgccagcctttctgctgcttttgctgctgtaacagcaatagtggagaaaaatgtaaaatttggtcttccagcttaatgcagtgtgaacaatagatggttaggaaaacaaaactgcttagaagcccctttctctagagcagttttatgtcatttgtaaaaacacatattagcaaattcgtttgcgtaggtttctattaaatatttgactttttttttcttattaagaaaatgaaatcccttacaccagatatcagttaattcaaacagaaaaccctttgggtatcaccaaattgaaatggtattcttccttaactcttccttctttcctttatttgtttagacgtgcttcatcccgaagtggtgctatggtctgttaaacagggctggcatcaggtagagggagcagagtggtgacctgatagctcctgtcatcgtgttagtttttgattctatttaagggaagtagctgagatttagacggatgtagatgctctttgggtgaatggaatcataagcaaaggttgtgttctggggtgaggatcatgagagagatatttatcacatgcacatgcctttatatagctggtctccttgggtggtttatgtgtgttttgtttatttattgaatatgttttcccttgctttaggggttttataggtcatttttcttaatagaagctgtgatcgacttagaatccaaatttgaggagtaagcagcataaccttctaccttgtaatatgtaactattctaatccagtggaatcttacggaaaacacagagaaaaccccttttatcatttgccacagaaggctgctgtctcccttctgatttggtgggcaggtattgtttttgagccagtatttaacagagttttttaatctataagattttttttgaatctatttcattgtgtttgtttttcatgttggaacaatctctctggaagtgcctcttcttgtggcttttacaacttcatttctttctggggtcacctgtgatgggctttgatgtggtgtcaatttggggccttgtgtttgtgccagagggatacacatattaaactgcaggccaccttcctggtccagactgtactgtgtgaaccccactgactaaattagtgagaaccataggcgttggaatttctcaccttttacaatgatagacttttgcattgggaccaatgaatctggtgtgaaaaaccctgctgtagtagtgaaagagcatcaggagatactgactgtacctgagggccaaaacaggagcaggtaacgaaccgtaaaaaaaggagcaggtaatgaatcgtaaccaaaactacagttgatcctccgcaaaggaaagctctttacccagaatgtccttccagagtcattcaggaaggacaagggaacacccttgggaaatgggctagtggagggctgttgactgcagtgacacctgggtgctccggaggtatctgttctgttgacctgtaaggaagcagtcgatcctagagtgtcagaacagagccattctctcctcctgagtaggaacgtttctgttcagtttccctcacagcagcctgtgttagcatgcagttgaaaatactgccgtctaggagaacctgtggtcactgggaacgtgccccacagtgactggccatgcaaccaggtgatttttaggaatagatgtctctagactctgtctcctttcctacaaggcctcacacagatgcttgaggctaatggcccccattctgaggtcatttttgtgtagaactcctttccccaggagagagccttatctctgccctcctttaccctgaaggcttcaaacggaagacaggacctagatctaaacctagatactagcattttgtgggattgtctagaatttggggaagatttgggttcctaagatgcacaagcgttttacaccagtggtgattaactcaactaaaacccactgtaggaagttagcttccccagacagctaatgccgagatcttctaccagcgtagagttgacagaagcaggccagcgaggaggtgtgggacataatagcctgagtgcttgggttaccatggagactggagtgtgtgaggccacagcctgtgctaaagagccatggagccctcccctggccatgtctggggacagatagaacctgttgggggaaatattccctcaccccagggttctttctgcagagcaagggttgcctttgtcctatccctgagcttgctcaacaagagaaacaaggtttcttaagtgttttggttaaagttttcattcttatttgactatgtatatgtaattgtaaagaaacgatcctatgcattgtctttcttttatattcttgtaatattctgaaattaaaattgttttgtttcatatccagaggatttgactggtctattcacattttgactgttgatgttgaagagagagtttttctcttgttctgaggaaagtgaagcctctagaaaggctcctctttggcttgtttttaggtgggtgggtgggttcaggaggagcggggcttttggctgataagaagtatgatttggagcctctgggatcctgagcttcctaatttcccatggctgagtctagaatgcttcaca

SEQ ID NO: 7399 - DNA, 1228 bp, Homo sapiens
tggaaccacgtgaggtctgcctagttcatgtgctggccaccacctggaggcccccttctcatccctgctggcgctgggggtgagccatcatttggcaacaggagggggcctcctattctcagccagatgtgacccttccgttccttggccctgcaggaagaagatgaagctgcagggacagttcaaaggcctggtgaaggctgcccggcgaggttcccaggtgggacacaaaaaccgcagaaaggatcgtcgaccctgaggcccagggcccctgggctgccctgtggtccagtctgaggccctttcagcccccaggctgccttgccaccagctccaggtgctcaagattctggcagagcctggactcaggatgacttggaactagggcttggctctcagaagtcctggattttggaaactccaaatggaatcacccttcagagacatccctggtgcctggagatgggaatgtggcctcagtgcctctgagtaggtgccatgaggcacctttgctttctgcccagagtggccatgagcaccagaacagatgatctccatttccgccagctgcctgtagccacgtggcatcctgcctgtggtctgggtgagatttactgtgaccagatgtagaataaatgtgtctcatcctgcattttttttctagaaactgtttcatagtctgccccctccaggggtaagaacagtgtgcagttgttggcagcagtggcctgacctcttcctgtctaactccttacatccagtccagggcatatcataaggctttgcccataggacaggctttggaacttgcccgggagcacccacctgtgtcaggaggggcagcgaatgccccagggctggtgtcgggagctgcagttcagcaccagggactgccccagctgtcctgggcacaagtctctccagcatctttgttcattgattcaacaaagtatttgctgagcccctctaagtgcccagcatagccttgttcattcacctccgtgtcttcccacattctttttttcccagacaaggggatctgtttgtgtaatgtgattcactgggccagctttgttggtctggagcagagaagggcatggcacagaagtcctgaggtcactgtcctgtcagcccaggtcccctcatgtggatacaatcccacaggcagccagaagcaaagaaccccagcactgttcccacaccccagtatgagtgtgctttgtgccct

SEQ ID NO: 7400 - DNA, 1195 bp, Homo sapiens
catgagctcaggccactggagtgagcactgtccagagctgggtgagtggagtggattggtgggccccacggcacacacccccaacccctgtgcctcgcccaggagttagccactcgctgtccacattccactggtcctctgtcaagccacatgagcccccacggacccctgctcagaatccctccagtgctgggggatgctccgtggatagcattggacagggagtgagccccaggcctccctcaccggttcctgtctgccagagcaaggcccacggggtgcagaagaaggcctaccgagtgctggaggaggtgtgtgccagtcctcagggccccggggccctcttcgtgcagagccacctggaggacctgaagaagacactgctggactcgctgcggagcacctcctcacccgccaagagggtgagggctctagggccacccgctctgccgagggagcctgggcaacaccaggaaaggagccactgttgaggcttgttgggtggaggtagcattgaggggtcctgactggtagccctttgcccacagccccgtttgaagtgcctcctacacatcgtgaggaagctctcagctgaacacaaggagttcatcactgccctcatcccagaggtgagtgtgcgggtgtgttttagaggggggtccctggaatgtggctcttaagggcctcaggatccagggagggcagtgatgggagtgggaggactcgattcgcttcccgggcagatggctcagggagcagatgctgatggagttgtcttggccaggtgatcctgtgcaccaaggaggtgtcggtgggcgcacggaagaacgcttttgcactgctcgtggagatgggccatgctttcctaaggtttggctcgaaccaggaaggtgaggcccagggggctgggggtggacactctgctcatagactgggtggggggaagcacccctcaaaaaaggtggggagagctctgtgccctggccctgggcaggctgctcctctctggccctcagcccccctacctggtgggtccttcctgcttgacccacgttggtctctgtccccagaggccctgcagtgctacctcgtcctgatctaccctggcctggtgggcgcggtgaccatggtcagctgcagcatcctggccctgacccacctccttttcgagtttaaaggtaaatgcttatttcct

SEQ ID NO: 7401 - DNA, 1252 bp, Homo sapiens
actgtgggcttctagatcccactttggtagagatatctggccatataccttgctgtagtttgttggtggtctatcttgtataccttttcttgcttttcagtttaatggctgagaaataagtatggtgggggccattccctgggttcagaactactataaagatcagaaagggtgtcttattttaatttctgtcaaagtcctttatcacctggaggacaaagtaaacctggaggggtgatgtggatttatgtcttgtgtggctgatgatggtggatgttttcaggtctctctgaagaggctatcatggagctgaacctgccgactggtattcccattgtctatgaattggacaagaacttgaagcctatcaagcccatgcagtttctgggggatgaagagacggtgcgcaaagccatggaagctgtggctgcccagggcaaggccaagaagtgaaggccggcggggaggatactgtccccaggagcaccctccctgcccgtcttgtccctctgcccctcccacctgcacatgtcacactgaccacatctgtagacatcttgagttgtagctgcagacggggaccagtggctcccattttcattttagccattttgtcgcctgcacccactcccttcatacaatctagtcagaatagcagttctagagcacaggttctcagtctaagctatggaaaagctccccttatccaacagagtttaaaagtagtgacttgggtttttgcgagtgctttgtttactaaggactttggggaggaaccatgctaagccatgaccagtgaggagaagcaacagagcctgtctgtccccatgagcggagtctgtcctctgctcttctgcagtcaggtcactgcctactgcctgggggctctagtcattccagtggaagacgaatgtaacctgcgtggtgatgtgacaactgtttcctccctgaccccagaggatctggctctaggttgggatcaatcctgaatttcgttatgtgttaatttacttttattaaaaaagtatagtatatataatacaaaacaataacccttctggggtttcttgtggcggttgaaatagtcccacatgtggtcatcagaaaataagccattcctcataccaatataggatcagctccttgacctctgaggggcaggagtgcttcctggtgtgtgtattagaatcccttcctgccttgtttcatggcagtgaaatgcctcttggtcctgtccaagtgtatctttcac

SEQ ID NO: 7402 - DNA, 1219 bp, Homo sapiens
aggatgttatagagtctgttgtcttaagcagagaaagacatctaaatggtgtcaggacatttcagtacttctgcttattgagtacttactgtgctaggcactgagtcaggtgctttacatacgtccccttcatttaggtacattgtgatttaatgaaaatttgaggacacgtggtgatacagatagcatgtgaggcaggcatggtggctcatgtttgtaaatcccagcactttgggaggccgagttgggttgaagtcaggagtttgagaccagcctggccaacatggtgaaaccccatctctactaaaaatacaaaaattagccgggcgtggtggcacatgcctgtaatcccaactactcaggaagctgaggcaggaagatcgcttgaaccctggaggcagaggttgtagtgaaccgagattgcaccactgcactccagcctggacaacagagcgagactctgtctcaaaataaataaataaataacatgtctaaaagtatttgatacacatcactgatatagtgggtactccaggaaatgttaaatctgaattgaaaagtgggacagagtactgtcatatgaggtggccaggaaaggattagtgacgtgagatcaaaataaattaaagaacataaaagtaagtgaagatattcaaggcagagagacaagcccaggctaaatgcagaagcagaaatgaaggcgtaagtttggggatgaggaagggatgagagttaagcatggagaggttgccgacgaaatatgagtctgagatgtcacttcttgagatgttattcaggaagcctgtgtcttcagtatttagtgaccgtgcgtaatgtgagctttagaatcagcccaccttagtttctatcctctacttcctaaccttgaatattagggtttctatagttgaaaattttagagattgagatcattgtagatccacatccaggtttttgtttttattcttgtttttttttgagacagagtctcgctgtcacctaggctggagtgcagtggcgcgatctcaactcactgcagcctccacaccttcccagtagctgggactacaggcatgcgccaccacgcccagctaacctttggtagagatgaggtttcaccatgtcggccaggctggtcttgaactcctgacctcaggtgatccacttgccttggcctcccaaagtgctggcctcccaaagtgctgggcttataggcatc

SEQ ID NO: 7403 - DNA, 1197 bp, Homo sapiens
cctgcctctgtattggcagcaaaagatcaagctaggaccagggctctgtgcttctgacccttggctctccttaggggaggtgagctctgtgttagactctggctgctaaccagttggagagatgtaggactgctctcttcttaggctttaagaagccctgtccaactcagtggtgtaggtacttgagttctgctctttagcaaggaggcgttgggagctcacactcctgaatctgcctaatatcagacgtaggcaagagagctgtgagcccaggctcagccaatgcttatctgctctgcgcctccagcagggtggcagcactggaagcatcaggaaccctggctgctctctaccctgtggccttcagcagccacctcgtacccaagctcgctgaggagctgcgtgtaggtatgtgtctctaatcctctgtggcccatccctttccagcaaggctttggggccttcgtgcttcctatcacacagtaaacctttgtctcatgggttgctttcaggggagtcaaatttgactaacggagatgagcccacccaatgctcccggcatctgtgctgtctgcaagccttgtcagctgtatcaacacatcccagcatcgtcaaggagacactgcctctgctgctgcagcatctctggcaagtgaacagaggtaactactaggaataaccaccaacggactgggctgaatagggagctgtagtctctaaggcagtggttctagctgtagctatacataagagtaacagaatcaactcttttaaaagaaaaaaaaaatactgatgcctgcgtccaactgaatcagtctctgaggagggatgggacttaggcaacagtactattaagagtacccggccagggccgctgctcttgcctgtaatctcagcactttgggaggccgaggccagcagatcacttgaggtcaggaatttgagaccaacttagccaacatggagaaacccagtctctactaaaaatacaaaaaattagctgggcatggtggcatgcgcctgtaatcccagctactggggaggctgaggcaggagaatctcttgaacccacaaggcggaggttgcagcgagctgagattgcgccactgtactccagcctggccagcctgggcaatagagtgaaactctatctcaaaagaaaaaaagggttgggcgcagtggcacatgcctataatc

SEQ ID NO: 7404 - DNA, 1153 bp, Homo sapiens
ctatttcctcctccctttagaagacaggctgtcttctttcatcaacttagagcagataatccccatgtgtgcctctctccttccttagatggggaacaggatccctttttgggacaatcaagaaaaaaactcatgtaaacagtaatcttattacttgtatttgtgactaactccagggaaaagggtagaatatttaggccacttcaggcactaccatggagtgaactgaattcatacggatggcttgggctgacacagtttcttcccagtggaccaataaatcagactcacccgaacccctggggttttggtagaattggacctactctaggactgtggggaactaaaggagcatttggctcactgtagctcttctatcatgagccttgaccgtcaggccgcaatcagaccttactgatgggatctctgcagtttattacgtaggcctcccgttaccctggtacccaaatacgtcccccacctctagctccctagcctcacattgaatgtctcttcaacagcagattgtggtggaagttatagccgtgtgcctctatttattctctgaattgtactgtagaaaaaggtgtttataaagaataaagaaatcaccagaactgcctatacctagttttcctgactttctggccctgcgtcttcatgaatatcaacccatttgctgtttgtaaaagttaatcgggttagcccttggaactgaccctgcacactttatcaagtcatctaattttctcagcctctacagaggaggacgtatgaacttttttttcttatttaaatcagacaatctcaggctgtcccaactagtaggtagcacagctgggtgagatttgtaaccgagcctttctgattccagctccctttactggacctctctcaccctgagcatcagagtacttaagtcctgagactagttatggccacacctgctgggttacctctggcaggtccactcctgccggagtttccctttttctgcaacaggagagtggtggaacattgacccccacgctaacccttttacatgcacgtccttgttggaggaaggtactattattatccctgtattacagatgaggctcagggaagttaagcagtttctccaaggtcccatagacactaaggggcagatccc

SEQ ID NO: 7405 - DNA, 1380 bp, Homo sapiens
ggagctccatgcacgtagtccagatgcctgggaaggaacatctcccttccagcatctgctggtagcaggctgggacagtcccttccttccctgaaaccctgctctattgcaattccctattatattctgcatcagaaaaacaaacaaaacaaaaacaactttaaatgcttgtagcagaaccccgggtcatctcatgtcagaaacctttaatccaggcctaaatttgcatagacctgacattcagctgccttgcagttgcttcctcccatgagccaaggtggtgtcagagggcaactggatgactcgcagtaccacagcactgggacagacagaagccacacctttcttttgggtttttgccaagcctcctccatctcccatcagtgctgtgggctggctgcaagcctcgaaacagttctcctggaagggaggtttttgctttacccccgccagcacttccgcacacaatcatagagaacctctctgctctctgctggcctacagcttgtctgtttctcaagcagaggcaggaagagctagtcttagcatttatattttaataggaagttgactcccagcatgtaaaagtgatccacgcagccggagtgtatgccgggagctaagtggtctatgggtgaacatatcccaccttgcttcctgagtccttggtcccaatcttctcatttgttcctctcgttttaaattttttccccccaactcttttgatgtaagagttcagtttgtcttcgggagtgggtctctgcaagggctctgggatgagtcttggcttccaagaggacaggctattaggttcttggacttttttctgtgctaccgctgctgcttggtggaagtaacaggacgtggattctgcctcataagtggcagtttcccttttctctctgacttgtcctaggccgatttctctatggcttccctgagaaaggtgaggcccaaaggagagaggccttcaaactgtcccaggtcctgcgcagctcagtgcgtatcttcttgcttccatgtgtcttttcccctgctgcctcactccccacccccacttgccaggtgtttgagccatttctacaccaaagcaaagtacggcctcaggagggagtaaaaagggtgccatctgtgtctggaggggcagctgtgttcatgccctgtgctactggacatttcacaattctggcaccttgcgattggtcagtcaacctcagaaagtaactatcttgaaggtttgaaaaacaaccaaagaaagggagtgaggactatggctgcatgtcctctgcttgcccggctgcagagcagagatgtgcagccctctggtcagctggtccaggctggtccccgccggtccccttccagtccagccaccaagag

SEQ ID NO: 7406 - DNA, 1175 bp, Homo sapiens
cttatcaaaccagtttaatagcatgacttatgacatctgccatgagtacaggatgaggatgaagaaatgttgagttttgcacaacctgatctggtccaaccctttctactgcagagaaatctgtaaactttgtctagtcagacagttctcagagggggaaagaccagagcagagccccgctctcattttgctccaaatcatatgttttatggtccaccatgacgaaatctcttgaagtccccattccattcttcctattgatgttggctaatcatacacttgttctctgcagaatcctggagccccactctgcactggccaacccacagagtgccacagagacagcctccagtgagcagtatctgcactctaggaagaaaagtgccaggatccgccggaactggaggaagtcaggccccacaagctacctccaccagatcagacactgatccagggaaagagccaggaatggcagtgtcttccctcttgccaaaaggcctggggaggtgaaggaagagagactttaggcaagcagcccaaaggggtaaatgaaagcaagaggctgctgccactgacctgctccattcagaacaagactggatgcttctgttgagctctccattatgtgggacccattcctcaccaaaatgaggagagacagtgactgttcctgccacagtccttcccagtctaacactattcctgggctgcatgatattcccctgggagcaaagtgacaggcacttagatgcagcatttcaccactcatgctactaatcatctacctgctactactgtaaaccatggttccagcagcctgttccacacccccacaccatcaggatagcacagggaaactgtagtttaagtggcaaataaaaacatttgcatcaagagctgtgtgagtctgtcacagaaggggaggaaatgaaacagagtgggaggggcaagagtgtccccaggaaggaaaaatcagggctggcctcctctctccttttcacctccctctcctttttcacccccatgctgagcccctggaccacagcctccttttccagagtctgttggatcgggagtaaagaggggagtctctgcagcagtcctgatccataggatcaggagaagggggaagactgtcatggtcagcccagcacagtaggctgaggccttgggct

SEQ ID NO: 7407 - DNA, 1198 bp, Homo sapiens
gctcagctcccgcccgacggcagcgccgccgccgcccagaatcccagcccagaatcccgaccgccgcgccggacgcgccgtctcccgggacaagcgcaggctgcgatccgaggggctgacacacactcgcagacgagccgccccgaggcgaaacctcgcggttcctcttcccttccctgctgagactaagacgtggacaggggccgcgcagatccgggggaggctcccaaattggaaccaggcttctggctgcccccttccctcccgccccgtggtcggaagagcactcccttccctggcccctcatccagcctccggtgctgtaaaacgcaggcgctgggccgcgggcggagctgaggacaggccttggctggtcccaggatgagcgacgagtttggttttagctggggattgtgctggcatcctgcgaagctcctcccagccggtctctctgtgctcggttgtcttggggtggggcccatccgccgaggtggggaccgataggagaagccggtgggttgtacccttacacttgtggagtctcctcttgcctctacctactccgcctttgtccttaaggtttttgcaggccagtgccaaacacacactaactgtcctggcctctccgtgacacaagtctcttcccagccttcctcacaggcttctgccgcccccctcatctccaccctcccccatatctgtttgcattaggagttccacgaccatggtggaatgttaaggtgaaccccaccccttcttacagatggggacccagagcctgctcttgggaacagccagagtaagattggaacccagacttgcagtccagcgctgtttgcattaaaagggtgggtgagtcaggacccctggctcaggagccgcctctcctaaaagagggtttcaaggccaaatgggtttgtcaacggtgctgtctccctttcttggagatgctcattagcttatcaaagactgagaagtcccgctgttacagaaataatttagtttgctgtattaactgctcctgggcctggagcagtattcccaccttaagattcccagcatccctgtgctgtcccggctctcattcatgccgaagggcccaacccattggctgtgttctgtttgaagatttggggggcgccttctctttcttccccagggaattctctagcagagggaggggacccaccccagtgag

SEQ ID NO: 7408 - DNA, 1566 bp, Homo sapiens
tactctatatagtagggtatcaatacatgttagatactgttaatgtagctattttttaaattgtggtaaaatatacataaaatttaccatcttaaccatttttaagtgtatagttcagtggcattaagaacattcacagctagtcgcagtggctcatgtctgtaatcccagcactttggggggccgaggcttgagactaggagtcccctcagccccaagtgctggtgcagtgagagcctggggtgagacacttggggtgctttggaagccctttgactttggttctcctgttgcaggtttccatgttgctgaggccatggagattcccagagctggtcacaccgaccgctctcagggcccgctgccctgggctggcaacaccattctggccttggcctgcagaagctttcagagtcttcactggcagtagggggagatggggagaggaatgatctctgcccagccccttcctttccaaaccatgcaatggaagagcccagatgggtgaagattgattttgccttaactcaagagaattcctgttctccttgtgctatgatttggacacaagattctggatacctggaacttagctgtgtactcctgtaccctaaacagtggatttgagttccagcgtttattcttttttccttttttcagatcaccatctaagttacatctttagctcaggtccatccttctcaagatctccttcttagccccccagcccctggtgctgtctgtggtcaggtgaccttactcaggagcagatatctccttggccgccatggagcctcatccatccacacgtgcctgtagcattccagagctcactgcccttctagatgtgccttcccgcttggcttccagcggcttgtgctcactctgtctgccaggtatgagaagaacacgtaagaccgccaccacactcaccctccctcaaggccctgtgccataggggtggccacccgacctgcccccagaacttttggatactggaggcagttgcataggtctccctctctgggcaccaggactcagtccagcccaagactactctgggcagctcccatcccagtctggggccatttgcagactcaggaaaggatttctacagtgttctataaaagccaaaagagagagtgggtttgggaagagtgagggtggttggggagaggggaccgatgtgcctcattgtttagtggtgattacaaatatgcttttctggataaagtttggttgtttgctcttggtgtgtgtgtcttctgtcctggtcctctgtagcgtccctccatgtgaggtcctcccattctatctcattgtgcctcacgccctgctgctggcctcctttctgcctctctggcttcctctttccttctaggagggaaagagagtgagttcacagatctctagtgcagttaggagcttgggccaggggttgcctgaggacagaaaccagagggaagaaaactgcctgtgtccctgatggaggctggagggaattccagaggcttttgtccctgctctcaatgggccctctgttagggagctccactgcctctcatt

SEQ ID NO: 7409 - DNA, 1238 bp, Homo sapiens
tgcaagatactaccatttccattgccctttcttctgttccgagagcctggctgtcgacatctgagctgggctctgggaaacaggtttgctgagtggcctgtgggcggccccctttgttctcttttttttttttttgagacggagtctcgctctgtcgcccaggctggagtgcagtggcgcaatctcggctcactgcaagctccgcctcccgggttcacgccattctcctgcctcagcctcccgagtagctgggactacaggggcccgccactacgcccggctaactttttgtatttttagtagagacggggtttcactgtggtctcaatctcctgacctcgtgatctgcccgcctcggcctcccaaagtgctgggattacaggcgtgagccaccgcgcccggcccccttttgttattatctccccacctggcttctttgcacactggatggacttcctcctggttctccttggagcctcagcagactcggaagcctaccctcgtaagaaacccactgctgccaagccagaattctgagaggcggaatcctcttctctccctaagactcacgaaagggatgcttgttgccagggaagatgcttgagtcccctcctctccctcatgctcacagaagatgaagttggagcttcatcttcagcgggaggagggaggtgcaggatcacgtggaccaccggagaggaaaagcccctctctttaaactggagtcttaagaggctatgcttgagatctcaccagctcctagctttacctggtgaaatgagcctgcattctcaagacttgttctggttctggataagaccagaggaatatacttacatacattgtggttatagtacaagctctctggacttttgtttgaatgcgggagtgggtagagagcttgagaagtggcattagactatgagaaacaggaaattgtccagtggggcttttatgagccccaccagatggctgacccttccccctctcattgtaatggtaaggacacaggcttagaatctggtctccgcttgctggcttagagaccttaaacaaaccacttaacctctgcaagcctcagtttccttctctgctaaatgatgaggctgacaaccatgtgatgagggtaggggagcgaagctggagggagacagtctttagtattcctctgcccttggttagaggtaaagaggtattcagttggaaggggatattattgctgaatcactgggaacccc

SEQ ID NO: 7410 - DNA, 2185 bp, Homo sapiens
tatgtatatttatgttgaacaacaacaacaaaaaaattaaagaaaaaaaaaaaggccgggcacagtggttcatgcctgtcatcccagcactttgggagacaaaggtgggtagattgccttaagctcagcctgggcttgagaccagcctaggcaacatgatgaaacccggtctctaccagaaatacaaaaacaaacaaacaaaaccacaaagccaggcatggtggcatgtgtctggtcctagctactcaggaggcagaggtggaaggatcgcttgagcctggaagggcagaggttacagtgagctgagatcgctccactgtactctagcctgggtgacagtgtgagactctgtcccaaaaagaaaaaagaaaatattttggttcaatacattgtaattagtgtctaataattaaatcattcttctcttgcagattgtggtggtgccatgcagcaagaatcagagagatgcagagttagagccagaaggcctgacatggcactttatgtacctaaagctcgtaggggtgcagtactccttaagacaggtgatgaagaagaaagctgtggttcacctaactctgtggtgaaagaaaagcaaaaagaaagttctctctcccaaaaagaagtctttaaagacaaaccggaggctcgaagactaaatatcaatcctgatagaaaggagcataattgtagagaagaaaagaaatcttcaacaaaattaagaatggacacatgccttcaaaaaacaaatagagtttgttctaagagaggaaccactgaatccaaagaagtattatcccaaggacaacagcagggagccccaaatgctggggttataactaatgcacctttgcagagacattttaaaccaaagaaggtggagtgtttggaagttgaaactacggatgtgacaggacatgagaggatacttctttcacaggcctgtttagaaatcagcgaggctcaagttccaagcaaaccattccaaaatgtggaattctgtgacttcagtaggcatgaacctgatggggaagcatttgaagacaaagatttggaaggcagaattgaaactgataccaaggttttggagatactatatgagtttcctagagtttttagttctgtcatgaaacctgagaatatgattgtaccaataaaactaagctctgattctgaaattgtacaacaaagcatgcaaacatcagatggaatattgaatcccagcagcggaggcatcaccactacttctgttcctggaagtccagatggtgtctttgatcaaacttgcgtagattttgaagttgagagtgtaggtggtatagccaatagtacaggtttcatcttagatcaaaaagatacagattccattcctgcaactatgggtcacatctctctgtcagagagcacaaatgacactgttagtccagtaatgattagagaatgtgagaagaatgacagcactgctgatgagttacatgtaaagcacgaacctcctgatacagctgtccttgctcatgaaacacatagagatagtggatttaagaatgtaggtgacattaccaataaagcatgtatgatggacactacaggtatgtcctgtagtgatcatgtaactgttgatagcccttatgtagttgcagttagaatagctgatgagacctctattaatacacgaagtttctcaaagtttgtaggaatgagtgcagatgcaacccctcttcatgtagctagaagtgggaatgacactgaagatttcagcaacccttctgcttgctcagatatttatggtgagagtatttcatctcattttacagagtcaacaggaaagttgatagagagcttgtcagattgtgcttcctccttacctataaaaaagattgctggtagtaattataacacttttttggactctgaactcagtatgttaaatgggacaaaagttctttcagacagtgccgtgggcattgacctgggtagtactggtgatacaacagaagcattgcacgaactaagaactgccgaagagttcaaaacagaagagcaagatgactcagggagtatagaatttggtgtatcttttcctgatagggaatcatcatctatggaaacatccatcgaaccaaaagcaactgaaacttctcacacagagggaattactgccattgaggagagctgggagtctatg

SEQ ID NO: 7411 - DNA, 1181 bp, Homo sapiens
tttaagcaacaaaatagaagaatatcaatacatatccttgatacttattgaaatatttgtaaagatcagtaagctgagaataatgggcaattgtgttgaagcactaaacatagttgaaaagtagaatttaaatatgtattagcaagactagaatctgagtccctactagattctgacttattccatatacttctattagcctcagatattttttattatatagtagtaaatgtaatgacttacagtagtatcattttcacttacaaagcacttaggaaattaaaggaattaactcttgttatcaggtaagagagaccaggatatccacttgtctcatgactaaagtttgccttgtaatttggattaagggaaagtcattggttatatgaagtagacaactgtggttaatactgctcttatttacagagagaaagcggttggaagccaagcaacgggaagacatctgggaaggcagagaccagtctacagtttgaacatcactcaatgaaagggataattccatgaatcagaaaatgtttccatagccttcagataagatgatccttccagagctctatgtacatgcagatgtgcatgttaaagagataaagtgatcgagacaaggactgactgggtatagaaggaagacagactcctgtcttcactcctaaatgcagttctttggaatcaccctactgtggtgggcgtagtagggagccatcagctaggaagaaacgtgggagatgtgaattccaagagttgcctggacagggcaagtcatgttagcgtgggtcacacttccaagatatttaaagcaaatacaaaacagaacagaggattcaaaccgcaagtatgggagatttaggccctgcagaggcagaccattccttagtatctcacaaagcagagtaatactggaggcagagtagggggtggttggagagcagttagtacaaagaggcagaacagtgtctggtttacttggcatacacagaatctgcactgccggttccagaactgcaaagttggtgaactacaggagatgtgggtatttagactccaaagtttatactgagctcagtgcctgggaccgctccagctgcactgcagccaggggggataccagcttcattcctcagagtaaaccaaccttgggagctgtgtgccagttccagtgtaag

SEQ ID NO: 7412 - DNA, 1280 bp, Homo sapiens
ccacatcacaagagctaccccctccttagggagtaaaaagggacatgttccggggaaccctctgtgaatacaaagaagtgctttcttccttatccccgaccttccctctcctcaactccctcatctccttcattaggcagagggagcattatattttggcatggcagtttaggtaaacaagggaaggactgatttcctgttggatccagcaaacatcccccaaacagtaacaacattatgctcacacatgcagctaatggtctgtgaaagaatgtgcagctagcaggggagcatgtggtgactgatgactagattcaagcagggaggttacccacagctgcttgctggatccagtttctaagagggaccaaaaaaacaggccaggcagccagccaccggctctggtctcagccttgctgcccacattacacgtttgataggtgcagccagttctaattcttggaaaaggccatacaagggttgtgctgttacaactctgagctgaaagggaaggacatgggaagactggtggctggcatgacttataactagatgaggaatgttaacagaataccaaccaccaaattccaggtagaaccaaaaatgtcaaaagactttcatctcagcatactttagcctcagagaaactaaggtgctaagaatgtcagcttagtcttcagaagcctaacttacctttatactacaaagactttcactctatgaagagcatatcataactaatgggaaatgtacttttctactaaattccaggtaatcctgagatttagatgttcaacacatatgcacagcagagtacattagctgtcttcctgaatatctaacaaaggcaccagtggcagctacagggtgctctccagctaactcagcttgagaaagcatggcttggatgtgcccaaggatttaattcccatctggaaaagctcaatatagtctgtgctgggccatagcaggagctcttacctccagctagcatacatcaatcccaactacttgaataatgtaactaaaaagcacattctctactaatggtagaagcagcaacactccataattttcaagtgtaggcttaaaaaaaaatcctttctctgggtctggttataaggataaatctggaaagttagaggtggctgactattggctgaaaaaaaggacaggctactagcatacagcattagaatgagaaccaaaataagttattgaaattacgaagattacaagaaaactgggaaataaacatggggctatatgttaccattaac

SEQ ID NO: 7413 - DNA, 1159 bp, Homo sapiens
tcccacctccccacacccattgagtcattcacaggcaggagggagactgatcattcctctgggttatctgcatctcaaaagaaaatgcttacccacaggaactgttaactcaggggttcttaacttggggtccatcaccccagggggtccatagttggacttcagagggtctatgaaacccctaaaactgtcagtatttaatgtatttattcttgtatgttttttccagagcattaaagctttcataaggttctcaaaggtctcagacctacaaagagttaaaacaaacagacaaacaaaaaaaaacactactattttaaatagtggaactttcagcccagcgtttctgcaatgcagagtgaagtggatactgggcagttcgagacaggtttttaatcataagtggtcttttcaaatgtccatcaattgatggggaaggctggcacccaccaagaagtggaagtcctcagaaattctcggcacaccctagagtattgtacaaccaacacccccacataactttgtcccctcttccccaacaacccagagcaggtgttgcagacaggagggccacagcgtgtggaagtaaagactttggagctagagaagccttttccagcaatgattattgacttcaccacaccccttgcctggcctggcctgaggctcagcagtgcatgacttctcgtagataacttcacagtcatccagtcccaacacctgctcttgcctggtaggaacaggcgaagtgtcagccctcaatgttgggtacttagacccaaaccaataaatggtgagttttgaacaagaactaccatcatgcaggcttcttgcccagctgaccactggccccggggtgcctgcctggctggtcttcatcacctgaggccaccaggctcaagccactgctgttgcattacacccatccctttgcaaaatccctatggagcctgtcaccactcccctccctatatacccccaccccacaaagattttcttcaggttaaaaaaaaagtttaaaaaaaagattttaaaataaagcatttatgaaggcttaataaattgtaaataatttttaaataaaatgaaaatgcctttcctggaatgtggctgttttccttgcccctggaatcttctgacgtggcttcatttgagatgc

SEQ ID NO: 7414 - DNA, 1380 bp, Homo sapiens
attgctgagcctccactgctttaaggatcccctctgctctgattatgtcttcttttggttttcaacagccaagcaggttgagtatctggtcaatgaaaagcacatctacctgctgccaagtggtcgaatcaacgtgagtggcttaaccaccaaaaatctagattacgtggccacctccatccatgaagcagtcaccaaaatccagtgaagaaacaccacccgtccagtaccaccaaagtagttctctgtcatgtgtgttccctgcctgcacaaacctacatgtacataccatggattagagacacttgcaggactgaaaggctgctctggtgaggcagcctctgtttaaaccggccccacatgaagagaacatcccttgagacgaatttggagactgggattagagcctttggaggtcaaagcaaattaagatttttatttaagaataaaagagtactttgatcatgagacataggtatcttgtccctctcactaaaaaggagtgttgtgtgtggcggccacgtgcttctatgtggtgtttgactctgtacaaattctagtcccaaagatcaagttgtctgaaggagccaaagtgtgaatgtgggtgtcggctgcggcattaaattcatcatctcaacccagagtgtctggtctccctgctctttctgcatggttgtgtccctagtcctaagctttggttctttagggtgactgtggtaagaaggatatttaatcatgacatgcacggacacgtacatatttaactgaaacaagttttaccaaacagtatttactcgtgatgtgcgtagtgcattctgatatttttgagccattctattgtgttctacttcacctaaaaaaataaaataaaaatgttgatcaagacatggagttgattttatgaccactaatgggttgtgacccacagtttaaaatgaatgctttagagggttttactagtggctaaaggaaaaactacaatgtgttcttacagtatagcttccttcagtgaactcaccatataactccctggtgattttgcgggcttgtcatttggaggccagctgtcttatgttacttaagaaactggacttcttggactgtgagaggagatgacatcactcaggttgattatagaacatcagcccgttccctgctgtcagagtccctcctggtttattgaaacagaaccacaaaaacatacatcacaatttccagagtccaagggccgctccaaatggccattttgtagaatttggtggggtttgatgttacttaacacaagaggtctattaattggagtttttaagtatttaaagttaattcttgtgattttaataggatctgccactttctaggactcatttgggttgttagaaa

SEQ ID NO: 7415 - DNA, 1185 bp, Homo sapiens
caaaaacattctccatgtgaggatgagcaaatatgaagggatagcattgttgccacgttcattttctgtctgggcaaggccatggggtggaaagagccaaagctaagctgaagctccacagagctcacaccatgttatctacttgagggagtgggaggtgtttgaagactaaagccaactctttttggctaagaatcttttctttggtagaacttctgtctcctcccctctaggaggatcaccatctcacattttaaaagttaggtgctctttgtatgcgaggattgggattgttaggggcctgtgttcgtgatgatcactatcatggagtcatttcttgttgggaattgttagagggtaagatcagagataggtacttagttcaagaagactctctgaagctcccaaactgtagatatgtcctgtgtgcgaactggctggctttacagaagtcctgatggaagtgggtttattgttttttgactcgttaccaaccctctgcttactccttcccctcaaaaaagggaagctgacttctcaggttagccagcagctcactcatacttttttctctctctattccattggctgatctgctgacttggggctctgaatctggatactctccatcaccggttggctgctgtcaccatttccttcctcgttgatggcactactagtggtcaagcagaggatgcagatgtacaactcaccataccaccgggtgacagactgtgtacgggcagtgtggcaaaatgaaggggccggggccttttaccgcagctacaccacccagctgaccatgaacgttcctttccaagccattcacttcatgacctatgaattcctgcaggagcactttaacccccagagacggtacaacccaagctcccacgtcctctctggagcttgcgcaggagctgtagctgccgcagccacaaccccactggacgtttgcaaaacactgctcaacacccaggagtccttggctttgaactcacacattacaggacatatcacaggcatggctagtgccttcaggacggtatatcaagtaggtggggtgaccgcctatttccgaggggtgcaggccagagtaatttaccagatcccctccacagccatcgcatggtctgtgtatgagttcttcaaatacctaatcactaaaaggcaagaagagtggag

SEQ ID NO: 7416 - DNA, 1189 bp, Homo sapiens
ttcatggacctgactgcttagcactgatttctctttttgcctgacttaggtatttggctcgagtaggggagcttgaagctactgacactgaagacccaaatctgaattatggacttgttgttgactgtggcagcagtggttcccggatttttgtttatttctggccaagacataatgggaacccccatgacttgctggacatcaaacagatgagagaccgcaacagccaaccagtggttaaaaaaatcaagccaggtactaatcagaatatattttgttgtcagtctcttttaaggcatgaaagaggagacaaaagaagcagaaagcaagctacccctttcttcttgagagtctgggtaatgggagggatatctctttcattgtcaccccctacctctcaaataaataaatgtttaggaccttgaggagaactttatagggtatcagtttcctgagtcttatgtgagccgctttttaaagaaagttttgtctgtttgtttgttttaacttaaggaatctctgcaatggcagacactccagaacatgccagtgattaccttcgtcctctgctgagctttgctgctgctcatgtgcctgtgaagaagcacaaggagacccctctttacatcctctgcacagcaggcatgaggcttctccctgagaggtgagatgcagggtacaggaaacacaggaaaacggtggcacaagagatgaaaggccagtttcatgcactgtcctctgtggttccctggtctatacccctaaacccaattatgacacaatcattcattcccaacttcttgtcatttgctgctttgggatcagtatctatctgggatgactatagtgattcttagtttggattgagggttgggagtagtggtgatggtaatagatttggatcatcgggcacatagagaacataattacagaataaattaggaagagggtcacctgatgacctggatacttagggactagtcagagagctctggtaggaacactaccttttctgtaactctgcctagaaccctggcaataactgggggagtccctcttcttgctgctactgcaaagctcagtctccattgccttaggcctgttttctcagccccagccagtcacatcatttccacttgacctttgcaattcagcctgacaccttgccacctgatccctcttcctgcat

SEQ ID NO: 7417 - DNA, 1874 bp, Homo sapiens
aacactggcgagcaggtgccccagctcggactatactgctgagttctggtctgttgctgccactctacaggtccagggttgttagatcttctgggtttttgttttgctttttgaaataaggaaaataagcttatcttaagtttatttttccttggatatacctagattccatacagtgacaatacaaatacaaaggaagaacatctggatttcatccttgacctcatttacaaagcaaaaagagatgctggattcagatataaatgtttaattttgcagtgtttaagtcagcaaatcttctgttttttaaaaataagccacatatctagatttttctgtgaaagctctcaattaagtgttgggaactaatttcaagattttaaaaaatgttatgcaggcttaacgtgtctgagagccataaatgacctaacgtttcccgttagtctctgaactaggtgatctcagttctctttcaactccagtactctgtaagtttctgtgacctgtagtgtaccattctcaggtggtgatatggtttggatgttttgtcccctccaaatctcatgttcaaagtgtgacattcagtgttagaggtgggcctagtaggaggtatttgggtcatgggggcggatcccttatgtatgactttgtgccatccccatagtaatgagtgagttctcactctggttgtttatgcaagagctggttgtttaaaagagcctggaacttcctcctctctcgcttgctctctctcaccatgtgacacactggctccccttcaccttctgccatgattgtaagcttcgtgaggccctcaccagaagcagatgccagcgccatgcttcctatacagttctatgcagaacagtgagccaaataaacctcttttctttctaaaaattgtcagtatttccttatagcaatgcaagccgactaacacaggtgattcttagcaaaacagtttgtcaatttttcataaatgctggaccctggctgggcttatgctattgcctagaagagattcccaacttctctcttatttgaatcttagaaaaatcccaaagcccaagcctcatctaagaccaattaagtcacaatccctggaggaagtaaaaggcatatttttaaagttccccaggtgattccaatgtgcagacaagtctagggaccactggcttaggtcctaatagcctagttaccttagaaagttctgactagcttattcccattcccttctaatttccaccccaccttatcatttgatctgctatgttgctcctattagtatgttagtaggatatggtctcttctggatagaatccttcaaagaaagggaactgtagttcctgaggcaggttcccacaccatcctctcctgatcctcaaacccaggttgtccttagttagtaactgagtcagcagagggcagtatgacccaacccaaagaaccatatattaatgcttctacagttgcctccaaggaagtagcaactcatgagtaagttaaggtttcagatgttttacttcatttttcttttattacagatgatgagtacatttggaaaaacaactggttgcatttagctatataactgtattatatctatgagcttctggtgaatgattatcttagggttttttttgtatttatgttattcccagcactcccagacacatatcaaatattgaattagtgaatgcatgaatggaaaatggataattacagattgatgttccaaatacctttttccaaaaaaacaagtcatcacatacctataggattaaatagatttcccttaatattttcaaaggtctctctgcacttacgtccattgtttttaaaacatgaaggaaattaaaacacatggctttctt

SEQ ID NO: 7418 - DNA, 1115 bp, Homo sapiens
aagatctcaatacatagtgtatattgctaagtgaaaaaaagcaagtgacagaacaatatgttttttaaaagcacaaaactatatatttatttctctataaacatactaaagtacaagtatgcagaaactggtaacagtgactactctggggaactgggatggattgaagaataaggggaattttaggtttatcaattttgttcgaatttctttcattgtaagcatatttgcttgtgaaattaaaaatgtgtgtattttaagtgctctgataggaggatgtggaggtttgtgtgtggttatccacgcctggccattttcaatgtgaactttgggttactgcctttcctattgccttctttcctttgtgacaggtgggcttgggcatcagcacgctgctgatgtatgtcccaactcctctggccgccactcaccagtcaggctccttggctttgctcactggtgctctttggctgatgaatgaactccgaagagtcccaaaatgattcttagaggaccagcctcctgggactgtgactgcttttgagagctcttcagagatcataagaacttgggcttttctacgagatgaccttgacataccaagtggtttccaaatggtcaacttacttaaaaatcttttcctgttttgagatagtcactggatcaagaatgcattaagtgtggttaccctaaatgttcccttttaaatctgcttttcatgttgaaaatcagttttaatgtagagaaagaaatgtctgccatttgctgcttaacaggctttgtgtcaggtttttcagtgttggcaagctcttggttctacgtggatgatttctacgtggatgttctcctgagtccttaattctgcctaaatagaatttctttatgatcttaacttcacttccattaggtgaagattgaaaggataggattgacatacccaaagtagccagctggtcttcagcaaaaaaaaaaaagctaatgtcttctaatatcctgattttcagaaatggggaaattgcagattttgacaagcttaatgtgtatatgtagcaaaatggtttttaagtacttggaaaaggaggtaatcgccaaatagttccatttttttttttttt

SEQ ID NO: 7419 - DNA, 1169 bp, Homo sapiens
gggactacaggcatgagccacagtgcacagctaatttttaaatttattgtagagacaaggtcttgacatgttgcccaggctggttttgaactcctggtctcaagcgatcctcctgccttggcctcccaaagtgctcggatttctggtgtaagccacagcacctagctggccagcagttttaatcaccattgctttttcacagagattacaaaagtcagcagagtaaaatatgtagataaagtcttagtgttattatgagaatggttttgacctcacagattctctgctaggatcttggagacccacctgtagggttccatggaacactctgaaaactacaggtttatagaactgctccaattcaataaattgtcaaaattgttcatgctcctaaagctctaggtgtatttccttgaatttggtagctgtttaaaatgagaggttgcactattagtcgtgataatgttctgctgggtgatgactgaggtcaccatctctgctcctcttttctttaggtgacctggtgattctcgatggcattcccactgcaggctggctgcagggccgaagctgctggggcgcacggggcttcttcccatcttcatgtgtccgcgagctctgcctctcctcacagagccggcagtggcactcccagagcgccctgtttcagattccggaatattccatgggacaagcccgggccctaatggggctttctgctcagctggatgaagagctggacttcagggaaggggatgtgatcaccattattggagttcctgaaccaggctggtttgaaggggagttagagggccgaagaggcatttttccagaaggttttgtagagctgttggggcccctgaggactgtggatgagtcagtaagttctggaaatcaagatgactgcattgttaatggtgaagtagatacccctgtaggagaagaagagatagggccggatgaggatgaggaggagccagggacctatggggtcgccctgtacagattccaagccctggagccaaatgagctggatttcgaggtcggggataaaatccgaattctggcgaccttggaagatggctggctggaaggatccctgaagggcaggacaggcatctttccttaccggtttgtgaaattatgtcctgacacacgggtggaggaaa

SEQ ID NO: 7420 - DNA, 1277 bp, Homo sapiens
cattttaagtaaaagtctacctgtgtttttttctaaaaaggctgctcacaagttctatttcttgaagaataaattctacctccttgtgttgcactgaacaggttctcttcctggcatcataaggagttggtgtaatcattttaaattccactgaaaatttaacagtatccccttctcatcgaagggattgtgtatctgtgcttctaatattagttggctttcataaatcatgttgttgtgtgtatatgtatttaagatgtacatttaataatatcaaagagaagatgcctgttaatttataatgtatttgaaaattacatgttttttcatttgtaaaaatgagtcatttgtttaaacaatctttcatgtcttgtcatacaaatttataaaggtctgcactcctttatctgtaattgtaattccaaaatccaaaaagctctgaaaacaaggtttccataagcttggtgacaaaattcatttgcttgcaatctaatctgaactgaccttgaatctttttatcccatttagtgtgaatattcctttattttgctgcttgatgatgagagggagggctgctgccacagactgtggtgagggctggttaatgtagtatggtatatgcacaaaactacttttctaaaatctaaaatttcataattctgaaacaacttgccccaagggtttcagagaaaggactgtggacctctatcatctgctaagtaatttagaagatattatttgtcttaaaaaatgtgaaatgcttttatattctaatagtttttcactttgtgtattaaatggtttttaaattactttcttgatctctattcattataaaaatcagattataataaaacagttgaatatggcttaggaaaatatgaaggttccatgaagtggaattaagagcatagaataactgtactttccttaggaataataggacttatggtaaaggtagtattgggcaacttctttaagagtgttttcctctgagatgtcctatcaccactatctacatctaaaaaacatgctcgattcttgccctataaactgatgtcacagccccaccatccccatttttgctagtggtatcattttcctagtcaaccaaattttttagtcatcacatatcactgttcgtcatctattataataggcagtctctctcttgtttccctggttttagaagattttagtaataaacatttattgggtacctgttacttggagggtattaagctagatggcaagatctgaaacaacataggcagtat

SEQ ID NO: 7421 - DNA, 1118 bp, Homo sapiens
tcaagggatctgcccgccttggcttcccaaagtgctgggattacaggcgtgagccatcacacctggctcttgtgtgtattcttaaacctggattgttggtccagaatatgaaatttattattcagaggtaggaaagactcagaggagatgggacttgatttagaacttgaaagaaataatttggattagcagagagaaaaagagtattccaggttgcagaaaagcaagcaaaaaagacagatacaggaataatctcaagctctgtgagtgtagcgattgtgtcatttttatttccccccttgtatgtggagcggggcttaagtattgcaggtgctctgtaaatgtatattgaactgaattaaatggaaacaagtggttcttttagcatcagtttctagcatctatgggaatcctgtttgtgtggacaggaaatcacaaagaatgataaatcaactctaaaatcctcaaaagtaactaacctcccttgccctttttctcatcttcttgtatatagtacaggacagcaaaatacagcttccaattatacagctgcgtaaagtgtgggctgaagcagtgcactatgtgtctggactaaaagaagactatagcaggctctttcagggacaaagggcagcaatgtaagtggattctgttgtttataagcacaatgcaatgtgcatcatatactcaagaattaatcttgccggttttcactaatcaatattgcatgtaatagtaacatactgggccaatttgaagtgtaatgttctgataaacttgtagaattcttactaatggactgagaccattctattgtaatggcttgagggtaataattcccatacggtcctagtataaaaagattgtttatcacaaaatattataggcaggaagtctttagagatcagattctagagctcagttatttctcatagattgataatagaaacttaggctttggccttgtggcagtttatgtttttacattattgttcaatgtttctgaatgctgataatatcttttttctttttcttttttttcttgctgtggtttaggttaagtcttcttagatataatgctaacttaacaaaaatgaagaacactttgatctcagcat

SEQ ID NO: 7422 - DNA, 4585 bp, Homo sapiens
agagactgaattcatccattcaacaatagcgagtttctcccaggtgtgaggtaccctgctagctaactggtgtgcacaaatcaagaaaacctcaatgcaccgtcactccataacttctcgcttttgtttcaggtgagggcttccacaactaccaccactcctttccctatgactactctgccagtgagtaccgctggcacatcaacttcaccacattcttcattgattgcatggccgccctcggtctggcctatgaccggaagaaagtctccaaggccgccatcttggccaggattaaaagaaccggagatggaaactacaagagtggctgagtttggggtccctcaggttcctttttcaaaaaccagccaggcagaggttttaatgtctgtttattaactactgaataatgctaccaggatgctaaagatgatgatgttaacccattccagtacagtattcttttaaaattcaaaagtattgaaagccaacaactctgcctttatgatgctaagctgatattatttcttctcttatcctctctctcttctaggcccattgtcctccttttcactttattgctatcgccctcctttcccttattgcctcccaggcaagcagctggtcagtctttgctcagtgtccagcttccaaagcctagacaacctttctgtagcctaaaacgaatggtctttgctccagataactctctttccttgagctgttgtgagctttgaagtaggtggcttgagctagagataaaacagaatcttctgggtagtcccctgttgattatcttcagcccaggcttttgctagatggaatggaaaagcaacttcatttgacacaaagcttctaaagcaggtaaattgtcgggggagagagttagcatgtatgaatgtaaggatgagggaagcgaagcaagaggaacctctcgccatgatcagacatacagctgcctacctaatgaggacttcaagccccaccacatagcatgcttcctttctctcctggctcggggtaaaaagtggctgcggtgtttggcaatgctaattcaatgccgcaacatatagttgaggccgaggataaagaaaagacattttaagtttgtagtaaaagtggtctctgctggggaagggttttcttttctttttttctttaataacaaggagatttcttagttcatatatcaagaagtcttgaagttgggtgtttccagaattggtaaaaacagcagctcatagaattttgagtattccatgagctgctcattacagttctttcctctttctgctctgccatcttcaggatattggttcttcccctcatagtaataagatggctgtggcatttccaaacatccaaaaaaagggaaggatttaaggaggtgaagtcgggtcaaaaataaaatatatatacatatatacattgcttagaacgttaaactattagagtatttcccttccaaagagggatgtttggaaaaaactctgaaggagaggaggaattagttgggatgccaatttcctctccactgctggacatgagatggagaggctgagggacaggatctataggcagcttctaagagcgaacttcacataggaagggatctgagaacacgttgccaggggcttgagaaggttactgagtgagttattgggagtcttaataaaataaactagatattaggtccattcattaattagttccagtttctccttgaaatgagtaaaaactagaaggcttctctccacagtgttgtgccccttcactcatttttttttgaggagaagggggtctctgttaacatctagcctaaagtatacaactgcctggggggcagggttaggaatctcttcactaccctgattcttgattcctggctctaccctgtctgtcccttttctttgaccagatctttctcttccctgaacgttttcttctttccctggacaggcagcctcctttgtgtgtattcagaggcagtgatgacttgctgtccaggcagctccctcctgcacacagaatgctcagggtcactgaaccactgcttctcttttgaaagtagagctagctgccactttcacgtggcctccgcagtgtctccacctacacccctgtgctcccctgccacactgatggctcaagacaaggctggcaaaccctcccagaaacatctctggcccagaaagcctctctctccctccctctctcatgaggcacagccaagccaagcgctcatgttgagccagtgggccagccacagagcaaaagagggtttattttcagtcccctctctctgggtcagaaccagagggcatgctgaatgccccctgcttacttggtgagggtgccccgcctgagtcagtgctctcagctggcagtgcaatgcttgtagaagtaggaggaaacagttctcactgggaagaagcaagggcaagaacccaagtgcctcacctcgaaaggaggccctgttccctggagtcagggtgaactgcaaagctttggctgagacctgggatttgagataccacaaaccctgctgaacacagtgtctgttcagcaaactaaccagcattccctacagcctagggcagacaatagtatagaagtctggaaaaaaacaaaaacagaatttgagaaccttggaccactcctgtccctgtagctcagtcatcaaagcagaagtctggctttgctctattaagattggaaatgtacactaccaaacactcagtccactgttgagccccagtgctggaagggaggaaggcctttcttctgtgttaattgcgtagaggctacaggggttagcctggactaaaggcatccttgtcttttgagctattcacctcagtagaaaaggatctaagggaagatcactgtagtttagttctgttgacctgtgcacctaccccttggaaatgtctgctggtatttctaattccacaggtcatcagatgcctgcttgataatatataaacaataaaaacaactttcacttcttcctattgtaatcgtgtgccatggatctgatctgtaccatgaccctacataaggctggatggcacctcaggctgagggccccaatgtatgtgtggctgtgggtgtgggtgggagtgtgtctgctgagtaaggaacacgattttcaagattctaaagctcaattcaagtgacacattaatgataaactcagatctgatcaagagtccggatttctaacagtccttgctttggggggtgtgctgacaacttagctcaggtgccttacatcttttctaatcacagtgttgcatatgagcctgccctcactccctctgcagaatccctttgcacctgagaccctactgaagtggctggtagaaaaaggggcctgagtggaggattatcagtatcacgatttgcaggattcccttctgggcttcattctggaaacttttgttagggctgcttttcttaagtgcccacatttgatggagggtggaaataatttgaatgtatttgatttataagttttttttttttttttgggttaaaagatggttgtagcatttaaaatggaaaattttctccttggtttgctagtatcttgggtgtattctctgtaagtgtagctcaaataggtcatcatgaaaggttaaaaaagcgaggtggccatgttatgctggtggttaaggccagggcctctccaaccactgtgccactgacttgctgtgtgaccctgggcaagtcacttaactataaggtgcctcagttttccttctgttaaaatggggataataatactgacctacctcaaagggcagttttgaggcatgactaatgctttttagaaagcattttgggatccttcagcacaggaattctcaagacctgagtattttttataataggaatgtccaccatgaacttgatacgtccgtgtgtcccagatgctgtcattagtctatatggttctccaagaaactgaatgaatccattggagaagcggtggataactagccagacaaaatttgagaatacataaacaacgcattgccacggaaacatacagaggatgccttttctgtgattgggtgggattttttccctttttatgtgggatatagtagttacttgtgacaagaataattttggaataatttctattaatatcaactctgaagctaattgtactaatctgagattgtgtttgttcataataaaagtgaagtgaatctgattgcactgggtctgggagtttcttttggctgtgattcaaagtcttgggatttgtctctggctcatatctatgtctgtacctttaagagtataaaagaagtagaagttacaatggttgactcataccccattaacctgccctgctgtcctaaaggtaactttaggttaaactctgggacgcaggaagccaggagtctgctgccattaaatcaaacacattaacaccagctggcaacttggccctggggaagtgccagggttctcgggtgtgtcacgtggtcggtcacatagacctaagataaagacactgggagaggaaaagaccagcaggagaagcgctccctgggaaagcagttttttg

SEQ ID NO: 7423 - DNA, 1205 bp, Homo sapiens
acactctgtaaggacctggggcaggatatcttctcccccagggatcttctatttaagtggcttctgagagggtgaacaggattgttacttttaagcctacctctgctgtgacccatcatgtgggtcttttgtttctcccttctgtggtttatgagcctgcccttaccttttccctgcctctgacttggtatttccaggtccgtatttctctgtagcccagggtctggggtagagctgactgctgttcaccctttgaacaactcatggacgtgagggatgggtgctgagcagaaccaagagaggaaactttggcgctgttaaaatggaatttctcatctgccggcattattaagggtgggctaggttggatggaaggtgaaagggatgaactgccttttgctggaagctgtcttaggctgtgagacaggagcaggggaaccacagcctatggggaactgcccttgactccacctatgttggagccttagcccaaggccattccttctgtgatgataaagcccagttctggaattggagccatattaaggaatgattctcttccagcgctgctcctcaagggttgggggtccttctccctcgcagccaccacatgtctcagggctaccttctccgattggatttgcatttgtggcactgtctttgatgcagtgatgtacttaatggtgcaataaagctgcttcgatttggtttcctctgtcatctcccagtcattgcctcctctgggttctattttgccattacctttctagtcctctttattcttgcttcctgcaccctagtaaggcaggggagaggcttagggagagataaatcaagaaagttaaaggaaggtgtccattcccactgaattaggttctctccttgcagcatttgtggtcactctgctgggtgtgttgagggtggggggattgtctcccttcatccgtgcctggtgttcagttccagggttttccctaccccacttcagggctgagctcagctatacaaagggactgggtgtgaagccaggggatgctagccctaatcctgttgtagatcccatcatgtctgcgggctagatgtgtgtgtgtttgggagggagggattgttaggcagtatttgtttgtaaagccacttgctcttcagataatacttgcactaacttctattgatgaagcagtgtgagccctagcaaagtcctttcc

SEQ ID NO: 7424 - DNA, 1057 bp, Homo sapiens
aaggttaagcatcacttctttaaagaaaaagtttgggggccagatgcagtgtctcacacctgtaatcccagcactttgggaggcagaagcaggaggattgcttgagcccaagagtttaagaccaacctggacaacatattgagaccttgtttctttaaacaaaacaaagaaaaaccagtaaattaaaaaatttggtgttgaacataactcaatgaaggataagtaagaattcagttgtatgagaatccatgttggctaaaatttgcctgactacatctgttctctgtgggagatgctggtatggatttgggcttggattttcagatgtggagaggccatgccaggggctgtgtgtgcatgcactaataggattttcttcttggggaacataggttgtatctgcagcaaacgctcaatgacactgtgggcaggaagattgtcatggacttcttaggttttaactggaactggattaataagcaacagggaaagcgtggctgggggcagcttacctctaacctgctgctcattggcatggaaggtaagaaatctttcaaaagcagcatggcttggagtcatatgaacctgatttctaatcctgtcttcaccgcttattagctccatgactttgaacaagccacttcactttcttaagcctcagcctactcagctctaaaagaaacataataggggctggatgccgtggctcacgcctgtaatcccagcagtttgggaggccaaggtgggtggatgatgaggtcaggagatggagaccatcccggccaacatcatgaaaccccgtctctactaaaatacaaagaaaacaaatcagctgggcatggtggtgcgtgcctgtagtcccagctactcgggaggctgagagaggggaattgcttgaacccaggcggtggaggttgcagtgagccaagatcacgccactgcactccagcctggcgacagagcaagactctgtctcaaaagaaagaaaaagaaacataatagggccaggcatggtagctcatatttgtaatcccagcactttgggaggccaaggcag

SEQ ID NO: 7425 - DNA, 1520 bp, Homo sapiens
atgggaatggctaccgggactctaatggggtgaaagagaggggaggcttgcctttgagagcctatatagccttcctgtgagagaggattagatagggttccaactgggcctacaagctcaagccatacataaaaggaccttgggacataagaaccaatgattgtgcataagttctaaattagagacacatatagtttctctctttcagcaccagctcttgcccctatgctgggtaccaagggagttctcctagctgtggcttctctaggttctaggggtgcaagcctctgtgtgtttgtttgtgtgtgtctgtgtgtgcgtatccacactaggggtgcaagcctctgggtgtgtgtgtgtgtgtgcgtgcgtgtgtgtgtgtgtgtccgtgtgtgtgtgtgtgtgtgtccacactggccagcctccctacttaccaaggttctccactgcttaccttttccagtgggacagtacagtgtgagcccccgggaagtactgcctgacctatcctaagcttttacacttggattttagccatcatatgttggccaggtctcactgcagcctgcccgaggctaactggctagagcctccaggccctatgatgctccctgcccaggccatatcctttattcctgctgagcttcctggctgaatagatgaaatggggtcaagcccaggcagctcattcactacctgtgatccacctcagggcacgggcaaacacataggcttgcgtcttaaagccagctcctctgccagaccccgttgtaatgtgccacaacaccctcaatagtcagggcaactggtggagcatggaagtcgaatttccttttctgttaggagctactcctgggaacccctctcagggctgcagcttacaggtgggcagctgtgattgcacaacttgaagggccatcattcacatctattcagtgggagtggggtccctgggattgggcagtgtggtggccctgtgtctcctcacctctgctcctgtcttcatcaccttctctctggaagggaagaggagttggaaggtctctggttttcttttctttttttttttttttgccaaaggtttacttccagcatctgagctctggctctcacccctgaagctcagttatagtgcactgatgaactgagaggatgcgtgtggatgtgtgtgcatgcctgagtgcgttttttggggaggggtgtttatttttagtaccccattctggggttctctgatgcagtgtggatgtgaagatatggtaccttctcaagtgtagctctttcaaatatagtcaatgctgggaaatgtgattgcagtgatctctatctctccacttcttttgggaaagaggagcacaggagcggaggaaaaacttggccacagtcacacttggaaagatagtagattattttcgttctcctcagcaggtctgctgtattcctcgctcagcgctcaaagatgtgggtgatgtgtcaaggaggcatgcactcagctggtccttgctgagttatttgctgac

SEQ ID NO: 7426 - DNA, 2136 bp, Homo sapiens
cttactcccctttgagaccttcagctgcttgtcttccactgcctgcatacttctctgatgtcttctcaaactgttggctctaaagggatgttccagcctccctctccagagctgcctgcagtttcccttattcagctgtctcctgcctagtctctccagcggcctccttaccaagaccctttttcctaaacagttgtccttccctcagaaactccatggctgcaagtgtgaatagacttgtctttaggatccctctctctggtcatccctgatcatcttagggccgtctcccttttctgatttttgacagctctgtttattttgcccatggctagtcctcttgttttgtgtctgctgtgtgttcttgcccttccattgtcagttctgtacatcctggttcagcttgtctcactgtggtagccccttctgcttgtcttcagccatcttggtttaatcctcataggtcatggatgaatggagccttgctgagcactttgagggcatttctgttgggcacaacctcagaaacgggaagtcttgaggcctgggggcgtgtggtcagtgaggcctccagaggtgggttaggggtgggcacctacaagggccagttgaggggagaggtgcagggattgctgaggagactttgtgagaatgatgtcaggcccgggaagctggtgtggaagaactgagctgtcagaaggagataccaatatcccctttgcagggtggtgatgggcatcaaacatgacgtggaacatgtccccttcatggagggtttccatctaaatgcatctgtgtgccttagggatcagtagttcaggggtggtggacttttttgagtgtctcctaatttctctgaggtgtctttggctctgtgtcaccaaatgtgcctgacctctgcatcccagtggttgctgaaagggaaacagtatattgcgtagtcagatgtcaggagtagagatcttaatgagaaaggccctggcagctggagagatgagaggacctagtggtcagcttatacccagactatctctccactcctccaagagtttgagtcccatagctgatgaaagaatttacatatgggctcccccctgctttcccactgaaaatctattctcatattttgggaaggagcatatgtcctttaactttcaatggtaaacaatctaggatagtgtttaaaggcatggattttggagtcacatatagttggtttgaatttctagcttcactacttaccagctgggtttgaccttggttgatttacttaacctctctgagcctcagtttcctcaactataataacatgggtggagggaggcatgttgaaaatatctacctcagggttgttggaataactgaaacaatgtttgtaaagctttagcacagtgcctggcaagcacttaataaatggctgtggtggtggtggttatatttattatgtgatttattcagaaacttggtttcagtgatctctaaacagatttccagtggttctttctctctcaagaaaagcatagggaaaaacgagaaacaccttagataaaccatattgagttgagggtagacagaagagtctagtacctaaactcaccctagaggaagagaaacaggaagtgtcttatgcctcttctgcctgggcagccagactttactgctgtactaccagcccagggccttgggtgagaaggtttcaggtctgagctccccttgcactgtgtgagaggccgtggagccgaatgagtccttattatacctggagaagctgttgtctcctcacaccatgaaatgtaatagcagtcaaatcaggcccctcttgattcaattttagtccatgcctttccatgtatttaaattatataagtgttggccaggtgtggtggctcacacctgtaatcccagcacttcgggaggctgaggcaggaggatcacttgagcccaggagttcgaaccaaccttgggcagcatagtgagaccccttctcttaataattttttttgaaaataattttttaaaaattacaaatatggaccagacacctgggaggattacctcacgcctgtaatcccagcactttgggaggctgaggtgggtggatcacctgaggtcaggagtttgagactatcctggcca

SEQ ID NO: 7427 - DNA, 1577 bp, Homo sapiens
gttgtttactggtaagaatattattatcttgatactacctctcaagggtattgttacaaaatgccacttatggttaaagagatagatacaaagagttctatttgacagaagcttgaaactctggcatctatctgcccaacgatgggggctttcgttctgtaatttaatcctttgtagatacattatttgtgtgtaattttatacgtgttcatatttttctcattttgcattgtgtaaagtgtacaaaatctcaaagtataaaatactgcttatattgcttgtaatttacagtgtgtaaatattttctaattgtgtacattgatgggggggacaagtgggttattcaggtttttttttaatgacccttttgtattgcagtttcaacagataactgtccatcaaatttaaaaccactttgatacatttttatttaacagttccaataagaaaaaaatctctatttttaattatatttctcctttagaaaaaaaatacttcatggtccctctaaaataaatggccagacctcagtttaggcccttgtatttatgactctggtagaggtcttcagactccaggtcatagtccagtcagtatttgcatttgggttctcatgaaaactttgtgactctcttttagcacaagtagcccatggtttttcttccaaatcaagtattttacttctcccttgagtccccatgctttgtctccctcctgctgctattgcccggtgaatgggatggtagagagggagaaatgttcattgcacagagaatgtcaggccactttggggacttggcaaacgaagcttgcactgagtggtggtgtgtttggcaatattactgtgccaaaaatcaccttgtctaattttatggatatgtatggcaaacttattacccttcttgcaagctgcacattaaggtacttgtaagtgtttatgcttttgtgtgtaactgtttgccttttctaactgcttttcttgttactgaaaatataattctactagttttatcacattaagaggctctccatgcacaaaatgcattgatgtagccgtaaagtaacagcatttgtacattttctatctcctgatggcagtggtgcctttgtcaccttttggaaggtttgcattttgtttctgctttcaagcgcaaatagtagcttgctttcagcttcacaaaaatctcctcaaatgtaaaagatacaaaatggcgtgttatcatccaggcttagttggagtatttgcatttttatttttatcaaaacaaatataattggtggggactggccagtaataatgtgtggcgtctttaagccaagagtaatttttaaattaaaaatgaaaattttaagaggtagcccattaaacaagctactgagttggagaattaggggatgactgtggtggtttgtcgctaaggaggcaacagtagggtccaggcggcggggcacgtagagcagttagcatgatccatggttattccttactcatgaacagtgtcggcgcacctcattatctgtgcatttgtttttcctgggcagtcctgtcagccagttaatccaccagctcttaggaa

SEQ ID NO: 7428 - DNA, 1158 bp, Homo sapiens
cattctcaagagtatgagagacagagctccaggcatgtcccatccccatgcacatgtggtaacacacacctgtatcacacatgtgcttacatttccactcacatgcacctctgagcctcccttgctgtcttggacctgtctgttgggtttagtccgtggacatttcagagggagatccccctcccatttaactgtcctcacaggcccttgcctaggatggatgaccaacactgcactcaatgagccagcctctcttttgggggaatcaagcatttgcttcctctagactacagcagggaaagggaggagaaatctgatgtctcaactggcacatgaagcccattcttggaactatgcaaagggcagaggctgggagtttggacgcttagctcctacccctgtcctacctcaccggggcactttcaggggccaggggcctctgaagtctctaggcctatatgggacaatcaattctgactgagctcccccattcccctcgggtgaggatgactgttatttttgtagctgagaacgtggaatcccacgggtttttactgcccttcacccaacctctcccacctccaccccacaatgaatgtatttattgtgagaatggctacacttctttaggaatgcccccacttacaaccaggtgggtggaacaggcatgtgacagagtggggagcctgggctcagctcctccccctgccgttggttaataaacaccctttttccccacagctatgactagtctgcttcatctagatgcgcccacccctgatcaccaggggacaggctcctgagcctatacagaaggtgatatctgcctccaggattggctctgctccccaatacaactatttgcagaggaaattgggatcctccgcttccatcctgactccttggcaggcacacaggcctctttagtaaggttcacactattcattgatcatggtgttagggcatgacaagaaaatgacaacagttcaagaattcttacaggggtttctagattttcatttcctgcctctcatttccccaccatcccccctttttaaactaagattagaaaatactcattaatatcagccttcctgcccttccccaaggttctcagcaccccccaccagctggctcaagggacatggattttatttc

SEQ ID NO: 7429 - DNA, 1191 bp, Homo sapiens
ggggccagggaggggtttctgcttagcaaggcaccagaatttgaggacagcgaggaggtccggaggatctggaaccgagcaatacctctctgggagctgcctgatcaggaggaggttcagctggctgatacaatgtttggccttaccaaggttacagatgacacactcaagcgtttcagtgtgcgatatctgcgacctgctcgcagtcttgtcttcccttggttctcccctgggggctcaggattacgaggcctgaagctcctagaggctaaatgccagggggatggagtgagctacgaggaaaccactattccccgacccagcgcctaccacaatctgtttggattaccactgattagtcgtcgagatgctgaggtggtactgacgagtcgtgagcttgacagcctggccttgaaccagtccacggggctgcctacccttactctaccccgaggaacgacctgcttaccccctgccttactcccttacctggaacagttccggcggattgtattctggttgggggatgaccttcggtcctgggaagccgccaagttgtttgcacgaaaactgaaccccaaacgatgcttcttggtgcgaccaggagaccagcaaccccgtcccctggaggccctgaacggaggcttcaatctttctcgtattcttcgtaccgccctgcctgcctggcacaagtccatcgtatctttccggcagcttcgggaggaggtgctaggagaactgtcaaatgtggagcaagcagctggcctccgctggagccgctttccagacctcaatcgtatcttgaagggacatcgaaagggcgagctgacggtcttcacaggtaaccctttgagaaatcactacttagagtaaaggggcagaagatcaggtgacaaaagcaagtgggtttgggccatgacaatgttgaaaagaaggttggccctttccccccagttttaaagccctgacctatgtcttggtttcaagggtaggacttcctcctcacccaggtctgttccaccccactgcagggccaacaggcagtggaaagacgacattcatcagtgagtatgccctggatttgtgttcccagggggtgaacacactgtggggtagcttcgagatcagcaatgtgagactagcccgggtcatgctgacacagtttgccgaggggcggctggaagatcaact

SEQ ID NO: 7430 - DNA, 1150 bp, Homo sapiens
ttttcagcctgggaggaggtgggatggcaatccctgggcctgagtggggttggattcaggggacgttaactggcctgtgctgttctattgcagctccatacacataagcaacctggaaccagagctgagagctcagatccatgagcaaaaccccagcgttgaagtggtctactacaacaaggggctttgaggagggtcagcctctgtcccctccctcacttccttgggctgctgctttagtggagtcatgtcacccctaccacttggctatctgcctagcactgggcaggggccttggtgggcagatggcaattgagggtagcaacctattagggtgggggagggacctccataaggcttttcctcccttctctggtttcaaagatcagagcacataacccctcctgtgcttgagtgtccatgcatatacatacatgatacacatgtgtatgtgtacattgggtcctgaaagctagaagcaggcatgctagcctagtatgttctgacatctggcttcccttctcagcctcatgtccacctgcctgccagccaggctacaggtgtgacttccttctctaaactgttacaccagccaagttatttttgatggcacctcatcccttctagaaataggaggagccccaggatctcaggacagagacttatagacactagtaggacaaagcgggctgaatccttcaggtttctgatacctagctccccaagctgactgggctggcagaggagaacatgttgagacaagggaggcaggggacttatgcatccctcagtgccatcccttgtatcctggaatagctccatttcccctcctcctctctaccagacaaaggagtgcctgtgtcctgtactgccctcgctgtctcccccaccaccctacttgacagcgtgggcatcttcaggcacagccttgggagttcctggtgtgctctgacatcatgacctcaaatctaaatcctccaatcccaactccctttcccaaacaaaaagccacagaggcagagcaagcattcccctttaagagcttccactgcaccccctcccaagggacacagcggtaggaatggtgcttaaactccacaggtatcagagagggtgtaactaggacatcctcaagggcagctaggccccg

SEQ ID NO: 7431 - DNA, 1237 bp, Homo sapiens
gatggcaaccacctgctggccacaggttcctcctactacggtgttgtacggctgtgggaccggcgtcaaagggcctgcctgcacgtaagtgtcctgcccacctcttctccagcatgccaggactcatgattatgggctgcatttgggagagggtgaggtagccaaggacgtgcctagaaagggttggaagaagcctacaatggcacacgtccctcttcccctgggcctggggatcctgggttagggcacacccatgtcccacttggaaagctcttaccacttcctgtgccctcccttccaggccttcccgctgacgtcgactcccctcagcagccctgtgtactgcctgcgtctcaccaccaagcatctctatgctgccctgtcttacaacctccacgtcctggattttcaaaacccatgaccgtcagggccacccctgcctctgggccagggaaaccagctactcagggacttctcttgcctggagggtgcagtgatagctcctcctcactgccccactgtgctcctgggcctgtgaccccagtgctcaggcaccttgcactagaggcttctgactcctgggactttggagcttaccagagatgcagtccctcccaggaacctgttggagaggcaggacctgctgctttagagtgcggctgaacccgggccttgcgtccctgtttggccagagcaaggatctggcctggagaggcccatcctataccccttattagagccatgacagcctacagagtgaggtgaggtgctcccaccttcccagatggttcctttctgccccttcctggaaggaaaggtgaggctgccaatagcctcctggcaccagccagacctcacccttgaccaacctctcggggctgggggttcattcctggggcactgtggcctggttttgctttgaaaccaagaaagagcaaagggaacccagcagttctgagtgagttctgagccagccctacctcaggctggctgttgagacatgctacaattttcatttttgtaaaaataaagcttgattgttcacagatctggttcctcactggctgagtagtcctagcaggctccaggagaagggaacagcagacccaagctcagggttgtatgtgctgctgaaacgacaagaccagcctcatggctctgtgtcccaaagaacaaaggtttctttttttcaggaagagttcccattgatgacctatcccttaccctttggggtatg

SEQ ID NO: 7432 - DNA, 1154 bp, Homo sapiens
tgtattcattttggtgagcagatgttttggatttgatgaagtctgatttactggatttttattttctgttattgctttctgtgtcctaagaaatctatgtctaccttcttagtctgagagatgtttttatatattttcttctgacagctttatagttttagattttaagtttatgatctgttttgaattacttttcctgtatggtgtgaggtaggggtcaggattcatttcatttttttttttttttttttttttttcccaatctggacatccagtggttccaggattgtcatgcattctccattagattgctttggcatcactgtgaacatttttgatagtttaaaggacaggcttttctccttggctttcttagtcaagtatggagagagaacagttactccttcctggtctcctaatctctttacttgtattctggatgctcctgaatcctgactcagtaagcccatgaaattttctgtggttggcaataagttgtagtgattggattatctgttctgtctggacataggatgaccagtgtcccagtgaaggaacgagtgaaggtgtctcagaactggagactggggcgctgccgagaggggattctgctgaagtggagatgcaggcaagtagcctcttgactttttaaaagctacttgggacataaaagcataatggaaagtaaaaaatctggtcctacatagaggctaatggggctatcttgggtgggtgggcactggtgagcctttgaataacacaaagggggcatcagaaggacaactttttcacattttaaagaagggaatacaagaaatgtactttaacaaatgactttttttatgattataaagaaatcaatgcttattttagaaatttgaagaaaaagaaaattctaaagaagaaaataaaactaacctgtaactccaccactcagaggtaacctctgttaacatatgccatcaaaggaaataaatcaaggtttcaattcatcttattttacaaatatttttatttaaatcttctactctatggagttacttcttcattcttggcttccctgagtcctctcccctactttattaaaaggcagggtaggatctaaaggtttggatatatatgttacaggagttagagcttagagcaagtataag

SEQ ID NO: 7433 - DNA, 1214 bp, Homo sapiens
ccagtgaaaagtggattttctttacttttgtctttgggtttggggttgtttttgttctttttgaagttttattatttttaaagtgcctcccacctaggcgtaggccatgaccatttggggtacgagagcctaattttgtaggacttaatctgttgaaaagtgcagttacttctggaaattaacctcaatattaggtcagcatgtgaaatgttggatttgacatgtcaggtagggttcagggactgattggtcccatttgccctcaggtcagttgtttaatctcaagacctgttactactgattttattaaatcagagtctttaattcttgcatgtttgtatctaatttctgaatgaatgagcacactttaaccagttatttacagttacctttttcctttaaccggattgtgaaagcttcatgtattttaatttagattctgtgtttttaagggttctgagcatgaagctggcagatagtcggcaggactcattttttcatcatggctggctgatttctccatagattgataacagtattttgttatcttgcttctctgtagttttgcatcagctgtttaactttgagctgagtgaggggagaggggtaaagagaaagaaacttaagttttctttcacagaactccaccattgtgggctttgagagagccctaaagcattgtacctagtggtacctagtgacttccaaccaaagcctttgagtatgcactaaataggtgagaagaaaggagagaaggtttttaggttagaaacctttaaccgatagaaggatatggtatgttgtaaagctggaaccaagtttgcatttttgagggcttgagatgaagggaagactcttaccagatagtaagacagctgagttttcctcagttttctcgtcttaacactagtggacaattctagcattttgtttggaggatttcagagttaacctcatggaattcaggattttttagcaagtttgcttttggttttatcttggcttttagtaatcatgttggctggtctggtcacaggtgactgtgaaacagatgccctggtcttgctttcatcactctaggatcatgaagtgctatgctatttcctggttatgaatattaaggttggaattacatttttattgattgtttggatcagagctcagttcctgtagaaaacgaactgtaaaagaccatgcaagaggcaaaataaaac

SEQ ID NO: 7434 - DNA, 1225 bp, Homo sapiens
cttcctcaaaatgtaaaatgtgacttcagacaggttgaattccttcatgggctgtgataataaagtgtctaattatcagtcattttagttaatagttactataattttatgacagagcaagcagctagcttgatttgtataatatctagggaatatataaagttgactcagacaaacttgggacttactttccttccagtaattaaagagtagaactgataatactgattattcattaattggaggaaggaacattagtattgaaatgccgttaacattttaaaaaataataattattatcatagccttgccctgaaaccctgattattgttagagagttatttccacgaagtgtttgtcagtttgttggacatttgagaccccaggaaatcccctttctcgtaacgttctccgcttggatctgatctcaacagggtgtcgtagtcattcttcagcacaattcttaattggagaccaagaaccctgggcctttagaggtggtctagcaggagagttccaggtatcaatatgaattcacaactgaattgacattttctttgttttatgagaaaccttatgttgcgcatcagatggctggaaggattggtctgccgaaggctttctagtcccaaattcaatttagttacatagctggatttttaaatcaaattttcctcctctttcacagtaatttctgaaggagatgctgccaatcccccccgcgcctgcgaagcgcagcggctctaggtatacacttcacattgtttctttgcaggtcgcacagcattttaatctgcgcccgcaatgcacaatgcgcgcatgcttgtctgccagtggaagctccatgaacaaaagatagtaattatgccaataaatggtgaaagagcttttggatatttatccaattattttataaatataatgtgcttgaaagaattgtccattgctgaaaatatgaacaaaataggaagtttttttgctgctggaatttgttcatggactttctaggtgctctacttttctccccccaacaggtgctctgctgcgcacagcaaactgaagcgcattgctttggggataaagcgtctcctggacagataaccctcttcagaccaaacctctcctcctgacattctgttctgccatcttatcgtagggagatggtctatctaagataggttttaaaaaaaaatagatttgtcataattggaataggtttgttttt

SEQ ID NO: 7435 - DNA, 1489 bp, Homo sapiens
aggccacgcctacctgagcagcctctgactgcccttacccatgaggatcatgggctggagggggagcgaggggagagggggctgcccccgaggttggagagaaacacagataccaagttctcttggtgaagaccgcacttcaatggagcttgggcagcaggggcaggagggtcaagccagggataatcttatttggggaggaatgggtgggcacagtggggagaggcctccaggaatgtggggacttccagagtgggctccctaaacagcccctcacatttccaatcttgaggttacaagctgtagctactgactaattttcgggagctggtgaggcaagcctcagggtaatgccagcaccctgaaagtcagtggctctgctcggcttctgaaaacagatcaactctcagatatagctggagctacatcctgcttcctttgggcctggggctgtgcttggcttgaaatctgtgtcccctgcctgcactggcactttgtccagtcatcgggacctttggctcagatttagggtaagataggaatagggtacctttttccttttttttctgagacggagtctcactctgtcgcccaggctggaatgcagtggcgtgatctcggctttactgcagcctccgcttcctgggttcaagcgattctcctgcctcagcctcccgagtagctgggactacaggagcgtgtgccacgcccggctaattttttgtatttttagtagagatggggtttcaccatgttacccaggatggtctcaatatcctgagttcatgatccacccaccttggcctcccaaagtgctgggattacaggcgtgagccaccacacccagccagttttcctattttctgaattcagaattgacttctctgggaaaactggagatgagaatctgcccagtgctctgctgtccagtcaccgccttttgaattttagttttggcaccaggagtaccgttagctttccccttcttctggcccatttgactcatcagcacaatagggtcaccaccttaacttttaatttctaatctgctttactgtctttagggtgtgtatgaaataaacattgacaggctttctggagccctcaaggtgcctactttgctggttccctttccagcagctcccccacctcccttagccccccctcctctggcagcctctcctgcctctgctgagctcccctccacgtgttccacccccttaccctgctgttgtttacatccaacctgcctgagaatttcctctggggaggaatctattcctgtcatggtctagtgcctgggagggagagaactttctgggggtagggtgccctccatctgaaacaggccaggtgagcatcatgcataaggcctccattctgtccgctcagattctgggtggggccacaggcaaatctcctgacttatggggagttggcttgtggttcctcccttggatagcctccatggaaccactataggctttcc

SEQ ID NO: 7436 - DNA, 1204 bp, Homo sapiens
gattcatgaaactacttttatatagaattgaaaaataccttggagtttgatctgcaatagtgttttacctacatatatatatatatatatatattatatatatatatatgtacacacaattaaatttgaaagtagtatattactctattcagttattttaaatcggatttttttggcctcttagctgctattttctgccttgggtctctttccagaggaatttctaaagacagtcaagtgcagtgtgatttatgaggcagtaaaggccaagtactttgcagtgacgaggacctacttactttggggaaatcaatgaagcacatcagtctgcagcacacttcctgccttaatggtcctaagctcgatcaatatttgaaatttaacttcaccatcagtctgtgggcagtgtgtgctttgctgccttccttccatcaacctcaaatatatggccagacctattacagatggagcgagttacacttttgtgtttggttttggatctgctttaagccttgtccactggcacattttaagaatgtaaaatgtgttgtgctgttggccaagtaatgatttaaaccttgacattacctagtcagggaggggagtgttggacagatgcacaagctctgtagcatggttgtttatcagttcttcttcctaaacgttgtctcattaagtggtacgtcagtgactccagcaccttggagagcattctggcactgactggctttcttttcttttctaagatttaatttttttagagctgtttttaggttcacagcaaaattgaaaggagagggcagagatagcccatacgtctgcttccttcacacatgcattgcctcctctattgacaacatcccccactagagtggcatttgttataaatgatgaacttacattcatatattgttaccacccaaagtccacagtttacattaggattcactcttggtgttgtatattctatgggcttggacaaatgtatgacatatatctgccattatagtatcatactgagtattttcactattctaaaatgtgactttctgttcacagattctctaaccatggcacaggtagagaaacgtggaggtttgctccggaaatcttcagcctccaaaaaaccactgaaggaaaaagtggtgctgatgtatgatgagatcttcatggtaaggcctgcggccttgttgtgtacagcttg

SEQ ID NO: 7437 - DNA, 2260 bp, Homo sapiens
tgcctaggctggtccctgcagcctcgacctcctgtgctcaatcaatcttcttgccttggactcccaaagtgctagattacagatgtgagccaccgcgcccagctatgactcctttctttctcgtctaggttgttcctcaaagtcattcaagctgtactcgccgaaggagcccccgaacggcaacgcctttccccccttccatcccggcaccatgctggatagggatgtggggtaagtgagtctcttggccacttcctaacccttctccaggtgggatcctgcctggaaaggggagggagtagccccctgcccccaataattcctatcttcaacccccattctcatagcctcttcctttacacagcccaactcccatgtatccgcctacatacctggagccagggattgggtaagtggagtccagtggggaagaaggtgctttccactgggtgaaggccgaggtagggggtggagggggcaggctccgctcctactgacctctctccttcacttcctccaggaggcacacaccatatggcaaccaaactgactacagaatatttgagcttaacaaacggcttcagaactggacagaggtatggccaagggaaaaggggctgggagcaggagggccatctgggcaccctatgggatatcttatgacacatgaacacccgttaccatgctccctaggagtgtgacaatctctggtgggatgcattcacgactgagttctttgaggatgatgccatgttgaccatcactttctgcctggaggatggaccaaagagatatagtaagtggcctctggggtcttgctatgagggtgtatacctcctatgtcgttctaaggtctagaagtgggtctgggagtgccaggggatatctagattggtaggggaggcatctgcctggccccttttgcggtccctttgtcctgaagagtttgtcccatctctacagccattggccggaccctgatcccacgctacttccgcagcatctttgaggggggtgctacggagctgtactatgttcttaagcaccccaaggaggcattccacagcaactttgtgtccctcgactgtgaccagggcagcatggtgacccagcatggcaagcccatgttcacccaggtcagcaacccagctggatgtggaacaccatggcacctgggtttgattcccatcctctctcccagtgtatactcacagctgttccccagggaggcataatgtgaactggcaaaataagaagggcgggtaggcatgttgcaaccgtcagcaaacatgtattgtgtttgtatgggatagttttctgggccccaaggctacacgagtgaacaagagtctgccctcatatagcttagagcaggtgggtgtatcactagccacatggggagaggacaaggatctgttaagcttttctactgtgtgtctgtgtgtgtaagggccaggtatatgggtggggggtactgtgacatttatgcacccagatttaatgtgcaggtgacaaaagtgtatgcaatgggagagttgtaagcaaatgggagactgtaatagacataccttcaggtatggtatgtggggagggggcagggttctgacaagcctgtccccaggtgtgtgtggagggccggttgtacctggagttcatgtttgacgacatgatgcggataaagacgtggcacttcagcatccggcagcaccgagagctcatcccccgcagcatccttgccatgcatgtgagtcgtgggcaggacccaggatgcaagagtgaaggcaggcgggggaagggtggaacaaggtctgccatttcccgactgactacttagacagagggttagggtttcttcatctgaacagcaggtttaataagagactatcctctctcaggagtgtcacaatgctcagatgatagggcaggtgagcagaggcaacccaggtgtcagtgttctttcttgtcttttctcccactctaggcccaagacccccagatgttggatcagctctccaaaaacatcactcggtgtgggctgtccaattccactctcaactacctccgagtgagtctccgaccacccagtttctgccccagtccatttagtctcggctccatgtctgtcccctgacaagccacctccttgtctacccctagctctgtgtgatactcgagcccatgcaagagctcatgtcacgccacaagacctacagcctcagcccccgcgactgcctcaagacctgccttttccagaagtggc

SEQ ID NO: 7438 - DNA, 1165 bp, Homo sapiens
caagcttcctagctggagacccccaagatcaagaccacgctggggccaatccccacctccccagcagcgcagtgatggagaagaagaggaggaggtggccagcttcagtggccagattcttgccggggagcttgacaactgtgtgagcagtatcccggacttccccatgcatttggcctgccctgaggaggaagataaagcaacagcagcagagatggcagtgccagcagctggtgatgagagcatctcctccctgagtgagctggtgcgggccatgcacccatactgcctgcccaacctcacccacctggcatcacttgaggatgagcttcaggagcagccagatgatttgacactgcctgagggctgcgtagtgctggagattgtggggcaggcagccacagctggcgatgacctggagatcccagttgtggtgcgacaggtctctcctggaccccggcctgtgctcctggatgactcgctagagactagttctgccttgcagctgcttatgcctacactggagtcagagacagaggctgctgtgcccaaggtaaccctctgctctgagaaagaggggttgtcattgaactcagaggagaagctggactcagcctgcttattgaagcccagggaggtcgtggagccggtggtgcccaaggagcctcagaacccacctgccaatgcagcaccaggttcccagagagctcgaaagggcaggaagaagaagagcaaggagcagccagcagcctgtgtggaaggctatgccaggaggctgaggtcatcttctcgcgggcagtctactgtaggtacagaagtgacctctcaggtagacaacttgcagaaacagcctcaggaagaacttcaaaaagagtctgggcctctccagggtaaggggaagccccgggcttgggctcgggcctgggcagctgccttggagaattctagccctaagaacttggagagaagtgctggacaaagtagtcctgctaaagaaggccctctagacctctacccaaagctggctgacactatccaaaccaatcctataccaacccatctctcattggtcgactctgcccaagccagccccatgccagttgactctgttgaagctgatcccactgcagttggccctgttctagctggccctgtacctgttgac

SEQ ID NO: 7439 - DNA, 1239 bp, Homo sapiens
ctggctactaggtttgggtagtgagaggatgagggcttcaggaagaccctagctggctggatttctcttgctggtccccaagttggggaacatggggaaggggcagttgaagcagtgggaaaagttgggctgcttaccttgcttggtgtactttgtgagatgaggtgggggtctctggaggctatatacacggtatttggaagcgtagaatcggatctcatcctgctatctccatcctccctccccaccacagggctcacccctccagctacccctccccaccagttatggaagcccctggctgctgtctcactgctggccaaagccaaatctcctaagtccaccgcccaggagggaaccctgaagcctgaaggagttacggaggccaaacatccagctgcagttcgcctccaagaaggggtccatggccctagtcgagtccatgtgggctctggggaccatgactattgtgtccggagcaggacccccccaaaaaagatgcctgccctagtcattccagaggtgggctcccgatggaatgtcaagcgccatcaggacatcaccatcaaacctgtcttgtccttgggcccagctgcccctccgcccccatgcatagctgcctcccgggagccgcttgatcacaggactagcagtgagcaggcagatccctcagcaccctgccttgccccatccagcttgctgtcccctgaggcctcaccctgccggaatgacatgaacactaggactccccctgaaccctcagccaagcagcggtcaatgcgctgttaccgaaaagcctgcaggtcagccagcccctcaagccagggctggcagggccgccgaggccgcaacagccgttctgtcagctctgggtccaaccggactagcgaagcatcttcctcatcctcatcatcgtcttcctcatcccgatctcggtccaggtccctctcccccccacacaagaggtggcgaaggtgagctttgatggccctgtaggtcctctccatttaggaagttcacgtacttctgtggtttactttgaaagcttttacccgttgactttggtactttcaggcgctaaggcttctatttctgactttggcttttgtgttttcccttttcctggattgttgaaggaggcaagctgtgagacaattgcttctgtcccctgttggagcttggggtgtcaggtctcctgcttctttgagacctgccttggggagacttttagggtttgat

SEQ ID NO: 7440 - DNA, 1228 bp, Homo sapiens
ggggctaggcagacttaccttagtttgacatacaaagaacccaagggggctgggcatggtggctcacgcctgtaatcccagcactttgggaggctgaggcaggcaaatcacgaggtcaggagttcgagaccagcctggccaacatgatgaaaccccatctctaccaaaaatagaaaaaattagctagaggtggtggcacgcacctgtaatcccagctactcgggaagctgaggcaggagaattgcttgaacccaggaggcggaggttgcagtgagctgacatcacaacactgcactccagcctgggctacagaacgagactgtctcaaaaaaaaaaaaaaaaaagacccaaggggtgggacgagaggagaaatggggactggggactctcctatctctttgacttaaaattagagcagttttcactccatccgtttttgggatgggagatagctagccatttgcagaccctgtggttgggaagtgtggtcagagaccttgaagtttgtctttacctttatagactccaaccgggaagactttgacccagcacctgtaaagagcaaatttgattctcttgactttgacacattgttgaaacaggcccagaagaacctcaggaggtaaccttgggcccttccctgctatcctttttctcctttggaggtgcccaacctcctccacccccttcccctactctaggggagagagctgctagtgagatgactgttttataaagaaatggaaaaaagtgaaataaaaaatatgttgaatcagattttttaaaaggggtatttgtttttttataacaggtattgaaacaagttaacttgcattcctatgtaagataggaggggctgaggggatccccagtgtttggaacataagtcactatgcagactaataaacatcaactagagagaactcccaactgctgttgtgcgtctttatatggtgctaatgccaaatgtattcacttttcctatctgaacatggtccagggacatgcctctccctggtcaggtgcaaaaatcccactggatttgaaccttggttcctcagatgtattgtctaaaatgagtcatttaggacagtgcttctcaactttaaagggaatttgaatcatctagcgatctttttagaatgtagattctgacaatgggatgatgatactggtccaggaagggattttgataacaaggacctagagaagctcacacttgttccaa

SEQ ID NO: 7441 - DNA, 1204 bp, Homo sapiens
ctgtagggagaaaaaagggcatcatccccattccgaagggtcagggaggaggaaattgaggtggattcacgagttgcggacaactcctttgatgccaaggtgagagagagatctgtgccattcttgggagggaggatgggtagtgtcagagaggacaattcttggttcaggttggtgggaatcttctctgggttcaggtttccttgagcagggagtagaaagaataaagtgacagggctccagcatggtcctcctctgtgttaatctccctctctacttaccagcgaggtgcagccggagactggggagagcgagccaatcaggttttgaagttcaccaaaggcaagtcctttcggcatgagaaaaccaagaagaagcggggcagctaccggggaggctcaatctctgtccaggtcaattctattaagtttgacagcgagtgacctgaggccatcttcggtgaagcaagggtgatgatcggagactacttactttctccagtggacctgggaaccctcaggtctctaggtgagggtcttgatgaggacagaagtttagagtaggtcctaagactttacagtgtaacatcctctctggtccttttctgtgttcctagttttgtacagacttgtttttgagtgttgagtagcagggacaaaataagggaatgttattttttaagaaaattcattttcattgttgtctccttccttttctgtgaaagtcctcatactgagaaatttgtatattttatattaaatcacttactattgatttttgttgtgattttcaaaggtggattcccacagataaaatcttggctattgcccaaaacatagtaaagggtcacgtgtgactttttataataggaagaaaattctgcctttgtgagtgcacatgtccacatttcatccctccttccctcaaaaccctagagaggggcattaaagaattgttgatgtatatgcaatgtctgttaagcatgcactatgtatttcatcctcatttattgggtctgggactgaagtttttagccagcatggacctaacctactttttgggataaaattctctgttttgttacaggcaaaattctggtatggcgtgaatgccatgggtcattctgaatatatttttttctgtaattttatcattacacgatgtttgcaatacgtgctttgttttttaatttgaaagcaaactt

SEQ ID NO: 7442 - DNA, 1157 bp, Homo sapiens
agctggcagagcgtctggggctgcgcagcctggtagacacgtaccgacagacaacctcacccagtggcagcctcctgcgcagctacgaggtgggttggcctgtgccctgccccctccccagcctcctttcccgatctgagtccaggtgcctccttggccccagggctcccgagcacatgccctaaccatgactcagacctcattcctctgtcttctcagctggctggcggggacctggcaggtctactggaggccctgtctgacatgggcctagaggagggagtgaggctgctgaggggtccagaaacccgagacaagctgcccagcacaggtaaaggggcctccctggaaggtggatctggacctggagggccggaggcctgaggctttgactatcccattcctgtccccatttacccccagcagaggtgaaggaagacagtgcgtacgggagccagtcagtggagcaggaggcagagaagctgggcccaccccctgagccaccaggagggctctgccacgggcacccccagcctcaggtgcactgacctgctgcctgcccccagcccccttcccggaccccctgtacagcgtccccacctatttcaaatcttatttaacaccccacacccacccctcagttgggacaaataaaggattctcatgggaaggggaggacccctccttcccaacttatggcagcccctgatgtgactcttgtccctggaaccagctacccaccctgcccacatgccaggcatggtgagaagagaaggaggaggcccagccagcaagtccagagcagttttaatgggggtggaggctgtacaaagggcaaggcccactgaagcgggggaaagccaggccgtgctgcccccggcccaggtatggggccttggcatggacgcccttcctccacctccagcaagagaaagagtaagcccttggggaggaaggaggggaaaccagctcagccccaaatcctggtctctgtccaagccaggccccaggacagagggggactgatggtgtcagggtgggggtggtctcagcagaaagcagaaacggcatcaggcctctcccacacaaaaaaaaagcatcaaaagttcaggggcgctagcccctcccgcccccgcccaccctgtacgaaaaagtgc

SEQ ID NO: 7443 - DNA, 1396 bp, Homo sapiens
tggagctgttgcccaaaaaaatggatctgttgcagtggtgcaatctgggctcactgaaaccaccacccaggttcaagcaattatcctgcctcagcctcccgagtaggtgggattataggagcgtgccaccatgcccggctactttttgtatttttagtagagacagggtttcatcatgttggccaggctagtctcaaacccctgaccttaggtgatcagcccgcctcggcctcccagagtgctgggattacaggcgtgagccactgtggccaacctaatttttgtattatttagtagagacagggtttcaccacattggccaggctggtctcgaactcctgacctcaagtgatctgcctgccttggtctcccaaagtgctgggaatacaggcatgagccaccgcactcggccaggagctagttttaccagcaccctgctccactgccttcctctagtgcagcctggaagacatggcagcgggtagctcctggggctgagccagaagcatcactgcagtgaaagtctctgcttacctgtctggctcagcttgggcaagggctgggccatatgtgctcagggacgtgcttctcttgtaaggcaggaggacagaagaggaccaagaagggagggggctgccctgtggtgcacacaggcctgccatggggcgtgggagcccatcccgctgcctgactggagctggccgctgtggtggactcaggaaccacttttaatactgcaactgctcccttttgcccagtcagggaaagctgactgtaagtcccacctcccactccgtccacccttctagtggtttctctgagaggtttctctgcttcagctgtgcttgaagtggcatgcctcctctgctgcagggctcccccacccccacacggcctctaaagatgtttatttccttatagactgattaaagtcagccattctttttcctcaagtctgtgctgtgtgagtgagtggtgggttgctggggttgagaaccaggattccttactgactagaaaaagcccctgagagcatttttctgaataagagtggtaggtaggccgggcgcagtggctcatgcctgtaatcccagcactttgggaagccgaggtgggtggatcacctgaggtctggagtttgagaccagcctgagccaacatggcaaaaccccatctctactaaaaatacaaaaattagccaggtgtagtggtgtgtgcctgtaatcccagctacttgggaggctggggcaggagaatcgcttgaacccaggaggaggaggttgcattgatcgcgccactgcatgcactccaacctgggcgacagaatgagactccatctcaaagaaaaaaaaaacccaccttggtgggttaccaagatgccagggagaaaaacata

SEQ ID NO: 7444 - DNA, 1087 bp, Homo sapiens
attacagagactggagtcaggagagagcaggaggccctcatgttcaccagggaacaggaccacaccggccactggaggagggcaggagcagtcctcactctgaatggctgcagagttaatgttcccagcccagtcccctttcgggggccttgggagagtttaaggcacctgctggttccaggacctcgctttccatctgttcttgttgcaatgccatcttcaaaccgttttatttattgaagtgtttgttcagttaggggctggagagagggagcttgctgcctcctgccttgctacactaatgtttacagcacctaagcttagcctccagggccccacctctcccagctgatggtgagctgacagtgtccacaggttccaggaccatttgagattggaagctacactcaaagacactcccaccaggctctttctcccttttcctcttgctcactgccctggaatcaacaggctggttgctggttagattttctgaaacaggaggtaaaatttttctttggcagaggcccctaagcaagggaggggtgttggagagccagtgcccttaagactggagaaagctgcaatttaccaagttgccttttgccactgtagctgaccaggggactaggttgtagaggtgggaaggccccctctgggctgatcttgtgccattcttgaccttggacctgcttggttaaggagggagtgggccagaccagagtgccaggagctaatggagccaggcctgactcctaggagtggtccaaaggccttcagcctagatggtgcaaagctggggccagcctgtcttcaccggcaccctcacctgtgacaccaagacccaccccaatcccagacttcacacagtattctcccccacgccgtcctatgaccaaaggcccctgccaggtgtgggccacagcagcaggtatgtgtgaaagcaacgtagcgccccgcggactgcagtgcgcttaaccaactcacctcccttctcttagcccaagcctgtccctcgcacagcctcgcacaaaccacattgcctggtggggcccagtgtactgaaataaagtcgttccgatagaca

SEQ ID NO: 7445 - DNA, 1458 bp, Homo sapiens
tgggcattggtgcctcccagaggtttcttgggctgctggctggtgagagaggacccttaaagaagatcaagccaagctgaccttggaccctgtccagcacagcttctggcacaggatgcttggtgaatgtaccctttctttccctccctgcagctctgagggagcccctgaccttgtagtgggtggaggaggtaaggggcctccctccctaaatctgcctcttctgcaagctacttggagacttgcctagttgtacccacccctccaggtccctggtgctagagcttctgagaagggcctttccctttcctctttgcctgctatataaggcaggctcctgtggctctgctggctcagtgtgggctgcaggaggactgcagactcagctgcaattctgaggggggtttgggaggcttgtgcgaggtctcaggcctgtgtggggagctggtgcctcttcctgcccgtatctttctcttccaagggcagtgctccaaggcagggactggagaagccaaggggagagtctaaaagggctagagcatttttaaaaatagacacagggtcttgggactggggtttcggattgagttgcaagcagggagaaaacctgaaggtcggtgcccctatggggctgaccagtagagaatttcctttactgtatttttgtgtctggtcttccctttctggcttctaggacatccatgccaggtgaggtgcctgggtccctgttacaagtcaggagccctgtagggagacccctccttttgtacaagtacctgaatgctgcgacaagcagatttttgtaaaattttatattagtttttaatgtcagtggcgactcggttcctggggctgcagccagcctgggacttttgtaagaatttttgggtgactcacttagatgtcgtttccttcttgccccctcttcctctctgtaatctaagtgcattaaacatctttgcagaagtgcctgggttgtgtgctcatttctggctgcctgaagtagtggagccggaagcccggggccctggcagagggagtgggttgttgttagccacttagaagccaggatggagggaggcccccaggattgttgtcgagagtggaggaggtgccagagagtgggatcacacagctggtggctcttcagtcttgaagaaatgaccttgcaaggacaggctctccctcactggtcctgaattcctctaaggtcaagggggtgggagcgaggagcagtctggggagatgaggcggtgggaaaagaccctctccctgccactacatccctcttctatcctcctctcaccaaaaaccccttttgccttaggaagaggggcccagacaggtgaggagggcaggccctcctcatctcctttggagtccttgcccggcttccagctcctctcacatgacatctaaattccacctcctaatccagggcccaggggcaggatccag

SEQ ID NO: 7446 - DNA, 4282 bp, Homo sapiens
aatgcaaatattcagtgggagctttgcagtctgcctagaacaatgaccagtgcagtaatttctccttcctacctccccattttagggtttttgccaaactatttactacctccttatgaggaagtggtgaaccgacctccaactcctcccccaccatacagtgccttccagctacagcagcagcagctgctgcctccacagtgtggccctgcaggtggcagtcccccgggcatcgatcccaccaggggatcccagggggcacagagcagccccttgtctgagcccagcagaagcagcacaagacccccaagcatcgctgaccctgatccctctgacctaccagttgaccgagcagccaccaaagccccagggatggagcccagtggctctgtggctggcctgggggagctggacccgggggccttcctggacaaagatgcagaatgtagggaggagctgctgaaagatgacagctctgaacacggcgcacccgacagcaaagagaagacgcctgggagacatcgccgcttcacaggtgactcgggcattgaagtgtgtgtgtgcaaccggggccaccatgacgatgacctcaaagagttcaacacactcatcgatgatgctctggatgggcccctggacttctgcgacagctgccatgtgcggccccctggtgatgaggaggaaggcctctgtcagtcctctgaggagcaggctcgagagcctgggcacccgcacctgccacggccgcccgcatgcctgctgctgaacaccatcaacgagcaggactctcccaactcccagagcagcagctcccccagctagagcaggtcctgccagcacccagcaacttggcaaagcaaccagggtaggggagaaccacgagagaagcattaagtgactttcaaagactttcagagtacagccacttggttcctttttgtttgttttccttctcctctcctgcattttcctccatctccaggtacagttcggggtgtggatgcctcttcctccacaagggcacagtgttgtggagggctaagttggttctgtgactcattcctcataccctaactccatctcctttctttaaagtcaaatctcacctacctgtttgggtcagagagatgtgttttaaaagcccccaaggaaggaggctgggactgtgccctgacatgattcttggtgatggaataggtttgtgctctgattctagtttaagagaacgttgctgtatctcagtccaggagaggcagcccatcttggccctggatgaagaaggaaacccacagaggcccagggcttgtcattgggctgccagtgtctgccaagccagcattgagctaatcctgtgggaggatgagagctactgggccgttgtatgataggttggtaggggcttgttgatctgtcaaattccaggtgacaagatctatgcaccccatgcgtccttgaggggcctcttccccgcaggctctggctggccgcaggctggttctggtgtgaaaggttatactgccttttctttgtttgtttgtttttttctctaaaaacaaacagcaaaagacagctgaaaacaagaacttcaccggtgggcaggcaagaattctcttctggaaaatgacgtttgtggctctttcccaagttggccttcaaagagcctgcctgctgttgagccagaagatgtctcgtgtgaaggctggggtggcggctgtcttggaacctctgtgagcaggaggccctaagccgcagcagtggatagaggtgcagctctctgcctctctgccctttggtctgtgttcacaggtgacccgtgtcagcctgcatcgcaagcacacaccctgcgggccttcaagtctcactgttccgtatgaggaaacagacagcggactgaggaagcgatggccccagagaaagggcccctgtagcctggctctcacacagtattttatctttgattctgaataaatattttttgtggggttttttttttttttttggtggcagttgtttgttttaaactgaccacttggaagaaacaccttggttatctgtggttttcatgccttgtccctgcctctacccccaccccttttgagtcgggtgactcatttttctgtgtagagactcggtggcccaggcaggaggtgaaagcagccatccggaaggccctggggacccttgtgcctgttgctcgccttcaggtcaccagctgagctgcgataggaaaatctgaatggaggcagcaaacagccaaaacaaacattccccacccggccctgtgcatatgaagtctttcttcccccaactcttgaacgatgatgatattcagacgaagcattgatgttatggaagaaagaaagaaacaaacaaaatatatatatatatgtccaaaaacagacaaatccaagggtgtgaggtaaacgagtgtctgcatttagattccacaaaaccaaaatccatgttgaacaaagttaagtccgtacacagtgactttttgggtgagccgtgtgtgtctgtctgttgtgtgtgtgcctcaagccctgttttcctgtgaagatactttgagtggcagccattctctccacgtgaaccacacgtctggagcacagacaggcctctcaaggtcattgatcttacgcatttactgtttaccgaacaaatgtctgactgtgtactcgggtgtactccgcagcattgtcgactgcagtcccctgtgtttgccagagatactgtgctcgaagtagaggttttactctactcatcactgcgatttgcacattgctccgtggacactcggaggcctgcgttctgttccctataaatggaagcgtgctctgagcctgtctgcctccctcggctgctgctggtcctcagtaccagcgcccgggggtgtccacaaccacttgggacagaagaaggtggaatttcagacagaagcttgactgggtcttcaatgacaggcttggactagctgtggcccagacatcggccctgcccagaattgccaggaggaggctttgcaggctctagaggagccgcagggcctgcctgcctctggtgagtccaacaggcacaagcaagctggcgtgtggccagaggtagccggagtgtgtcacagcccctcagatgcctttccttccacctttttttattttttaagaatcccaaataactcactgaagtgtctcaaaggcgaacaagttttaccaaaatgaatcctttttcagttaacagatcaaatggatgagttctgagcctctcaagttcctttccccagttagagtggggaactgggcaagtgttaactgtgggactcactgcagcgtcctatcctaaaggcacgagaagacggaaatgcaacctgcggagctgggcttggttcccaggtcacagtttggcccccgctacaggatgctgccctgctcagagagagatttaatagggagctgaaggaatcgttagggggccagggagatgtgactgaggctggctttccacgtgaatgagacggggtcggtggagggtttggtgctacagccagtcagaagatttgcaaatgcgaacacattcctgtgtgaggcacgttaccctttgtcagttattgtgaatatgtgtattttaagcaataagattcagctggtcagacttttctgggcagtctcagtgacgcatttcctgtgctgtgattgttctgaagacagagtggctctaaccactgtgagaagcccaaataaaaattgatcccaaaaatgctactgctctttcttgctgcactttgttccctcttcttcttcctcagtcttcaggaaattgcacctcaagatcctaaaccacaagcacttttctccacacagagactgagaggttgtcacacagtcattgaggatagggccctgggccaaagagaaaccacagggccaagggcagctggacagtgctgctgggtccacactctgttctgaggagtcctcccctctctctgtcagggtgtgttcctgatgtttggaatactttggaaagtcccacaaacaggctaaaatcagatcccgagaaagcagagacaagttttgtcagataccctgttgctaaaacatggcttttttttgagacacagtctcactctgccgcccaggctggagtgcagtggcgcgatcttgtctcacgcagcctctgcctcccaggttcaagtgattctcctgcctcagcctcctgagtagctgggattacaggtgcctaccaccacgcccggctcatttttgtatttttagtagagacgagg

SEQ ID NO: 7447 - DNA, 1127 bp, Homo sapiens
ccacgctcaccatcctgctcgacgacatcgccggctcgggcctcgtggccgtggtagtctccaccatcggtatcgtcatcttcggagagatcgtgccccaggccatctgctcccggcatggcctggctgtgggggccaacaccatcttcctcaccaagtttttcatgatgatgaccttccccgcttcctacccggtcagcaagctgctggactgcgtcctgggccaggagataggcaccgtctataaccgggaaaaactgctggagatgctccgggtcaccgatccctacaacgacctcgttaaggaggagctgaacatcatccaaggggcgctggagctccgcaccaagacggtggaggacgtgatgaccccactccgggactgcttcatgatcaccggcgaagccatcctggacttcaacaccatgtctgagatcatggagagcggctacacccgcattccagtgtttgaaggggagcgctccaatatcgtggacctgctgtttgtcaaagacttggccttcgtggatcccgatgactgtacccccctgaaaaccatcaccaaattttataaccaccccttgcactttgttttcaatgacaccaagttggacgctatgctggaagaatttaagaaaggtgggaaattttggtctctttcattggcttgctctttctctctccatcctcctccctacttgagtcctctaccctcagaccaaccccccaaggcgagttgaccgggatttctccttctccctcttaattgcaaagttgaaagggtggcgtggatttggggatggattgaactagtaagtgctactaggttattttaaagcacaagactgccatcacttactttttcccattatcaaaaagcaggctgtgtaatttctgtgcatgacacttatttatttttttttttttggtcccgtgtgtgggcctctgttcttgaggggtctgccgccttcattgtctgggttctcagtgagtaggtgaaggtaggggctggctgatgccatgccatttggtggactttaatcacaggcatttggaaaacatgtaactagcttttgtaaacccagtgcagtcctttttctcctccttaaacatccacactggccttt

SEQ ID NO: 7448 - DNA, 1127 bp, Homo sapiens
cgcacccgcccagtcccgagggcccggccctgtctgcccatgacttcactggtgtgagcttgtccgccatgctgtaccctgcaacatcctgagaccaaagaccttgtgcccttcccaggagccgcggaggaggacagtgagggaggaatggaaacgagagatgtgaagttggcagccggggcatggcgttcaagattttggagatgaactgattccgcccaaatagaatcatgtttattttttcagctctcccttttatcattattcacactcctctgccctcgatttgcatgaagttgaaaattgttgcgatttattttttcaagagatcatgtttttaaagtgtcttttgcagagttttaagttgttctgtctgaactctgctgtgatcccatgatgtgaccctgatgggctggacttgcccctccggtagccttccttggccctcccagcgaggggcacccttcctctgtgccccagtgggcatcaccgtcgatctcgctggctgaatgaagaagaccgtgttactgcagaacctgccaagtctgtcatcactgtggggtgtagcctgcctcagagggacctgcaatcacctctctgagctcagtggtattttgagaatttaatgtttaactgtacccctttccctcaggaagatttaacatttgcttgggaatgtgattttgctcccaccctaaggaatttttatcaccaaaatgaatgttaatgaatttaaaacccatggtttatcattggcaagaggcaagttgacttcatcctgtcattccagcctggggtctgccagccagccctcctccccgacccagcgcctaagctcacagagtgtcgtcgcccacctccctggtccttgctcttgttaacccaagatgctgctacacagatgccaaatggaaatcttccacagggctttttcagtaaacacgtgatgtggagtgcaagctcctccccttcccactagaacatactttaacagaaaacgagtcggaccttctagctgcactctgtactgtgtgccgagaaggcatttctagacccgtgtttttaaaggagggaactttggggattgccagcccctgctcctcctcccagggagccaactgtccctc

SEQ ID NO: 7449 - DNA, 2367 bp, Homo sapiens
gggtcacagggaccccccgagggtgctgagtggcctgctactggcacgcaacctgcccccgtgggatgaagccccaccgcgtagcttgaccttagaggggaccccactctaagcatccttttttttaaacagagccatctagatacaaaagtcagtttcttaagatgcctctcactgagcacaacaccagtgtgatgagtgtataaagatgaggggtccttgcaacaaagcaaagcgtagcccatgctggaagagggcatctatccccctcttcgggtctgcgcagtgctggccttccctgagctgtggggagccaagcctgcctagcccagcttctctggcctcaggaactctgccctgtcaacctatctgggctcacgtctgcttctccacacacagtctctcggggatgccttgctactgggagagcctctggaatcagagctagtgtgttggtgcccttttcagagctctgctgttcctttataaatcctaaagaactgagtctggggagaggagaggggatgccagctgctgcctctgacttcagggagaagcagacttcttaatactgtcttacgtgctcggtgtgatggcttcttgcaaattattctcttataaaagagctcggcaggagtggcatcagtgaggctcccaaaggatgaaattttagccgccaagttcgtattcattttctgttattctttaccttctgttagtcacactattttataacattagggaatctaaaataattcctgtcaggtccctgaaggaatgaaggctaacatctcctttggggagagcttaggacccttcaaacaacactcatgtctgagcggccagattcctcctccaggccccattttccctcaggaaaccaacctctcagatggttggaggagaaacactgggctgttgcttctttggggcagcaggagaatgactttggcttggaaggcctctgccattcatctctacaaagccagtggggtccggcagagaaagaccgtggaatagctgcggtctcgatgtggctgctctttggcacctccgctggactgccctcccgcggcggtgaccttttcaagtgtggaagggagtgggtcgagtggaccagatgcagacccctgagttctggatactgatgggaggcctcaccctcctttacggggcctctctgggtgggacagagcctcacctgctcctgagcagccactggtgccccacggttcctctgaaactaaatccctagcatccagatagtcctgggacactctgcctgctctgtaaatgaggagggcttttctcctgctgtttggaggttccgtcccttcactgcttgtcccatatgcgtcaggcaaattcaaaatcatacatttaaactcttaggaaaacaaaatcttaagacttacacagatatcggggtgctaatcaactggcttaaatcttgattcttacataatttgaacttgaaaggttacattgaactctgttctttcctccctcctcacctcactccctgcagggagttcaatgccatgttgaagtggttggcatccccaagtgggagggagtggggcatcttaccatcttctaatgtgacttcaaggaacagtgcaaatgttgaatgcagagcttcacactaatacggaacagtaactgtgagtatatttacctgtgctgtcgtcagcactgtacactaaaggaccagcttttccaagcctaggaaaataatggtagatacaaatagaaatacattttccctaggaaatagagcaataggaatttgagctaagcaggtaccatgaacttctgccctcaaattctctctttgggttgaggagcagacctgtataggccctggctgatcaagtctgtgtcctgcctagtaaaaacacacaaccacctctgtcatctgaaggccagccggggatctgtagccatcctcgccttgcctaggcccaggaaggtgaggtctcctgggcaaccagagttgcccctgtggttccccaggggtgatcctaggcagatgactcacccgggctggcacaggaaggtgctcaccttgttctctggggctccaagcaagagcaggccagggagggctggctttgcacgctatgtagcatgacccaagctccctggtggcatgggaaaaactcccctctgcttttgagcccagatatgggcttttctttgcaaagggttgaggagaaatacaagactgagctggtaggttagggtccagaaggcctctgaggtgccattgcttacttccttactgaggaaactggctcttgtcctgggccatgtagttccattctgggctctaggctagtggtgcttctgtccatcaagggtatc

SEQ ID NO: 7450 - DNA, 1203 bp, Homo sapiens
gcgatcatcgtcatttgctgtgaactgaaattaaaactattcatgctacccagccattacccagctaaataatcttactctagatacctaaaacataagatcactgccagagataaactaatggtccacacccaattccactctgatagaattatttcacaaataataggtgtttgtttaatggacacttttcacctccttcaattccatatatccttttcttctatgtaggaaaaaaatagtctagtgtagtattcttcccttttaaacacattttggttcttctcaaaagaacttacccccattcgcgctctgctcagtgggtaaaattagatgcatgttgaccatgtctatgattcgtgtaattacttatccctgcccatttcatattctttcaattctgtaggttaaaaaaatggcagtgatgaattttaagggtttcccccaacatataaaataatgcaaagaatccctagactttaggctttcagcttacacaaatctatttaattaggaaaaaaactattaaggatgtagcttttcacctttactttagaagcacagtaaatatcccaaactgtgatgaagccgaccttagatttagtagtgtaagctagaagaagtgagtgtttctatgagtggaaaaagccaaggtgtcatttatgtgtcagttcatttgtggtgatatagaattagctttttcatccccttacccttagaatccacgtattccccttcccactagcctaggtcataaagaggcgttgctttcactctcctatgccttttacgagtgctaagtgtaggatattttgtcaccagaacacaatgctaccgccccaaagtaaaagaaaccacttctggtcaatcaacactaccagcgtatatataagaaagacatctttctcttttctaaaagacttccctaacacttaccccatggctgcacagttggtggggtcctgccggagaggaagagacactcagaccagagaaggggtgtgcatgcgcctactcgcttgctagaagtagattctggacagtcagctcttcatctgcccaactgtgtagcatctgcattgcccagtctttcatgtgtgccaaggctgatgcaggatttgttctctgtccagcagtcacttcggccagagctgaagagttgccccgtctctgttccatgtctcctttaagagctctggtgat

SEQ ID NO: 7451 - DNA, 1176 bp, Homo sapiens
ctgcactccagcctgggcaacagagtgagactctgtctcaaaaaaaaaaaaaagcacattcacaaggagtgtttggtgaataagaaactatatggtccacttattttctttaaattaaagaatttcaccttagtgttagattattaaaaaaaagtaagccagctttgacttgatcatttgcattactggtttgaaagaactgcaaaatcgtctttttttctccccttttcaggatggtctgcttgtccttcattatggtcttgtggtttctcctctgaagataacttgaagattctaggcacattatgaggagggaaacaaaggaggcttctgcaggactgcatctcaccaaagatttccatgaaatgtaattgctaccactttgctgttcaagacataacttacctatttttagcaccaagaattatagcgtttataagtacaacttggaacgatggaatgcatctgttactagagactgtatataaaaagcagccaaagctcaggggaaatttttcaaaaattgaattttaaaatttcttatgattttaaataccttgacattgattttgcttcccatctttgaagtaattggttagttttctttgttcagccatttcaagttggtggttgggatatctgctctctgggatggcatcagttgggcagtcatctttttggaagagaagtgtgcttttgagtggaagattcaaagccagtctttgttaaactgcagggtgtactctcaaagaccaaaactattggccacttttgtatgttgccagcatattttgaacttgtacctttttttatactagcaacactacaaaggagaagttactcatttcaaaatggatgaattgttattatgtgtgaagagactctgagtttatgatctgtgccataaaatttcagtgtaataagacttcttcaatacatcttccaataaggggtgcttctttgtgacagtatttttatttctgacattcattttatttgggtacatagtgtggttgttgataccttgcaatagtattgcttctgaaagtaataaaaaattttaggagaatttgagaagtttacagaattacttattcattgttttcttagtaagtcagtttaatgtttatttttctcattatttcatcactgcaataaagaataagggtgtttgag

SEQ ID NO: 7452 - DNA, 1201 bp, Homo sapiens
tgttgagatgctgagtactgtgtacattgagttcattatactcttttttatgcctttgaaattttcataataaaacttttaaaagtgggttttgagaaaccataacatttagtaaagcaagggttcttatattttcaaatgtctaccagtttcttttaaatgtctccattctaaagaaactgtctaccaatggtgggtatattatttttcacttaggatatttaagttcttttcttaaaatgtttgtgatacatttcattagagaattacatttgttcatttttagaataaattcagaaactgaattatagtcattttgaaatgagttacttcttatcctacagcttagttcaggattatttagactactacattgaaaatattctgggatggtttataagtatatgggggaaaggcagatcccttaatgattacattgaaaaatgactttttaaaatcactgaaacaggttccatggagatcaggaatgttattaccaggatgacctacgagtattatctagtcttaccaaaaaggaacacatgaaagggaatgagaccatgttggattttcgaacaagtaaatttgttctgcgtatttcccgtgactcgtaccaactcttgaagaggcatcttcaggagaaacagaacaatcagatatggaacatagttcaggagcacctctacattgacatctttgatgggatgccgcgtagtaagcaacagatagatgcgatggtgggaagtttggcaggagaggctaaacgagaggcaaacaaatcaaaggtatgggaatgaacctaagaactctataatgcagattatgaaaaattgtagcatttccatctacataagttacacatttttcttatagctagcttggaaacaatttttttcgtttgtttgttttgagacggagttttgctcttgtcacccaagctggagtgcagtggcgtgatctcagctcactgcaacctccacctcctgggttcaagtgattctcctgcctcagcttcccgagtagctgggattagaggcacacgccaccaacctggctaatttttgtatttactttagtagagacagggtttcaccatgttggccaggctggtctcgaactcctgacctcagatgatccacccgactccgcctcccaaagtgctggcataacaggcgtgagctactgcgcctggccgcttgga

SEQ ID NO: 7453 - DNA, 1388 bp, Homo sapiens
aagtactgcttgataatgctccttaggaaggaatagagttattggtcaagtttagatttttcacccaaaatgtacagtaaatacatagtgtagtggacaaaatgtccgaatgtaaatatgatggatgcaactaatggtttcctttgacttccccttaggttcaatggataatacagttcgattatgggatgctatcaaagcctttgaagatttagagaccgatgactttactacagccactgggcatataaatttacctgagaattcacaggagttattgttgggaacatatatgaccaaatcaacaccagttgtacaccttcattttactcgaagaaacctggttctagctgcaggagcttatagtccacaataaaccatcggtattaaagaccttttggaagctactgtttttaaaaagggagactaaaagcaaatacctcagtgattaatatttaagctacagagaatgtttttgtctatatggatctggaagtatgctgcttggaaaaatctgaacaggacagttccacgtttctatagcaaccacatttgactaatttccgttagttgaataagaggtattatgatcatggaggggacatttatggtgctttggattgtgtggaaactatgcattttctgttcaaatgctattttaatttattacatttagaaaaaaagttgatttcaataattcatcctgcttcaagattcaaattcagaaatatactatcatcttgaattttagctgaagaatcctatgagcatgtatgtttctgctgtaaaaacgtagttactgtatggcactcaaaaactatgttaaatgatccactaactttttttttcttggcccatgattaatggaatgtatgtaactaggtagggttcctttcttagatctagaggaagtacagccacccactgacatctgaatttatatacctgttgagttttgagtgcacccaaacactcgataaaccaggtgaagaaatttagcttccatgttctacttcagctaaaacagctacatacaacctagtacacttgaagtcagacagacatttcagttgcttacctccagtactgagccttgctttgggaaactaaaagatttagaccaagtcactgccagtttttgcctttgttgcattttgtacagtttttatatttttgatatcttgtaaataaagacaaccagcttttccaggttcataatttattgtacaaattgaattatcacatgatgagttggcattagcttctccaggcatgggaacttaacagatgaggttaagaaccgtagacagtttaaaatcctataaacaaagcaaacagtttagatacaaatgtggccagctttactcttaagacactcaagaattact

SEQ ID NO: 7454 - DNA, 1147 bp, Homo sapiens
attctcgtgcttcagccacccaagtagctgggactacaggcatgtgccggcatacccggctaatttttgtatttttagtagagatgggattttgccatgttggccaggctggtctcgaactccctggcttcaagtgatcagcctgccttggcctttcaaagtgctggaattacaggcctgagccactaagcctggccaccatgtgatatttcaatacatgcttacaatgtgtaacgatcaaaccagggtaattagcatctccatcacctcaaaaagaaaaataatttttaagacttggattgtacaaaaaaagttacttatgtcttccatttatcccaaaggctgccctgggggattgtgtagctctcagtgcatttcttcttttcactgcctcctgatctgatccaaaggctcggtagatctcccaagtcctctgcagcagtagtggagggcacgttgcagggcctgcaaggcttgctgggaggagttggccaagcctgtgtggtttcttgccaggtggtgaaggttgtcgtattgaactgtgagccatccaaagagaggatgctcttatccttcaagctgtcgagtgatccagagccaaagaaagagcctgcaggacacagtcagaagaaaggaaaagccattaacattgggcaggtacgtggacttctctggacaagctattttatgttacagtggcagagagcagggaaccactaacacatggcatattggaacccacgaagcggaaagatagaggtagctagataagattttggggctagaggggttcatacgcattccttcctgtgtgtcagaacaaatggaagctgtccctgaaagtcctgttacagtgaggcttttcagcagtgggctgctgacctctttcctctcgggtccctagggccagcctgcagttctggctttcctggggctccgtggagggacttgagagaggagtgcgatgggtccacccatgagtcctggtgaatgtgcacgtacatgcatgctgggtggttggggtggtgggtggggtttggaagaaagctgcctcttagagatccttggtgccggagtttaatgcctccaagccctgcctaatccagaccaggttgttctctgttcatgacaagtgctatttttgtct

SEQ ID NO: 7455 - DNA, 1083 bp, Homo sapiens
tctcccagcacagcccgtccaagaaagccctttataacaaacacctccctgaagggaagctgctcacagccagggtcctacggtaggtgccttcccgttctctctctctctgtaatgtgaatcaaacccctttctccaggagccctgggaggagatttcagggtgaactgtaaacataatggcttgcgtagtggtgttcagatgaataaaaggcctttgtttggaaccttctcccccagtgcctgtgaaaacaggtggtaacttatctctgcatagctcctgttgttggggatggtggagggggcatcacatctaccccctgtatttttctactaagcatgaaaaattgtgcaaatcattcttgagaatattgaaaggactcccaaggcagatgggggcagggcccagaatcgtgggctgatcaggaggaaaaaggcctgggccgcctgtggtgccctctgctttttatgatgtctttacctccccatcttgctctgtcatagccttaaccaccagaagaacctggtagagctgtctttcctccccggagacactgggaagccagacgtgctttctgcttccttggaagggcaacttacaaagcaagaggagaggaaaacagaggctgaggagagagaccaaaaaggggaaaagaaaaatcagaaaaggaacgagaagaagaaccagaaggggcaggaggaggtggagatgcccagcaaggagaagcaacagccccagaagccacaggcgcagaagcggggcgggcgggagtgccgggagtctgggagtgagcaggtgaggtcctgcggagggctgtggctgcctatcctcctcctggagggacagccatgagggcgtggggacagggcacccagtggggccgagggagggtgtcgcctggggctgcaggaggatgctcctaggcattctcccacctggcctctcaggaaagagtgagcaagaagccaaagaaagccggcctgtcagaggaggacgacagccttgtggacgtgtactatcgggagggaaaagaggaggcagaagagacgaatgtgctgcccaaggtgagggtgacgtcgcggg

SEQ ID NO: 7456 - DNA, 1202 bp, Homo sapiens
acggccgcggcggcgatgtgcgtggctccctcccgcccgcgggtctgcgtggagcggggctcggcggagcgcggggcgttctgggcgctccgacgcagctggtgtcccccgaccgccgcggtcccgcccgcgccgggtccctcctgcgaccgccgcccccgccccccgccccggcagtctccaggattccctcgctccggttgttatggtgacagctgcgccggtgaatgagcgtcttagtgacacgcgcgcgcccgctaggccagatgtggccccggggcgcgccgcgttcccgtagccgcaagctctcggcggcgcgggtcggggtaagacatcaggcgagtatggtggcacccggggctggccttattcccagcacggaaacatggaacttgcacttgaaaacaaggggagcagggccgcgagaacgccgagctccccggatgcgggggcgggcgagccagcactaatgttcggtttccctagctccaggtaccgggcctggcgcagagtggagagcccagggaaacatgtaaatgagcgagcggatgcttggataaagtaattgagattagaaccccggcacttgaccctccgttctcagccaggctaggggcactagggcaagggttcagagcaggaaccccgggcagtctcactgatgcacagatgccactgagggcctttgaatgcccgcggaccagactcacaagcctggagctctggccaagctgagggaacagatctccgggacagatcatcagaagaccaccagctctgaactgagtggttctgttagctataacaaggtgggggagaggagcctctgcagcctatggcagtcaaagaaggcttcctggaggaagggggtttcagcaagggccctgctcatgtggctagtgccttcctgtagctcaacactgcaccaagaagccttcaggaagggaaacagaagtcattcttctccttcctggacccggggcatctctcctggtctatcagggatggaagatgttccaaggttccccccagggaatcagacttcctgctcctctaagtcatctctagctccctgctctggcttcagcaactcagatccagagtccagtgaagacatgggtgggcagggggacatctcatgtatccttttctgtaataaaggttcttcccccaagtctccatttggcagctcctcattatct

SEQ ID NO: 7457 - DNA, 1228 bp, Homo sapiens
cagcctgctcaacaaccgccctgggcaggccgctcctgagctgctgtctccctctctgacctatgcctaccttctctttcttcgttccctgcccactgggcatggcagctgggggtgagaggctggtggttgcctcccgtcctgggcaggctgcagcctcatgccatgtctctctcccactacctgatgggcacatggacaggctgcagagggctccaggttctgggcccctggctgagaaggggaggatcctgtcctggctgtagccttcctgccccaatcatctcgctggatgccattgcccaggggtagcccttcggtatgggctggggagaagggttggtcttctgccagggtccctaagaacaggtttgcagctaccctctctgaccttttccccatatcttgtgctgtccagggcctaggctgatagtcagagcctgtggcacacctgggatgggccagggccctgggtggggaggtgtgggttccctgggccaagaccagcctttttcctcagtttaattaatttatttatttggtttgtggttttgggttttttttgtttgtttgtttgtaggtgagttcccatcctctgggcccctagaaatgctgcctttgtgtgtggggtacctgggaaagggtgtggctgaggcagtcataatgcagtatcttcccctgactccagccacaaagctcatacccagccctaccaatcatgaactggaactccataaggaggggccaaattgggaggccttttggcaaacagtgtctattttacagagaggcaaaccaagcctccttagtgccctggggctgatggtcacccagagccatagagcacccttcctcctgggccagagctgggttatcatggttggcttaggtacctcaggtggcccaggaggtcccccctccataaggacgtcaaacttccaggagggccagtgttcctagtgtgggccaggaacaggacagggagaccttgtgatggcggggcagggagcctgttcgtagggaagatgaggaggcaagggctgcctctcacacctccaggttctctaagttctggggagggagcgccccacctgctgaggtcggtcctctcagccctgcctgccctggcctgggctctcccagcctcccagccctctgccccctcagatggctttttgtttttgtttttttttgcatccatcagagactgcacctctgtgtggcaggc

SEQ ID NO: 7458 - DNA, 1487 bp, Homo sapiens
gagagacctggcctaaaaatgactcccagcagccctctctcaccccagtgtcctgatatttgggctgtgatccttctggtgtatgtttgaatctttctaaaactgggtgccctcagttcagtttctaggcaggaagcctagaagtcaccagatctttttgggggatgtgagaaccttgagccgcgcacaccctggtgagacaccaattcccacaagcctgcagcagggcctggggctgagcctgggctgcccattcatctcagcgacttcagcctgagaagtgagccctgcctgggctccacacccagagagtccatacaaattctgctccgggaagagtcggggggtctattcaagtttctctgcagacaaaacttcccacaacaggtaccaatctggcctccttcctcagcaccggtagagaaagcaacagaatgggaagtttcctctgggttggagcctcagagctctgcccctcaaggtgacagggacgtccctgtggcttgttccctccacctccagtactgtatgcttgctacttcaaccccctatttggtgaatttctgcacagacacagatctctgtgcctggaatgggactgtgccctgtgcgggtctctcccttggcgtatatccatctagatatttagtctttgagaatctcaaagcagagctctctgggaagagaactgtccacattgctaaataattaagattccctcacttttttgagggccatgtgttgtgagagagagagagagagagagagtgtgtgtgtgtgtgtgtgtgtgtgtgtgtctgtgtatgcaagtgttggtaacttcccacttgaactaaataacatggggttagagaaaaaaaaataccaggcaagctgtctccattgaacaagtccttggcaatgggcaggtcccaagggactcacagcttctggcagcaagtgtgtcattcacacacatcattctggctggagagtgcaatgtgtcatttttttttctttttgtaattattttattaagtatttagttggaaatttcacactggcattaacaggtctagcataagtggcctaggcagtcatcccaggctccaaaatgaagatgtgcaaaagagatgccactgggaatagaaacactgagttggttcagttaggtcatcccctgcagacgtgtcatcgagcaggctgactcccacccctcagccatgccatgggtatgagaagccccttataatgaaagctgccagccctttcgtccttgtttcagagggtgggtcaggtggttggggtgagaacttgctcacggtgcacccaacaagacctgcaggtgcatataagtttagtcccaactgcagggccagaccaaacacttcctgggaagtgtgtggagggctgtgctagaccttcctgagtttctggctaaatcatcagccctgtttggtgcagtctcatgtctctgtggttcccaagctgcatgatcagagccagtg

SEQ ID NO: 7459 - DNA, 1716 bp, Homo sapiens
ctgggtggtcggcctcacatgggaaggggatgggtagtggatggggtttctgttgtatcttgtgggcgggtgattttgcttttgtttttgtttcacattcttccccctccacaagccaaagtcgtttcatttggtttccactgtgtggactgtgctggagcttggcgcctgccagaaaaatttggggctaggcaagccccaggttgcagacatggtgaagcagagaaactgttcttctggttcctgcacaacctcagaggggcaaaaaccctccccaggaaggaggagggtgttcaggagccagacttttggagagaaggcagctcccagcctgctgggtgaccgccattctgcgtgtgttccccagctgggcagggctggaagccttacgtatgaagcatggagaagcagccattgtccccactatgggcagaggggggacccggctggccccttgggtcagactggagccaacaccgccagccaccccctctggcctgctggcaatgccacaggtgcccaagaagatggaggatccctgtgccaggagccaacctggtcttcccgagggtcagtgccccagtgaagacagaagcgagagaataaagttccctgtaggtcctctgtcacctttgggttgtgtttttcaattgttgacatttcagaggggaccctccagaagcccagccggcttcccccaaggactcccccttcgctgggagtggatttccacacgtgcctttgatttcggacagattgggcctcacagccaccgattcagctgccagggtccctggactgggggttggtgttttctatagaggaggaaaggccctccctcaccctgctccccacccaggcagggcagcatgggacccagtgtctcagtgccttcaaaacccacccccacccctaccctaccccaccacaccccatcccagaggccttgcctgggcaaccctaagcccctgtccctcgccatacactgatgcctggcagctagagcaaatggctcgtgttctttgtcgaaggcctgtggtgagattgttttgtttccttttgttttgtgagtttgtttaaaattgaaattagttattttcttctgctggacagtattaaatagagcaggatgttgagttaatctgctagattgcagtactaatggtagtggtttagtgtcttcatgttaatattatttgtacttatttgaacaataatgataaagaagtggttcattattttttaattaatgcactttaaataaggtagaatggaaaaaacccagagagcaaagtgcattacttaaagatgcagtatatacttttctcatttttaaacagcacatatttattaagagaaaaaaagtaatttatgactatttaaaataaaatttaaaagtagagtgactgtcaggtaaagaaccttcaatgtagctatcttccagggggagggccctgcagcctcgctcctcagatgtctgcactgagccagttcagtcactagtgcgccagccaggccaggagggagtgcagagcatgtctgccaagcacagagcatctcagttggactggaccacagtgctcccgagagcctgcctttcctgcccttccccaccacctgcactgccccccacattctcccagccccccccaaggaccccctctccttgacccccagtgctgtaagtaatagagtcattaaaatgcaggactgaaa

SEQ ID NO: 7460 - DNA, 1248 bp, Homo sapiens
cacccagggatgggggatacccgggaaggaccagtccttcccttaggccgagaagagtactaagcagcagattctgggcggggcatgcccaggaatctgcatatgaacaattcccccaggggatttggaagctccagactgtgaagtccactgtcctccaagtggcttctctcaccattacaagaccgtctctgctggctcctggcctgtagcttctgaggagtttctcaggctcctggactttggtttccttttcacaaaaagcacagagagaccaagttctatgaatggatgaagagctgcaggctgagatgtttgtactgactcccattctaatcacggataaccttaaattgagcgcactccctgatctgatctcctccagtcctcacgtcaccttatatggaagaggaggcttacaccattttggagtgtgtttaaggcaatcaattacattatgtaatttagaggaaaacttctcaggtgtatcataacctgttattttgatgatgtcttaagtgtgtatagagatttatagccatggagtgcttttttatttgttatcatatgcacatctctataccgaggtgtgtactataatctcccccaatgggtgaagaaattggggttcagacaggttaaagaactgcccgtaaaagtggcagagctgaggaataaactcgggcctcctggtccatgtctggctctgccctgcaccagataagcgatgctgtctcttggctctccagaacccctaccgttccccagaagagctcccttcacagtgggcttccccccgggctcagactggccctggacctgcacaggtcaggaccacagtgatcagtcagaccttggcaagaagcagggcctgcaccttgctaacccctggcacactgccagcccacagccagtgcctgcttgctgacttgaaaacggatgtaggggcacctccctcagagagcggctcctctctgaaaggcgtttctcctgcattcctccatcctcaaaagcagcgaaagatgtgagtccctatgaccgcctgtcctcagagtcctatgctatagctagagataattagtttagctacaaggaagaacttctaaattccacagtttgggcaagactggaactagtcagtgagggtgtagggactctcggcccctggcctccccgcacagggtcatagcattgctccttcattcctggcccaggagttcacatggggtgacttgcattccttgcttg

SEQ ID NO: 7461 - DNA, 1195 bp, Homo sapiens
tattttctaaaataatacctgagctggttaaatgatttctctccatcttagctaattctgtttaaaactctgtcagaggcctgcaggctgtgagttatatttataaatatatcttcagaaattaatcttaaaagaggcattagttcagaatacttttttaaaagtttaaattaaatatttaggcacgtcaggaattacttttccttattttgaaatgaggctacttatgtcttggttttattttgttccatgtttaaatcattcactttgatttgagtgggaaaagcctgaagcctttatcatgtggttgctggtgtgtgtaattattaatgaaatgttcactcctagtcccttatgaggcttagaatttcaaccacgtgtcaggtcagacagtattataaactgtactttgctgtctgagacagcacatttgtgaatgatgcttgctgcctgccattttcaacctattctctcttaagagtgctaggtaccaaattgtgaaagtttgttttcagttatattacttttgaggctggtgaaaaatttaaatgtaactttgtgggaacactgattcatatttagaaaatgtaaatgtctgtagcactttcttgcagttaatttgaaaactttggatgctgaaccttgtttgtcagtgatttagatgatttaaaaatgcatgtgtgatttgaattttataattgttttgacaagcataatttacttggacaacttcgtaggtagccttaacttctggccaagtttgttttttatataaatatatatacatatatacatattatgtatggttgtaaattcatacacttatcacatgaatgtgttactgtatacaaaactcttaatgctttattctcaaatgctgggttgaaaaatgttttgaaagccttttaaaatatatatctttataaagtaatattcaggatgatgataaaaattgtttatattgttatgataaaaatgacagtataatgttgcccagtgtatttaatgatttatttgaagagggattgggaaggaacgtcttcataccactttctcctttgaaattttcagtttattgacttttaaaaaatgaatacctcaggcagtagacattttttttctagtatcatttaattgataccctgtgcgctaaatagtgtgtggtgcctgattaatttggtctgaatatttgatt

SEQ ID NO: 7462 - DNA, 1166 bp, Homo sapiens
tgtgggtaaggttggatctcccttaaaactgccttttggattcagtgtttgtgcttgagttcgctttcaaatatgaccataatcgtgtgggtgcaagactgtacagtgatacatatgtagaggtaaagcattcattttaatacttaaagttatataaatcttttcaaaaagtgttttgttataaaatacgctgtttgtacccataccagcccacctcttctgaggccctgtattcaaatagatgatagtgatctatctttcctgcatgaagtgtaggtggcgagtgggcgaggggcgcagacttctttgaaatcgaagggtacagtcaaatctactgctgatttggttgttttgttgctgtggcagaatatgccatgaaacacatacagacttctccgaacgtgcaccctcatcagccacctcctcccctctttccctgagtgctgtgaacacagcagacctgcacacttctgcagatccagctcctacagcttggggcactaggctgcctttcctagtcctgtcaacaaccatacagtgcgaattgctgaattagctgctattctatgtggagtcacattaagctttttcttatctttttctatggggaagctatagggtgggtaaggaaaaaatgttgaatgcttttactttgctgaaaatattagaactctcttgtgacaggatacagcaaattataattaaatataaattaccagaaccagagctacctctaagtcatacttcctcaagcacaaagctctcaggcatatgagacccaccttaatgaagggtctctgatttcttgagcatcagcgagtttcagaagtgactatttttttgtactcttctagtttccttgtaactatacactttttcccattccacactgtgcttaaatgacaaagactcttctgagaagccaaattctgtccaagtattaactagagatattgttgattaaagaaaatctagaactgaagtgaaagaagagagttccagttctaatagtcttttgattaacaattcttttctgagaaatgatttttataagaaatggggtgattctttaaatgcttttcttaagttgaaggcacaacagttaatggctgtattgttgctattccgttgctgacatgtttttgataaagctttaacattcctgc

SEQ ID NO: 7463 - DNA, 1800 bp, Homo sapiens
gaatgacaacttaattaaaagatacttaggcactttttttttttttttgagactgagtttcgctcttgtcatcctggctggagtgtgatggtgcgatcttgactcactgcaacctctgcctctcgggttccagcaattctcctgcctcagcctcccgagtagctgagattacaggcgcccgccaccatgcccggctaatttttgcatttttagtagagactgggtttcaccacgttggccaggctggtctcgaactcctgacctcaggtgatccaccgcctaggcctcccaaaaccattagggctcagaggaaggtatcccaatgaatatcaattaagggcactttaatatataaattataaactaagttctaaaaggaaaattagtattttggatagatttgtcaaaacgacatttaagtcatgtttaaaaagtcatttgggcagttctggaaactagttttaatacatttgttttttatgacaaaaagttttattttaaatgttaaaaattgtccaatctggtgaatgtctaaccctaaagtttaaaaatttctgcctcctaagtttatgtaccttgtttccatccatttaccacatatttccatctgatagtctagcaggtaattaaacttatatgtccaaaaccatattcttccctgtctcttcaaatgtgttttgcatattcatcatttagtgaaacaaccatctatttcttcttctttttttttttgagacagagttttgctcttgttgcccaggctggagtgcaatggcacgatcttggctcaccgcaacttccgcctctgaggtttaagtgattctactgcctcagcctcccgagtagctgggattacaggcatgagccaccaccctggctaattttgtatttttagtagagacggggtttctccatgttggttaggctggtcttgaactcctgacttcaggtgatctgcccgcctcagcctcccaaagtgctgggattacaggcatgagccaccacacccggctaaaccatctacttcttataaaactacatttccttatctcccacccacatgaaggtatcatggcatataaggttcttcgcatttgtttgcctttctagcttcatctgtgaaatgggttaaatttagattggttattctatttatgaacccacctccacaggttgggtttctgctgccaaattatacagttgtacctatcattttggccatatatggagataggacccaaactgggccagtctctgaaaatttggaatttagctcaggaaaagaaagcccatctctttttgtgactgcagctgttgtatatatacctggaagcagcagagctgacatgcttaagggcagtgagtgtgcttaccgagaaaggcagaggtgataggagagaattttatggatcagtggcttcctggttttagttgctagtcattcttaagagctttctggatttctgcttttgggtccttttaagtgttaaaacagctttacttagctttttcaaaagcacttccctactagtttagcactcctctgaacccccctcaagtacatcccactttcagtccagtccctccacataatctaaccagtgttgaatggttggcacagcaggagacgccagggccctgcttttgtgtccattctaattgttagtgccatgccagtaaactcttaccctgcccacatacacaaattcctgtgccgctggcctttatgaatctgaggagactggcccagacatcatatgagctgcctctagcactgggattcctagatgggcacccctg

SEQ ID NO: 7464 - DNA, 1538 bp, Homo sapiens
cagtctttaaccaccgcaggttttgggttcatctaggcagctacactcaaaagacacccatgggcttggctgatcctagttttttattcagctttttcagtggatataggatatgtagcccagtgtgttggcaggacagcttcgagtgtctctctcagcaggagttctcacagagtccggggctattcccccacttaccacctcccaggatggctcaggtttaagggaatgaagccacacaggtgggagcaggagctactggcttagagactgctgtctataatagtaaactgttctgggagccttttcaccagaagccatgaagtctggtcctatgtatttccggggaaacagaacacaaggaaaatacttacctgtgagtaaggagaaagggtgttgcacaccttttctctcagcttgtgatcttagcacatgggggcctttgctgttgacctgtgtagccagttgttaaagatgtagtggtgaataccgtgtctgtccttctcttccctgcagtgcgactggctcaacaattaccacctgacctgcagggatgtgattgggaaggaattgcagaaacagggccgccaggaagctctcgagtggctcatcagagagacgcaacccatctccaaacagcattaataaatacctccccggttttgtttttgtaaaatgctctggaggaaggaagaaacgtggcagatccctgacatctttcccctttcctttccttcttccctacctcccctttttactttagactttaagaagaacagaaaatcttcttatcctctttgatattttattgcaaacactcagtcttttatgattttttaattgttgagaacaagccaagaataaaattgctgcaccagaaggagggtccctccaaagttgaacacttggtgaaaggaagatgccccgacttctttggccagtgatggggaatcagtgagtgctccatgatggtcatgttccaggtgctagtacatcattcatgatcaccttaatgctcatgagactatatttatgatcagtgaataaaaatgtcagaactgtgctttgtcttagctgtctctttcttcatggtgctgtcccccggcatgtcgggtgagctgatctccagggctgctggctctgtggcagacatttcctaggtggaagggcccctttgagaagagacccctggcctccccgcacatttgggggcttagttgtaagctttttcttttctctagaaaacctaatattatggtgtttttatctcagttttttttcctgattttaaaatatgtcattcctatgcaaaaaacaataaaaattatgtcaaaagtcagttttccataactcaccctatagcagatgccacaagtgtcttacctacatggccacagctctcattgttccgttacttgtaggcaggattctgtgacaagtgcctgcgactcccattctgcaggatttcttttgacttgtatatgtggggcaagctccaagggttggagagttaatgtccctgagatctcagaccatca

SEQ ID NO: 7465 - DNA, 1137 bp, Homo sapiens
gacattttattttgctgaagcctcctggattggatgaagcgtttccgctcactctgtagcaggaagggacagggtctgcatgggagagattggtgatgctacctcagaggaggacccaaacaggaagtttggaaacaagtcagtatctacagaaacttaagttagggaattgttggtgcttaacacagaaattcagccttacttttcagaaaaataacagatgcctaaatgtcagtggcaaggaggggagaaggctattattggtttgatttttgagtaagatctcagtgaagaaagagcagtttttatctgtttctcctgatgtgctttggttctcctaatgaggaaatagaggctaaagggaacagctctctctgcccttaattaattcaatcttctgcagtgtgtgctaatctgttgttttcagctagactgttggcttcttgagggcgggggccaaggattccccagtcttcatagtccccgctgagcctagcacaaggctaagcaggcagaacagtctgctcatgactgatcgaggcccactttgttgtcatctttgttttccagagtgagtatattgctccatgtgactgtcggcgggcttttgtctctggattcgatggctctgcgggtgagtcactactttttctctgttcttgctgcacctttgttcgcctcctaaaaataactgaaccgagtttcagcctgtgatatagaagcaaaaagaaaatgcaaaccagatgctccacattgactctctgcagaaaggtgtgggttcccagtctttccctgctccccaaggtcacctttcagtaaccctttttattcctctctgtatctttgcttcaaagttttaacaatttttatttttaaaaagtttttgaactttttattgaatataacatacatataaaagttctatcaattaaactgaatatacctgtgttactagcaccccaaataagaaatgagactttaatatagtttcagaacctcctctcttagcttattggtcccagataattctcccaagtgcttggcttttggtttctgttttcactcttggcttaaataacaaaggttaactctaagctgcattggtgttcctcaaaaccattatgcctttgagtttta

SEQ ID NO: 7466 - DNA, 2333 bp, Homo sapiens
gtcacctgaaggctccccttcaaaatcgccatccaagaaaaagaagaaattccgcactccttcttttctgaaaaagaacaaaaaaaaggagaaagttgaggcctaaataaagtctttttataattattattataacaatgtgacattgcacatctaaataccacatttaagttgatcattaatatgcaatggtagatcagattgggggatgtagcaaactggactttaagaactggaaagaggttttacaaaagaaaaactttcagattcatctctcattttatatgtccagaaatggctttgaattttaagcaattactagttttaattagctctgccctcatgaagtattattataattcaccataaacagctatctgtctgaattacttcaggccttctccataatatctgttagaaagaaattgccagtgagcaagtgagaatttttatttctcaatacctgcttcacttgataatcatattataattttttatcatgattattgactatatttttggagtcccattgtttcagtgggcattaacagaatgctttaaaaacttctaagacaagaatctatagcattagtatacactggcacataattttttaaaaagttttaagaaaagattcatttggaattttattcacagtataaaatttcctcacctgaagtaactttgtttgccaaaaaagttgttttaataaactataatttttgaaaacttccttttttattagtttagaaagccccttatttttcaacaaaggggattttgtacacataacatgggttatttagtttaactctggcaaaaaaaaaaaaaaaaattttgtatgttgatgtttgtataccgttcagtataaaagtgtcctaagcatattagccaatcttttcacagtagagcatacttaaggctgcttggtactgagtatacttaaatataactccagaatccagggacttggtgttaaaacaggattagagcatgtaaaggtacatctagattcatatttgaatcttaaactgtatttttctcttagtattgctaatgagtaaagaaaagtctcataaggtagccaaatgaaaaagaatgaaagggaaagtgaaaaattaaggggacaaaagatgggatgtgaaaagaagaattctagtttgatggtgactcatattcacgataggatacaaagtgtgatttgttggaaacatgtcccaaatttctaaaattctgcttctctgccaaaagcaatgtctttcttggttgatatttgagttttaaaagggtcaaatctttctaattttttgtatctttagagggcagcactagaagaaatcagcaggtctaatcccaccagtaagaaaactaccacttcttgatttttacagatttaaaaaaatcttttcagtgacctttctttttaatgtaaatacaaatttaaacctaggcttaatataggcgtttcccctttcacccaagtgatgtcacagttcgatgcaaaatcaatgatccagaatgatcgtgggtaaaaataactcaaagtgtttcttaagggtgagttggcatgcaaaaaattacattgattacagtgtgttttggagctggctctgtttgtgtgcatatgataatgcagagttgagccagagcctggaaatgtcattctagatctcactaactactggaatcagtgttttaatctcttggtggaaactttcagttgcttaactctctattggaagatttttttaatgttctacatcatttatgttgtattacaatgtatgtagaaatagtaacctgtgaactatgcttttccataactttttaaaaatatatatatctaaatgaatgcaatgtgcataaatattttttaaacataacagtgaactattgcaccttttgctaatgcctctatttacttgctttggcataaagaatgagccaatgaacctctgtgtcctgtggaaaaatgtataaatgttatctgatattgctcttagatgtaatgctaattaatgttaaatcacaaataaacagtattttaaatatacggacttgtatcatgaggtttccattcacaggtggttacttagcctattcatggtctgttgagttttatacttcagtgaaacttggtaagttattgatgcttctgaataaagaatgtcctgataaatatattttcaaattagttgaaaattatatatatatacaaaacctgtcttttttcagcttatgttagaggagatattccctgagagacctgttttgtctcttgataatgggtatggcagcctctatcaatgtagaatagatgttgcaggatatgt

SEQ ID NO: 7467 - DNA, 1259 bp, Homo sapiens
cttattttgcagatgagcaaactgaggcacataagttacatgagaaagtaggagatagaggactggaacatgatacttcgaataaagaatgtctcagcccctgggcaaccgcagggagtcgctgagaaacaagtttccccgggagtagactcccagctcgctcaaatccttcccattccacatcgtgtctggagggaggaaaaaaaaattcttccctcccagaagcaaagtcccgcaacttcttagtcttccctagagacaggaaaggaaacccagcgggactacaccttccgacgacctttgcgaatcttgcggaacgcaggcgccctgaaacggcgtgtgcactacgattcccggcagccgcgggcgggtgcgggactacatttcccagggggcagaggcaggggcgggagggggcgggccccggcgctgctcccgcccctcccccgtgctcgcggggagaggtaaacaaaccacgcgcgggctgcccgcggcacggcgggcgcggctggcgcggctggggcggcaggggcggcggagagcgcgccgagccgcggccgagctggcccgcccgcccgtcgcacatgttccggaacggcgcccggccgtagccgcctgcggcgcctcctgtcggcccgagaagggagtgcggagaggcgccggtcgccacccgcggtgcccatggagcgggtgaagatgatcaacgtgcagcgtctgctggaggctgccgagtttttggagcgccgggagcgaggtaatggctgggcgccgctgcgtgagcccgagcgctactaatctttttcggcagtgcggtgcggccggtaagggagggcacgcgtgtgaggtgcgcgcatgaggtgaggtgtgcgcgcatgtgaggggaggggtgtgcgcgcgtgagggtagaggagcgcgcgtgtgtggggaggggcgtgtggggaggggagcgcgcgtgaggggaggggcgtgtgagggaggggtgcgcacgcgtgaggggagcgcgcgtgtgaggggaggggcgtgtgagggaggggtgcgcgcgtgtgaggggaggggcgtgtgagggaggggacgcgcgtgtgaggaggggcgtgtgggtaggggagcaggcgtgtaaggggggcgtgtgaggagcgcgcgcgtgaggggaggggcgagtgaaggaggggagcgcgcttgtgatgggaggggcatgtggggaagggagcgcgcgtgtgggaggggcgcacgcgtgaggggaggggcgtatgagggaaggg

SEQ ID NO: 7468 - DNA, 1470 bp, Homo sapiens
ttattattttttttttttgaaaaaagctcatttcatgctctgcaaaaggagagactcccatgaagccttttgaaagggatcatcatgcagctcaactttctgttggattccatgctaagcaagctaaccttatcctgcattgttagcactaggcacccagctgccacctctccatcctgctgcccttaggccacatgggagcagtccatgcatgacagcctctatcctacaaggcctatgagtatggattgggggggccaaaaggaaaaagctccatgtgcctctttgtctgcgtgggtcagaagagttgtgcacgcagattagcaggccaaggtctgagccacagcagcatttttatttcagattttgataactgtttatatgtgttgaaaaccaaaatgacatctttttaaagcttatccataaaaaaaaatagatgtcttttatagtggaaaaacacatggggaaaaaaatcatctattttgatgcagcatttgataatgataaaacacctcacacctcactctttatagtgcacaaaatgaatgaggtctgggctaggtagaaaaagggtcaatgctatttttgtttttagaatcattaccttttaccagcttttaaccatctgatatctatagtagacacactatcatagttaacatagtaagttcagcacttgtctcattttaatgtaaagatttgcttccattttcctacaggcagtctctctcttcctcacagtcccactgtgcaggtgctattgttactcttacgaatattttcagtaatgttattttcttctaagtgaaatttctagcctgcactttgatgtcatgtgttccctttgtctttcaaactccaaggttcccttgtggccctctcccttaccctgggaaggcctcttggagaccttacccctggctgtttggactttgtatactttaaataatttaactacccttaattacttaaaaaaaaaaaaaagctttatgattttcataacttattgctgattttaatggattgttaatttcagtcctgtagttttattttatgtttagatagggctgggcaaggaaaaagaaaataaagacaaccatatttagcagtgcagttgagttgtgtgttaatgttagactatccctttgtgagtgacactttaacagcattcactgcttctatatatagtgtaccatcttggtcatacattacgcctcaacatatacttgtgctcttcctttgcctccagaagaagtttttccttgattgtgctatgtttcagtggaagaaattctttgaagtagatgtgagtgaaaaactgcatgcctttagaagcccagtatcagaacttgctacgtttcaggtgctagggacttaatgaaaaacaggacaaaacaattcctttttgtggcccaggtaaattatttctggtttcacttataattactaatggctgagtcaagatgttgt

SEQ ID NO: 7469 - DNA, 1230 bp, Homo sapiens
atattttccacaacttagaagttacagtaaatggcttccagcatgggaccacttctgtacccattttttaacactaaacaaaggcaatatgtttttcttcttttaaacgttgaaaccagaatatattttaacattacttaaaatttgaaattttttattttttccaacactaatcaggaatgatttctgttttctttcccttaggtaaagaggagtatttttgcttcacctgagagtgtgactggtaaagttggagtaggaacctgtggaattgctgataaacctatgacacaatatcaagatacctctaaatacaatgtcaggcatttgatgcctcaataatcagaaaaactgttggatttcatctctgcagggctttacatttacctttttatccttatatttttctaaaggtaaattatttgttagatgagtaagcaagataccattgtcgtcattggttggcttcagtagaatgaaacgtgaagaaattgcatttgataactgctattcatttaacttttctcattatcagtaccacggttccctcaaagtttgttgaataaagcaacttttgtagatgctgtttcatacagcacttagatgaattattgatcttcctaatatcaggcgcctacttaacctatggtgtgtactttttgtaagttgtaacttgaaattttcagatgctttgaacttgacacatactctagcaattcattggaacaccaaggcaaaaacaccaacctgctaaaagagatcttttcatttttcttattttcagctttaaaacttagctgtcgttcagttaagcttaaagataggttaatttgtaaatggcaaagtttgttttgaggtttttcctcaataacttgtttcccaggcctattaggccatctctaaaattgatctagctgttttatttttatgtactcttagttttatgtaagaaaccttaggatgagctcccttttctaaggtgtttttgttttttgtatgtttgcttttttcctgttttttgttttttccatttacggcagtggtaccatgttttggatgtgtgatgtttatatgggagaacaaaaagctgatgtatagccctgtatacagtgtagatactatttttgtaaaaacacaaggctaaattaatgaacaagaatactgaatatttcatcattaaaaatttcttgtatttcttgtgcattaatctgacgataatttccctgtata

SEQ ID NO: 7470 - DNA, 1141 bp, Homo sapiens
ggagtaaataagattttgtttttctaaaccaatctagctaggttaggattatacaagaaattttcatttccttaaaatttagttaattagcattacttattagttgtaagtattgctatgagtttgagcttgttagccttaccatatttatcttactgcctttacatatttaatgttttgatcaagcattttaattgatttttaaaactgcatagatgtaaactaccaacaccgattctaaaaaatgaaaagcatttaaagaaactgtttttgacagcatgcgttataaaaagggccagccacaaaaatttaacattatgaattgataagagaaaaatgaagaaagtatagggcttttttgaagaatataacatattaaacttcatttcagctcacatgagcacaagtactagagaggacagcaaatgagcaccattcctgtgtgtgaaatgtacatgcttatatagacaactttttcttaattctaggaaaacagacagttgctaaatgaaagaattaaattagaaggtattattactcgagtagagacttatctcaatgagaatctgagaaaacgcttggaccaagtagaacaggtgtgtatgtgtttttttttttttttttaagggctccttggtggccatgacctattgcaagtggttatatcagaggctctgattgaaagcatgggctttggggacagaaagcttagtgtcttgtgggccttgggttggaattctgccacctagtgtgtgattttggacaagtcactatttctaagcctcagtttcttgtgtgaattaagcattatcatacttgttttatataattgctatcctgacacattctaagtactttgttaatattttttcagtggtggttagatgcttagaaattttctagtaattgtgtcttttttttcttccctttaatggatacttctaagtatttgtaattatatgatgtatttatatttttttgttttcttgaatgtttattcagacaatagccatagaaaatgttggcagtcataacatttgaaactaatggaatttgtattttttgttacaggaacttaatgagctgagagagacagaagggggtactgttctcacagccacaacatcagaacttgaagcca

SEQ ID NO: 7471 - DNA, 1136 bp, Homo sapiens
gtttactacagaatgaaatgtccaaataggcagaagcatatgctaatgattttttgttttccattataaacaatgtatagcaaatggaatttaggaagttgactataaatagtaacttttgttttactgaaatgtttatgacaattttgagaccataaatgattcattttgttgataaaatatgaaatacctgacgaaagtttctcatcacttagttgttagaaaataactatagtttataagcattaacattgaataatgaaaattatatatttgagtgactcatatatacttctaattttgtactgacttaacatggttcataaattttcacagaaaattttaaacacaaaacctaaaacctattttggtaggtttgatcataaaaatctatactcaacatataacactggctttataggtattatagcctaattttgtttccccccatcttagatttggacaattccattgataaaacagaagctggaattaaggagcttcagaagagtatggagcgctggaaaaatatggaaaaagaacatatggatgctataaatcatgatactaaagaactggaaaagatgacaaatcggcaaggcatgctattgaagaagaaagaagagtgtatgaagaaaattcgagaacttggatcacttccccaggaagcatttgaaaagtaccagacactgagcctcaaacaggttggttttaaatttgaagtcttgttacaaattgctcagtatataaatttatttatatgaatacatattttctctttatagttgtttcgaaaacttgagcagtgcaacacagaattaaagaagtacagccatgttaacaaaaaggctttggatcagtttgtaaatttctccgagcagaaagaaaagttaataaagcgtcaagaagagttagataggggttacaaatcaatcatggaactgatgaatgtacttgaacttcggaaatatgaagctattcagttaactttcaaacaggtatgtttcgctttgtagttaaaacatacacacagaggacaaaagcttccagctcttttcagtttgtaaagattttaaagctgttttcctcattaccaggtgaatctaatacatgtgaacaaacctagcatataggtt

SEQ ID NO: 7472 - DNA, 1199 bp, Homo sapiens
agtcttttccaaaggaattagaggcatgctttttttttttaatggaaaaccctttaaaagctaacacgtaacgaaaaaataccaagtttttaatttttttatatattgactatagtcagaatttgtatctgttttcatgtctttttttttcttcattacaggggcagaaagcgttttgtaagcgaaggagatggaggtcgtcttaaaccagagagctactgaatataagaactcttgcagtcttagatgttataaaaatatatatctgaattgtaagagttgttagcacaagttttttttttttttttttttaagcacttgttttgggtacaaggcatttctgacattttataaacctacatttaaggggaatttttaaaggaaatgttttttcttttttttttgtttttcgagggggcaaggagggacagaaaagtaacctcttcttaagtggaatattctaataagctaccttttgtaagtgccatgtttattatctaatcattccaagttttgcattgatgtctgactgccactcctttctttcaaggacagtgttttttgtagtaaaatcactggtttatacaaagctttatttagggggtaaagttaagctgctaaaaccccatgttggctgctgctgttgagatactgtgctttgggagtaaaaaaagaaagttatttctttgtcttaaagaatttttaaaaaattagtcatgagacttattcatctttccagggaacatactgattggtcttaaaagactagacagttaagtaaaaggtggctggaacatctatttttctacaaaactggaaaaatgaacctggttctagaagaatgtacaccaaaataaaacatgtgaagcagtattgattctttattgggagtacatttttttaggtctcttaaactttaatttcacacagtaaattttgaatctcataaggaagcatatttgaacctagtcaatttaatcttagtgttcccttgaaaactttttttccctacaaaattttaagtgaaaaatacaatagtaaattaagattacactggggaaaaaaatgcaggtatcactttactccattgttatctgacctagagcttaattaagttttagaaatatgtaataccttccatcattccatcatccttaaattctgttaccaaataatggctaatgttacaaaaagttata

SEQ ID NO: 7473 - DNA, 1199 bp, Homo sapiens; identical to SEQ ID NO: 7472

SEQ ID NO: 7474 - DNA, 1127 bp, Homo sapiens
cctcatttttttttttttttgagacaagagtttcactcttgttgcccaaacgagagcaatggcaccatctcgactcactgcaacctctgcctcccaggttcaagcaattctcctgcctcagcctcccaagtagctgggattacacgcatgcgccaccatgcctggctacttttgtatttttaatagagacagggtttcttcatgttggtcaagctggtcatgaactcccaacctcaagtgatccgcccacctcggcctcccaaagtgctgggattacaggcatgagccaccgtgcccagcccttaaatctcatttttaagaaaccctcacctattctgtagtcagctaagcttttaattacattaattttaagcacttgagaataaaatgactgcatttatcatccaagtgtcaaacaattaaaaacctaaaaatggtaactatatataagctgaggtaatatgggcttgataaagcccatgaggtaaatatgaacactaaacttggttttaattctaacagactatatctaaacctgtaagcagtatactcctaacagtaccctcataaattctgaatataattcttgtttgctgcagtcaatatttggcagtttaaattagcacagacgttgaggccttgctgagttattaggctatgtaaaagaggttaaaaatatgatcattctttattgttaattggtaatattttctcatacattaggtaaatgtcaagctttgggtctctggagtataactttttgtaacattagccattatttggtaacagaatttaaggatgatggaatgatggaaggtattacatatttctaaaacttaattaagctctaggtcagataacaatggagtaaagtgatacctgcatttttttccccagtgtaatcttaatttactattgtatttttcacttaaaattttgtagggaaaaaaagttttcaagggaacactaagattaaattgactaggttcaaatatgcttccttatgagattcaaaatttactgtgtgaaattaaagtttaagagacctaaaaaaatgtactcccaataaagaatcaatactgcttcacatgttttattttggtgtacattcttctagaaccaggttc

SEQ ID NO: 7475 - DNA, 1149 bp, Homo sapiens
tacttaaaaatatttctgtgctttagtgtttctttgtataaaatggggataacaatgtatctcatagggctgttgtatgtgttatattaatacatgtgaattcctcagaataatgctagtacatagaaagcacttaataaatattaagcttattgttgtggtttcttccactttttaggtcttataaaattttctagtaaagtaacttacattcatacatcttcctattagattgcaagtttcttgaaggtagagccagccttattaagctgtgtagttttaaatggatttttacctataaaggatgttcataaatatttgagaatgaaatcataggaaaatggcaaactctaataagattgtttttcagagcctatttaatataaattatctaaagtaatttaatactgtctatattatatttcaggaactctaatgaatcattgattgaccagcactattttaccagttggaatgaatgatcagaaatgggcatagtgcttttagatccaacatgtaacagatggatgttactccatgctgattacttcttcaagccagtacttttttgattgtgtaggatctttgtctcttcatctttgaattcaattactggaaaataaaaggagttcatgtagtttttgtccaggcttgagtcaccatgagtagtagtttaggaaaagaaaaagactctaaagaaaaagatcccaaagtaccatcagccaaggaaagagaaaaggaggcaaaagcctctggaggttttgggaaagagagcaaagaaaaagaacctaagaccaaagggaaagatgccaaagatggaaagaaggactccagtgctgcccaaccaggggtggcattttcagttgacaatacgatcaaacggccaaacccagcacctgggactagaaaaaaatccagcaatgcagaggtgattaaagagctcaacaaatgccgggaagagaattcaatgcgtttggacttatccaagagatctatacacatattgccatcatcaatcaaagagttgactcaattaacagaactttatttatacagtaacaaattgcagtccctcccagcagaggtgggatgtttagtaaatctcatgacactggctctaagtgaaaattcacttaccagtttgcctga

SEQ ID NO: 7476 - DNA, 2732 bp, Homo sapiens
gtaatgttaaaacgttttctaacagtttactgttgcttatctccaagatattatggaattaagaatttttccagatgagtgttacatagattctttgaatttagtataaaagtactgagaattaagtttgtacttccataagcttggattttaaacactgatagtatctcatgagtaatgtgtgttttgggagagggagggatgctgattgatatttcacattgtatgaaataccatgtttgaaactcatagcaataatgctatgctgttgtgatccctctcaagttctgcatttaaaatatattttttctttataggaattgatgtataccatgaagtcattgtcagttgtagtagctctgatgttgaatgagatatcatgttttagcattccattttactgactagggtagaagaacacttttcttggctacatttggaggatacccagggagtcttgggtgttccttatctggggaagcaaacatttcactagtctctttttttcatcctttaaattgtaaattaaggattactcaagctcaccattattcaagattgggactcgcttcccagtcgacactctgccctgcctgtcattgctgcaaagagctgctgctttgccaacctaagcaaagaaaatacggcttctcttgcattattttcccttttggttggtttgttttctagaagtacgttcagatgctttggggaatgcaatgtatgatttgctagctctctcaccacttaactcactgtgaggataaatatgcatgctttttgtaattaactggtgctttgaaaatcttttttaagggagaaaaatctcaaccaaagttatgctcatccagacaagctgacctttgagttaatttcagcacaactcattcttcagtgcctcatgactgaaaacaaaaaacaaaaaaacgaaagcatcttcacaatgaagcttccagatagcaccgttttgctaaaagatacattctcattgttttccaacagtgatggcttccacataaggttaaacaaactaggtgcttgtaaataatttattacagtttactctatcgcatttctgtaacatgaaatgcatgcccttcttcaggggaagactgtggtcaagttaaaaaaaaaaaacaatattaaacaacatgaaactgcagtctgtttttgaaaatgagaatgtcctaagtgattcagaagagaggagggaagttgtgcactctgaaaatgcatgaaaaacaaaggcaaaaactagtgggaaatgtgtagaactgttaactgagatggcttcgagtcttccttctggaatctgttaaatttcacaaagtcatgagggtaaatggagaaaatatttctgggattacaatgaatgtaagcccaaattgtggaattgccagtaacctggatggggaaaagcatttcccatagcactccatgtaatatgagtgctctgtgagatgttcatcagtgttttatagaaatggtgttgctgggaaaccaagtttgcacctggaaacttacaatgcactttagcgcagtaagggcttggcatccggtagtgaaaaactgtctaacccagcattgcccaaactattttgacaccaggacctttttctcctttgggatacttatgaacctctcactaatgtcctgtggagaacattttgggaaacactatgttagatagttctttaaggagacaaaacggtaatgaacagatagcactggggcagaatatgcatgcattttgtaacgtccagtgtggcgttgaatagatgtgtatttcctcccctgcagaaaataagcacagaaaattataatgtaggtgatcggagctctttcctttgatagagagaacagccccaatgatcctggctttttcactgaacgtatcagaatacatggatgaattggggtaaataaggttttaattcagatctagaagaaagtattgtacgtttgaatgcagatttttatccacagatagttgtagtgtttagacatgacaggacctatcgttgaggtttctaagacttactatgggctgtaaacctgttttttaaaactattttagaaacctgagacttgccgtctggcattttagtttaatacaaactaatgattgcatttgaaagagattcttgaccttatttctaaacgtctagagctctgaaatgtcttgatggaaggtattaaactatttgcctgttgtacaaagaaatgttaagactcgtgaaaagaattactataaggtactgtgaaataactgcgattttgtgagcaaaacatacttggaaatgctgattgatttttatgcttgttagtgtattgcaagaaacacagaaaatgtagttttgttttaataaaccaaaaattgaacatactcttgatgtgtttgatttgtatttaaaacagtttcctacataattcattatacgaacaattattgttttctgactttatatagcaacttattaaaatgcttaacgataccttacataaatgtatgaacctacagttcatgcttttattattgacccacagctttccaaatttgatcaagcatttggagatgtaggtctgcttcttagctattgctctccttttatttagtaaatattcatattctagggagattctgtgggtttttgtaaagatttctttaagcttggtgctttttgttatatttttacatatttaagtttataaaaagtgttttctccactagt

SEQ ID NO: 7477 - DNA, 1156 bp, Homo sapiens
ctcaattgagagacacacactctctctcgatttttctttaagcattgaagcaggcaacaaagaaagagatgtgtggtatgcatccctacggttgtcaccatgcagggtgcaagggtcctgtgatgatgtggtgactgtattaaagagtacatcaatttgttttaaagtgttttgattttttatggtggcattaagagagagaacattgtggttgcagctttactagaaagcaaagagttctagaagaagaaaaaaaaagtgtttctttgaagcctaccagggctttgaatcttgctgtgccaatgggcgcttaagtgctcccgtaactggcaacctcagatccaccatcagcttaggaactaccatcctctccaaataattcatttaaaggaataggaaaaaaatgtgtaaattgacctaagcaatattaatgatgattgactgcaagtttttctttctttaagtgatttcagattttggatgaacatataacacatgttggttatactgatgtgcactgattccgttgtaaagagcagagatacttctaaattttgcccaagtacagattggcaacattgctccatttaattgtttcatacataataatgaatgctttactttgtatatctggaaaataaacctgactaataaatataggctgtcaaagtataattctgtagggcttcagcttgagacctcatcatctcgtcagtattgagaaaaaggtagagcgatggtgtagggggaaaacctggccttttgttctttacatctgaagtttgctcactgcaggcctccttcccacttcaaatgcaacaacagaaaggaggccttcctcttcttccctcaccctacatgcaccccccagtgctgccatcccgcacagccacgtttccacagtggattatctctttatcagctattcttcccttcactccatccattttccactaaccaatcaggcagccctcttaggaaagactggtgcttacttcaataaaatgttaattctgtacacacagagccacacagccattctagatgttgcttgtaacagaaaagcattcatgtaccccagacatggagaatacctgtattgggtgtcttatgagaaaaaattgggggaaataaagttatgatgggtagtagttac

SEQ ID NO: 7478 - DNA, 1220 bp, Homo sapiens
catttagtattgtgtaaataaagctgcagcctttacttcggagggatggtgtgggattttggccgagggaagcaggacagagaaggagcaggaagctatgctaattttcctgtcagcttaagggatccgtctcagcaagaatcttgtattctgataacggaatgctgtacgtgctgaccacatctaagaaccattaaaaagcaaggaaacaaacaaacaacccttttctcattccgacacacgaatagtcatcgagtattacaccagcccctctggtggcttccttcaaaactgttgatcttagctaaagtgtataaccagttaccagctgcacttcgcacggccatcccgtccacaatgcagcagactcttcccaaggccacctagcaagcaaggttgatcggatcatctaaactggccgcctcctgaatatttcactgaatcctggcgttcatgttgaagcagacaaaatgagaaaggaggagggcattgctcacctctcaatagcttttttcgttcaagttctatgtctttatcagctcttgcctgtgattttaccccaattcaaccttgggagtgggaagaatatgaacagataacccttggcctaacagctccatcaaacctccttgagagcaactacctaggccaggctagtgagtgctttgtgaggaagctggtcagaaggttccctcaactccttcctggtcctcctggacactgcagaaaagacttaggggatccccagcagaggccaattgctctccttccttccctgccccaccaggaaaggaataacgtccacagacttgaagcagatagtgaagtagatctgtgagaggttctaggtacttagtgtgtagactttgacgaatatttctcaagttgggagcccttgttaaaaatgatgtttaagggagtggttggggggaagatgaaggcatggaggaggaagaagagaaggaagcccttgccatataaaattcatgcagactaaacagtttccctgacagaataaataaagtggatgctaccccactccagaatcaaaagcaatttaattaaagtctcttaagttgtaaagagttttaaatgatccgtgttgaaggcgaatgcctgcaaatgcagtgggtctgacgtcagctgccgggcctgggctgggaggccatttgctattctgtttaaggcaggctggattgtcttattttggaaccagcttg

SEQ ID NO: 7479 - DNA, 1057 bp, Homo sapiens
cctgcctcatattcaatgaaatattgtgtgtacagcacttagtaattaatgaaactggtaattattagcttagttactgtaatgataatttgggaccataaacacatatcaccctacattttctttgcaactacaatttgtgaaggaaaatctcccactaactattggttatgttaatattcttcatagagttgggttcaagaagagaaatgttttataatgaagcatataactattttataaacaacattgtagttataaagaagcatgcctatagtgttattaaaaattttttgtacgactttctggagctacaagtaatgaacttgctttgagagggtccagacatactcatcctgaaccacattcctacaacatatgcccaacaacctgcaccagagtacttatatcttaaccaaaaagtttcacttcaatggtggtgcttcacaaaatcttcaaagtgctttcatgtgtattgcctcatttgagcttcaaataaccttataaatcgggcaggtagatgttagtttacagaggaggagacagctttggaatagtggtgacgtatctgaagaatagaaaaccggaatagtgctcgatgcctgaagtggtgcctggcgccagcagatgttcacttctgtcaaacaaggggaagtagtggtggagcctttattcaggcacgggtctcctcattcctaactccaagatgcagagggaaaacgaactgctcaattaagagttcttccatggacactttcttaagccttcacataaaataacaagaataatagatatttattgagtagatatttattgagttctttctattttccagcactcatctattaagtgcttttatgtattaactcatttaatccacacaacaaccttatgtgagaaataccatttttccttatttgattggtgaagaagcacacagagagggtaagcataatcaaatacaccagcataaccaaaatcacacatttagcgagtggcagggcctggatgggagtctgttcaactctctgctgtattgcctcttaaagtaggtttt

SEQ ID NO: 7480 - DNA, 1138 bp, Homo sapiens
gtaaatagggcaaaacattagttgataaattatgctaattaatgggaaaaatagacatgttcctctctgaacatttagaaggactctgccctacaactatcttctgtttttagaatttgtagtcactgttcttagtgccactggaaatatattcattctttgagcatgtacagggtgggctccctgttgtatttattacacttttcaaaatgccagcaagtttttgtttgtatagagttggaatgtattgttcgtgcatgcctgtgatattcatcatcaaaatatacctgtaaaaaataaactactgcttcctctccacagcttaggcctccctcttactaaaaacaatagtagtttctgtagaagtttcagtgagaaattatggttatataaataacagatatggcagaacaattttgttgtagtatttttttccgtagcatttcttaataatagctcagtttttaaaggaggggaacaataccccatgagttcaaattaattttctctactttgaggtataccttcctaattatattttacataggctgttttttttaagtttaaattctcactgttaagttgcattgagagacaattagaaatgttgtaattgtcatatctttacatgtggattatgaacaaatgaaagtttgctgtgtgattgcagttttaaattataacatttcataaatatgtcaattttagaaactcaaactctttcccatcttttgtatggataaagtttatggtttcatttctgagaatagagttggtctgctgtgctaacttcatgtttcttattccaaaggcttgattatatttttttctccagtgattaaaaatgcagcgaaaatccaatctacaagttcatatattggtatttctagacatagtctagttctaaaagaatgtacttggtgtgcatttttaagtgtttcatgtagacagattaatatatttttgtacaacattgtatttctacatttatttcaagactgtacttttcagtgactttttcaagtgcatgtgttaacagaagattgtttggaacgagagtgcagtggcttctttactagcaaagagaagtgtaatacaagtgatcatagaaggtgagaatgtgtttatactgtatatg

SEQ ID NO: 7481 - DNA, 1180 bp, Homo sapiens
acatttattgaaaacctatactattgtattggcaccatacagggtattgtatttatactagtgagcagaccagggcatttccatcctcatggagttcatggtctaatgaaaatagctggggccgggtgtggtggctcacccctgtaatcccagcactttgggaggctgaggtgggaggattgtttgagcccaggagtttgagaccagccagggcaacatggcaaaaccccatgtgtacaaaagattaaaaaattagccagatgcagtggcacatggctggggtcccagctacccaggaggctgagttgggaggatcatctgagcctgggaggttgaagcttgcagtgagctatgattgccactgtactctatactccagcctgggtgacagagtgaaaccctgtctcaaaaaaaaaagaggaaagaaaatagctaggagacaatcagagcagatcttgggcttctgtggctcatctcagccctttataactggcctgagaagagggtttatctacttgtgcaagtggcccagaaatctcactcgtacatgaggctttggaacatccttgcaaaggtacgctgaaagcaaattgctgttttcctggtggttctgcacgtttcctaacttttatcatagtttgattttcattatttaagaaaaaataaaaaatccaaagaccataagatggcattagattttttaccattaaattattaatgcctatttggtgctcataaagattaatcatgtcacgcatgtttccaatctttcttttgcagtatattattttctaaaaattgttacatgcaaatttaaaccaagatttatcagtaaaagaaaaaaatagaatccttaataatgtaaatgttgttatatatgctaccctggtgaaaatatttttataaatcatgttgtcatttatgctttatgtagcctatttttcaataacctttttttaaaagcaattttttttgacaccaagattgttgatttttaattaacaccagttggtggcactagaaacctgaaatttttcaaagatgaacaaagaaaaattgaaaaggtaatctaaacatggagaatttttaggaaaataaatgaaaaatataattgtatattagagatgtatttttcttctggaatggaattctttttctaaaatgcaaatcgctatccatt

SEQ ID NO: 7482 - DNA, 1223 bp, Homo sapiens
ggttagttatgaaatgttcttaatatgacgtgttcaataacttcacataaacttcctgttctccaaaacctcaaagagatagagttaatgagttgttgtttttttttaaatgggggtagttttctatctgtcatgggctctagcatctactccgctacccaattctgtcatctccaagctgagtttcctcttctgaggcagaggctggagcagttctttttcagttctcatcctctccatcccaatccagtatatcaatcaactctaactcggagacgtctagctggcaatgtttctaaaactttcactggatttctttagacattgaagcaaacatttttttctaagaattgcttctcagatgatgatatcaaatgtatatgcttttgcaagtttgaaaagttcaaattaaccacttttgactaggtaagtctttctaaaaaccatttaaagctaactgggtcttagcatcctcctgtgtatggaagagacaggtgaccgctccaggttgggtgctcacagaacccttttcctgactctcatggaagatggtggaaggaaaatagactgtctcatcaaccctcctgtgtcctctgaagcaatctcagtttttattaaccacctcttctgtgtttctggtagctatttaacctgtatttaatctgtacttcctatgccagcctcaattttatttgatttttacaattattctcttctaaccaatgaagtgtttgtcagtatgccccaaagcttgctcttttgtgctcccttttgaataactttctatccagaaaaagagattatttgggacttgagatttgcagtgataccaacttatagcaatgatgtactttaagggaactacccaactatgttgtgatagaagaaagagaaaccttcactttggcatttttttttaatcactgtttatttttctgtttgcggcccaggaagcagtgggaggtggtggcagatatgctttgcatatggattgttatgtttttatttgggcaagtttaatcatggaaaactcaaaaagaaggggggaaatggtcagtttaagccaaaagaaactttctaaacaatgtataggtacacagcaaaattaaacaaatccaacaatttctgaagcttagtgtaattgagtggtggttgttattcaataaaattattcccaaaagtgtttctcctaagagtgcagttcccatgagtcacttcctgaa

SEQ ID NO: 7483 - DNA, 1226 bp, Homo sapiens
actgtcactaccccctctaggaagttattttatgtagcatgtttgcatatacgcattgtgtggcatgtgcatagaggcttgttttacacctatctgctcattttgttgtgttagcttttctggtttatttcatagtttgttcttgctatttattaagaacagaatatcaaaagattatgaatagcctcagctctagaatgcttaccactgttaaaacaacaaaaagactaaacctctaatttcatgcaaatctttgttagcttattctaagaaatttattaagtaaaacaaagaaaaaacagaagtgggagatagttattttgtgcgtaattttctttaaatcattttgaatgatgtgaaggcattcagtttgctgtatttttttaatcacttcatacaaggaaaacttcgacatttacatttctagatgtagtaacagtctactttgatatatgagtatttaaactaaggcattaagagatattagatatttcttaatgttttcatagtgctcaataggtgtagtagcaatgatattacctctgaaaccaaatactcttttatccttgattccactatgggaccttataactagtccatgaaaccaagctcagaaaagctttaactcttatatttgtgtatatgtatgctgcttctgaaaatataatttttctaagttgttgtaatgactttaatttgtaatcagctaaggcttaagatttcatttgtttctaagtttctgtttttcatcccttcttttttcttttatatttagttcagacctagagccagtagaagctctcacagtgagttcaatttgttagtgaaacattgtactgcatcaccagtttttcttaccttctgttgacagctgaatatttctgttactcagtacttgcaaaaacagtaactaaaatgcactatgctgagtggaaagcaccgtcataacaattgattgccatagcaagttccaaagtgaatttcagccttgcttcacatttgtatcaataaatatgcacattttttaaaactttctaacaatatagtctttggatttgtttttagttatgagccgcattctttacttgatagaactcagatttgtcttagcctattgccatatagtactcaccttataactatgtaactttctcgtaatgtatctgtttgtgcaatatggaagctgtgagtggattcatagctttttggtttaattgtacattatt

SEQ ID NO: 7484 - DNA, 1097 bp, Homo sapiens
ccaaaattcttagctcgcttacactgttgctagtgtaaacattgttacacttaattttacagggcacaaattatggaattacttcataaattcatggtaatgttttcataaattattgcattaacatacaattgccatttaattatgaagtccatcagtattgacagaagacgttacagtgaagtgctaaaaccacactatatggtaattatattttgggttatgtagtaaatcaaatatgcatgtcattgtgacactttatgtgttaaaacatggtagataatcacattttctgggccctgtaaaatagtgttactgtaatactctgttttgcctcctgccttgtttacattaaacaggatatttggtaaatttttttgtattgaaagttgtgtaggttactgacagtgttaccagcgtctggaattcttggtccctccgtggagaaactcttcagatggtcattgtgtacctactctctcttcaaaggaagttgtgatcaagttcaactttttgtgctaacaatgcatgcaggactaagagggatgatctaaaaaataaataatgtaatttaaacaaaacgtcttatgtttttgtaaaattctaattgggaacattttatccaatgataaatctcaaacaatttttaactttttgcacccccagcacacaaagggatatggcaccctacaatcagtgggtctctatagtattctagggagagaacaaaaagcaatgtatctatttgtggaggagagatgtgtagcttgaaaaattcccccaggaaaacctccacttcccttcttaataatcactgcccaaaaggaaggaatgtttatgcacgtctcaaaaacaatttttttttttttgaggcagagtctcgctctgttccccaggctggaatgcaatggcatgatctcagctcactgcaacctccgccccctgggttcaagtgattctcctgccccagcctcctgagtagctgggattacaggtgcctgccaccatgtctagctaatttttatatttttagtagagacggggttttaccatgttgatcaggctggtcttgaacctctgacctcaggtgatccacc

SEQ ID NO: 7485 - DNA, 1151 bp, Homo sapiens
ctgtgaatatataactctaaatgagccaaagagagaagatgatgtaattaagacgtgttgagattggcctgggaatatcatcattttctagttgacatttgaatcctgtgtgcagatgcagaatgacaagctgcattcaaaagacaaacaatatgtcttttttttttttgcatgaagaaaaatgtctatcatttacagtttcaatagcacataatttattttctatgcattataaatggccttgcagttggctcagttgtttgttgtgttgtgaaatgttttaggattttttgtattgtgaaaatatgaatatgattggattcagaaaaattaactttctgaatttgatctgtcttcagtcttgtgaaaaagttgaacaaatttcctaatcaaagaaaaaagtatgagctccatgtttctttagtttcacaaaaatgaccataatttagtgttatttttactttatttaggcttcctggtggcttcattttattgaaattctttaaattgtttaaagtggccattattgatctctttcttctgttttggagagtttattattaaaaacatttctttgataaaatggccatcatctagtaatacctgtgtttgtttagatcttggaaatgaataagctttgataatatttgtaaatgaaccaaattattactgctaccactaacaggttgtaaatagaagactaatacttaattaaagtcaccttcctaccattagagcagaagacagctcctatagttttgtattttggcagctatgagatattttcatggtaatgtcaacatggtcaagcactttgtaccaagttattaagtaacataatttttaaaatttaaagaatgtgtcttcaactaaaaactttattctttagcatttatttatatttctctgtagggtgttccctgtgacattgtctctttagtttgctctttcaagagatacttacagatgttgagatggctgccctgcatttccagctaatctcttctgctctaaatatttaaaaacagttcttctcaaacattttcattcagatagctttctgaaagttccctatccctctttaccataattttttaaatgtagccacattgtaatagtaaacttcatatataatgagtgcttcatatttt

SEQ ID NO: 7486 - DNA, 1191 bp, Homo sapiens
gaagactatgagtaatattaatcaacaacttagtttgttatcttcagttatatgggaggagtacattattctttgttataggactacctcacccttaaattgtaagttctttattagcttattgcattttccattcttaaagcagtagtttagtgttctcttactgtatgacaattaaaagtatacttaattgactacataatgtgatagttaaaaaatatatttaaagtagctttttgaaagctttgctgtttccccccctttttgtatataaaagcattagttgtcattattcatgtgttctcattactttttacaaatgagaacaatgccttatgcatgttgtgaacaattactaaaattttatgtaaatttaacctttatttttaattaatatgtgttaagatataacattattttatctattaatatatgtattttaatttacaggaaaacatctttatgtatggaggcagaattgaaacaaatgatggcaatgtcacagatgaattatgggtttttaacatacatagtcagtcatggagtacaaaaactcctactgttcttggacatggtcagcagtatgctgtggagggacattcagcacatattatggagttggatagtagagatgttgtcatgatcataatatttggatattctgcaatatatggttatacaagcagcatacaggaataccatatctgtgagttacttaaaaattgtaatttctttattgattgggaatgtttttctctaataaaatcttcatatgaatttagtcaaaatggtgagttatttgagattgaaattataagctgataattaataatttttaatataagcttttttgattatgttagattttgtcctttaatatttaagcttacctttttaaccaaatgaggggaaatattacttaatagtctcattttctaagatttgtgaattttttaaaaaaatatgtgaaattccagtaggtggtgctatttctttggattttatttatgaacgaagtactgaaactatcccagtctctttactatgcattgcatggtttcaggattttttattttttagcattctatttctaatcttactgctatatctttatgtatgtattacttctttaaagtcagcttctcaaggatagtctgctggcttctataagagattattatctgttatgtg

SEQ ID NO: 7487 - DNA, 1114 bp, Homo sapiens
tttttaataggtgatatgtctatatgtttcagagttcaacattgccaccagcattacccacccactcaattattctctcctctctatagccaatcagtgttatcagggcttttttgtgtgtgtatagttttctgaagttattttatacatacagaagcaatatgaatatacatctttttctacattacttacgctaataatagcatattctttataacctgtttttgtatatttttgcatgtaactgtaaagttctaataaattattataattctgaattattttgcaacataaaaaataatatttcacatctattgatgagaagtcaaaactgtacaaacttattttcattatagtcacattttgaacactttatatctttatttctctttactatttatttctacagtggagcatttctaatgcacttagaatattcttttagagagatatttttaagaattccaggataccaatccagctatgtaattctgagaaataatttttagaaccacactacagtggagtacctctcaaaaactacatggctctaactcaagtttataacagtaatataaggaaaatgactgagaatttcagtaggaaatttaagatgcagcaagctaaattacagtcttagagaattaaattaaaatgttggcaaactgctttagatcatgttataaattctatgaaatatgacaataatgtaaaataataaaaaaaggcttctgctactttttccttcatttaaatgaatgtgtgtgtgagtttgtgtgtgtgtgtaactgctttttatgttggtgtagaaagactatgtaattgcatggttattatgttatgcaagtatacatttgtaccatgttattgtgttgagtaatggtacagacttacggcattcaagttctggctttctacctatgcatttatagcaattaatatttattactttggtcctaatggcttgctttggaaattaacttagaatgacttagaagcacacactcatcaactactaatagcttatggtacaatagcatccaaatttcaaatctatacttggtaagtattttcaatcaaactatgtaagattataattaaaaactttaaaagt

SEQ ID NO: 7488 - DNA, 1560 bp, Homo sapiens
ttataacaaaaacatctcagtatacttcattacttatttaagcgtgatgtcttttttttttttttttttttttttttttttttttttttttgagacagagtctcgctgtctcccaggctggagtgcagtggcatgatctcggctcactgcaagctccgcctcccaggttcacgccattctcctgcctcagcctccggagtagctgggagtacaggcgcggctaattttttgtatttttagtagagacggggtttcaccatgttagccaggatggtctcgatctcctgacctcgtgatccacctgcctcggcctcccaaagtgctgggattacaggcgtgagccaccacgcccggccacgtgatcttattttaaaagaacactgctatagaagaatttacacaccaaattccctgaaagctaaagtattgttccataacttacacttgaggcaatctgctcagtgtgtaaccactttataaaaaataacttaccattgataacctggaaggtggactacttgtaagtagctggtgtttattgattaaaccatggaagttttcatgatacccaagcatgttgctgaaactgatgcatttgaaagagctgttgaaataatgcaaaactttggttttataagaatctactcatgttttaaaagtatttaactctgtagaccacaattatagaaagctcagtaatgctgctaatgacatttgtaaactatatctgtaatgtagtgcaatatttttatatttcactgggagaggcagtagagacatcatagttgtactttagtgcaagtgggggaacactccaaatagcctagagtatagtaaggtacaaagcttcaatgaaaaaagctgtattatattacattactgatgtaatcttgctgccatgctatgtatcaatagctaaaaaataataataaagactaccacagaaaacaagaatatcttcatttaatgaaatctttaaaaaaggtgattgctgcatctctatggaattatcttctggtataatttggccatgcagaaaagcataacaaagtccacttttcctaaacaaaattgctgttttgcagactgccccaaaacatttttttactattgtttccttatggattatcaagtttatgggtttcctttggctatgtattagtaattagactttaaaatatattttctacattagtattagctgagtgaatggcttagacaaactgagcaacattttagcattattagcaatcataataggctatacttcttcatatcaagccttatattcaatatcagaagtacttgaaataagtggctattttgtgatgctgggaggagaaaacacaacctaaaaattttgaggggtactatcaagttctaaatgtatagctgaattttttttaaagcaatttggaaatatttggctcttaaaaataagataaataataaaatgttaagtcccctaaaagtgaataaattttaaatacctacttttaaaaatactgtcttctaaattgacataattgcttttcttaccaaaagaaggagaggttcccc

SEQ ID NO: 7489 - DNA, 1251 bp, Homo sapiens
aattagtgttaaatagaatactgtctagattcttaaaatattttcatttccatcatggttataacaaatttgctgcatgcccaaactgacaacagcaatcactgagggaacaggttttgaatctttcttttgtgttatgaagtttatcgtctctacttgcttgagatttttgttattttgggggtttgggggtgctttttgttttgtttttgccaaatgtaacatgaaagcagatgctgcagctttagtctgttatgctgatttagtaaaaaaaaattttttacatatattgcttgctttcgatgcttctgtgaaatttttttctaaagcttttgtgcagctgtatggtaaaaatatggtgattaatttgaagagcttacattgaaagacaatgtaataggaaataaatgtagattgcagttggtcaagaattttgtagagaggataacaagacttaattactgaaaaacagtaacatagcattttgaaatataatcttttaaaatattgatgctttccttttaaatggaaatttaaattttataattaaaagtttaaacatttatgataattttcctcatcagttctcccataggaaataaagcatgtgaaagggtatttaaagttttggaggactctttttaaaatgactgtgttgataactagtttgggctggttttgttttagaaaaaacattttcatgtaggagtattctgtgaaggaaaggaatcatgcaaaatatactttttgctttggcgtcttacagttgtaaaggaatggtgatcattctgaatacttctgtagtgagtattcattaagaaaagaatgacaaaaatagtattcatacataggaattgggaccagttctctgaaaatgaagatatactcacactgggtccattttacgggtcccagtaacatttgactgagggaaaacaagtaagctcgactgttgttggggtaccttaatggtttcggtctgttatatacctataaaatagacaagtatatgtttgtccctttgtaggtaactgctatgatgattgctatatagtgaaactgacatgagtttaaaactagatggagcagcttttattgctggcaggaaaaagcatggtgtaatattaaggactggggcccaggtctagactccaggactccataaaagagtttaagttcaagcccttccattaatgaactgtgtaagcataggcagttacaaaaggacccatctctaaaatgggaataata

SEQ ID NO: 7490 - DNA, 1175 bp, Homo sapiens
caggctgtatttcagctaggtttgaccaatgtaaagcactgatgggaaataggagtgaactgggaaagccagggttttcttcctcttcccccctctgcattggacaatgtgtctgacagccattctttctccttcgtggcaccatgcttctgacaggacaggcccaccatatttccagcttctgcttgatactgtagcctctggcctctactaataccacctcttcctccccctgcccttccttccagccaaaggttgatagtaacttcttagaactgttactcatatctgagtgtcctcactgtctcctgtttggtactcagttcttctgtcaccaagtagccatcctctgttttaaagggcttccatattaaatacttagttttctgttttcttagagcctattaataaaacagtaatcatcatttcctctggaaacctttcctaactatcatgaaactccttggtaatgcttatcacagttgggatttcgcatttatgtttctatgataatgtgatcagtattgtctccagcaatatcttccgtatcagcaggtaccatgattgttttgctcatagcacgtggcattcagtgggtattcagtaaatgttttcggtatgactaaggctggctgtctgaccatgagccttcatacaacctcaacccttcttcttccagaccttcaaagttttagcgtgacttttagtcacacttctgtttcctttccatcttcaaggctattcctgatgtatgttttaaccaaataaaaatgtttagggtaaggaagtccacaaaatgagagatatactactcaatattaattttgtgaaaagcctgatttttagagtgaggattttagtttacagatgtggtgcattatagtattttatttctggcattactaaacacatcaaaaacatttcttactctatgtgtatagtttaatgtaacctaaataaaatgactaggtataatctaaaattttacttgccttacttccctttcagttttggagagttttagaagtcttgctgaatgaaattgaatgcacctacaagcccacctctgtcatgtattgttgaatgtacatacaaagagtataaaagagcttcctaaagaactgtgatttcaagtaagaatatttgagacagacaaacttacaaatacgttaggc

SEQ ID NO: 7491 - DNA, 1166 bp, Homo sapiens
tcacagagttcagtggactcagggtggggttgatggaggggcgacccatgaagctacacaaagcccagcgctcagaagcgccctgcacgttctcaatgctctgctgttgcacttggtcaataagttatttagtcggtcctgactgtatccattcttctatgcatgtctccactctccaaggtagagcaaatagatactcatttatttgctaagtatttactgagcacctgctgtgtgccaggcactttgctctgagacacagaaaagagttaggctcagatcttgccctctgggaacgtgaattgaagagaaagaaaaggtcttgtagacggtgcccacaaatggaggaggcagaagccatgggaacaccggggaaggggcagcctcaattcagatggcttcacaccagcctcagtcacgtatcccaccccatatccattctaaagataaggaaatgggctgagctgcccaagttctgccagctggtcagtgacaggcttgaaccccagtcatacctctctttccacgatgccatgccactcccagaagcactctatatgatttcccatagcgttaacacaaataccaagggaatatgagcaggtgcatagtatattcacatctgaggattagccagggctgcaggtgctttgtaaggcaaatttaaaggcttccattttcagaatggggctcctgaatccaccaggtaggagggacacatgagtgcagagctgagtgtgggatagagaacctgaaaccagggaaagtgcttcctagaagcgaatccatattggctctggataattttaattatcctagaagcaattgtgtctggatctgttcctgggggtcacaagggcccctctttggggaataataacggccactctctctaccaaatcttgaagtgtctgcttaatcatttgtttcccactattgacaaaataactgataccaaaaattccatgctcagaaattatgcatgaaggcaatgttaaagtctgcgttatcagccaatataaagtacatggtattatttccatgaaataaaaaccctgtttaccatggcccccactcaactccccagtctggtgggttttgttccacatctgagaacatctctctcactggctcagggaaatgctgccactccaataacctcatta

SEQ ID NO: 7492 - DNA, 1206 bp, Homo sapiens
aaaaaaaaaaacaaaaaactgttgtctaatatatctacagtaaatgttacactagagcttttattttcctctgtagcttttcagaagaagcaatttaccttggatttgtaaatcaagctgaaacttttttgatgttcatgtactcatatgtcttgtaggtggtaggtgtcacttgtgtgtatgtgtaagtgaagtatgatgcatgctcattcacttggtccctttgaaataagggaaaggatcacagtgctgctgggccatgatggtatgtagaagggtctgtcagcacacatggaaagcccccatttgcacagatgtagaactttaataatccagatgcaatcattggaagtatttaatatgcaattggtagcaccttagctaattaatctgcatatgaagcattttctgatatatttaataagaggtatagaagctcttcaagcattaaaatagagttgatgtttcattccatttgttttatccatcaaaaaatgcactctcacagtggagttgaagtctaatacatgatacatgtgggcctgttagtcttcgaagcttccagatggtttgtgttttgaggtacaaaaaaatgctgcagatctagaaatgcatatatttagcgggtatttgaaagatagaagcattatttataactgaagagtataacacttatcttcttaagtaaatgctctcataacttgtatacatttttgcaggtacaaattcaaaagtatgtaagcattgtataatgtgacaattgtataatttatgtaatctgatgcatgaatcagaatttttatataatatatgattattgacttatagttgattaaagtgtttaaacttaattcagttgtcaacatttattacagatacagcggtgttaccataatggatttatatatgagtcctccttgttttttaataaatacctaggatgcctcttatttggtgtattgtagcacatattctgtaagacctacaaacttattttactatgaagatagttctgaaaagtcattcaaaagagtagtttttaagtacaagtgaacattcttcaacaaatgtgtggatgccctctacatataagacatcccctcatagggatggagcttacgatttagtagaaatgatatttgagtatttatatataggctaaggtctctgctgagtacttcctatttatgctttattttatttctc

SEQ ID NO: 7493 - DNA, 1333 bp, Homo sapiens
atgagctaccatgctgcccttgtattttcttatctgtacccagtgtaactacacgtttactggaactgtgtttttaagactgacagttgtttataatggattagtcgtaagtaccaaaaagtctcagttgatattatctttacaaatgacttgaccttaatgttataaaagtagttactgtttttttttaattggaggcagacttgatatttcagagttgcatagtaaaagcaatttgttaatttttgtgtactttcagataaactattacaataaagaaaggagcagaatgtagtatttggaagatgatttaaattcagcaacgcctaaaaatgtcttcctaagtatttttctcagccatgtcattctttaaattatgagatggttcttagaagagaaaatggtgtaattgtattaaacagacaattataactcaagataatataactttgaaccttctaagaactgatttgtttggttttcctcccattccccattcctccttaaaagattgaatgaattaatgagcagaaagagaggattggtaacatgggaaatcgttttcattagatgtacatttcctggttctgacaggaaaggggctccagaaaatcataaaacaagcaggtgaacaagaccaggtgtgtcggcacctccctgctcagtgcccagcggaggtaaagaaccactcagcatggtttttgtcagttcacctcttctgtcgttgtcagaggtttcctacctgtctgatataaactttctctgggttgataatataaattcagaaacatgtaaaatgaatcatgattatattactgttatttttagacttaaaatagtaacaaaattttatttatggtggcacatttaatggctttttttttctgtgttctggaataagagaatacctagctactatttaagcatccaaaaatcatatcttgctttcatttagttgagaaaagccagcatagagaaagcaaagttttagaatattatgtgtcatactaattcagtatccagaccaaatgttggaaagtcttattttatgatttaatatcccttgttccattttacagatatgatcatgtaaaacttacctacaatattcatttcaaactgctaaattaggtaaatacagacttttagtatagaaacctttcctctaaaaatccattatgggggaaatattcactatacaatccagtggttttgtctgaaatcctaaaaatgttatttttgagcaggcgagtggtatagatattctcacacttggggccccgatatgggcatttccctttgacttcagtctcatttttttttttttttctgt

SEQ ID NO: 7494 - DNA, 1202 bp, Homo sapiens
agatactgaaaagctttgcaactaaaaagcaaaacaacctacattagtcatctagccattgtttggatgttttgagttgattttttatggtgcctcttttagcttggaatattacgtttactttaatccaagtctaggccttttaaagggtccttaaaattaaagttcagaatgtgaatccctttgacatctattacaggtttataggacctttttggttgtgattactgttttcaatacgattgtataaatgaagttaactttgtcagaagttaaaatggaggtcataggagttcctggagaaatggctctcctgtttctttcattaccccactgaagttcaccccagtttctggccacaagaatatgagaaaggaaccctgttgttttccaagggaaatcattcctctctgtccccactgttgattaactaaagtcctggacaccttccttcctccactggccaagacccaccttgacccaccttgaacctcttttcagagccgagtggcatgaatatgtgtactgtttctgcttctgttgatggagtggctgtgggagaattaaaggaaatgctaatttgagcttcattcataggggaacctactatatattgcatccctgctggttggaaattatcttcatctctggactgcattgtttagaaaaatgttaatggcttacaattctgagaactttattgtgtggctctggggttaagaattctgtggtttgaaaaaaaataaatattttgtattgattctcacgtcatttcaatgttgtgactatgtactaaatgcactaagactgggtattctcttagaagagtgcgttttgttaaacagatggcagttcactctcattagttctatttgtcaatattacagccacacacttcaggataacttactcaaatgtgaagtcatgggaagctatggctagtaacaggaatgcttatgaaaaatttggagggcaagcacgagcaagaggcttttgccactcactagcacagccagagcaaggatgaagcaatgaagtcttgttcctagtggtgcttgtatgtcagaagccatagtgagctcagcacagggcgttctgcacatcatctctttaatccaagaaaaacaaaatggcggatgaaactcctattgacctgggatacaaagccactgactttggctcttgatcttttggtgggttct

SEQ ID NO: 7495 - DNA, 1111 bp, Homo sapiens
atatttctgtttctccacatccacagtgctttttagtccatcataaaagtttctgaagcttattctagctgttgttgaaagcccaagaaaaatagatgtggcaagagaaaaatacttttcttctcaattttgcttgaatcttaattgagcataggcttctctactaggcaacatcagactaatagtatttacctcttcagagaacttgaggggaaaagaaacatcccagggatgctgtcgcatgtctgctctgcaggttcttcatacagctgcctctgccaattcagtttattttttggggggagtggtgtgggtgggagagttagaagtgggatattgggagcaagtaagtcacccaataattgaagtccttgatttgtaaaactgttatacagagaagtaaagataaaggttgtcagatttattttttaaagtacttaaccagagttcgtggattttgtggactttaattggactcaattcactctgtgagcatcctggattgcatcgatgaacactgaattactgtaagaacatagacaggctctcactatgacctggacagtttaagttgctacactggtaacattctagtatcaaggagaattccattcatcatgacattcacattttacttttctcaatggaatgcttgcttcaggcttaccaatcacacctagaactgaagtctgagtgagtggtattaataatttttctgaaaggaataaaattggaatgtttctaaatgtggagaaattcttcagtatcctaataatatacccaaatgctttttctgggagagagcattcttttacaaaagaactttccctataaaagcatcacagtataatgtgaattggcattaaaatctttggatgcttttgcattattaagttcatggagaaatatattctttttactatgtatgtattaataaaaagtgggcaaagtaaagtttgcaaaatttagtttctctaaatttttgcacagtgactgcagctggctatgggtcagctcttaatacaacaaaaccttgactggaagtcactatagaaaggttgtacatagtctcccagtctacatgtcctggctgttaatcatcttggcccct

SEQ ID NO: 7496 - DNA, 1180 bp, Homo sapiens
cattgaatttgatgatacccatgttgttctcataaggcactgcttgtaatcaaggtcaggatgctttgcatgctgtggcagctccagctggtagcgatggttctcagggcattggaaagaggccaccaggttctttagtttctactgggatgacatcgtagcccagtcccagttccttaggttctcagtccccttttacttccctccaccccacatggttttgaggattttttttaagccttttttggggagttgggagaggagtgagaaatgtgtgttgaataaacagattcctgctgttatcaaatgctgtctgctcttcatactttttcctattctgatgttttttcagatagctcgtcagcatgtgcaagttccagggggtacagatagtgaatgtattgaatatgctttccttcctgaaaagaggacacactggagctgcagagactgtattcagagcacagtgggggctgcacacactcaggagctctgtcacaaagctgttcatggaagaggatgttggacttcttacttggtttgtaattttaaaacaaaaactaaaaaaaaaaaaaacgttgctgctagacttgggggtgattttgaaatgggacaatcttttaatgagtttatctacagattctgtgaggaaaaagcatctcagaaagtgaccatttctaagtgaaatctgacagccaaaatcagcagcttcctccaaaaatataagagcagaagaattttttttttaagcacttgttttgttcatttgtggacttggcattttggtgtattggtttcacatgtcaggatctcttttgctttaaaaccaagcagatcattacagtacagtatttttcacccacaaccaaaacaaccccttttaaaagagttggtctttgtttagcattagaaagtcttgttaaaggaaaatgctaactctgcttttgctagaactttcccccatcagttcacaactttcttctactctgtgccttgagctttgtgcactttgcaactgtgtgaccatgttgtcaaactcctcctggagaagtgtatggtatctaaactcacccaccaagatggcaggtgtggccctgtagcaggatgctaattaagtgggaaaatagaaaccttttgcacatgggtcggattttcccctggttcaccagagcatattcat

SEQ ID NO: 7497 - DNA, 1671 bp, Homo sapiens
tcgtcgagttcctcccccagctctttcaagagaccgagaaagagaccgagaccgagaaagagaaggtgaaaaagagaaggcctcatggagagctgagaaagatagggaatctctccgtcgtactaaaaatgagactgatgaagatggatggaccacagtacgacgttaagtctcaagataatggatttaaactggtgtcttaaataggtttgatcacattcaaggattattatacttgtgcttcaaccaatctaaattggattctttaatgttgtttcaccataacacaaaaagcatgaacttgtattaatcctatataatagattgatcatgcaccatatccacaggaggttggaaaaaccatgccattttctggaatttaagggtgttgcattatttcatcaatcatttgttgacaaaaaagaaaaactaaaaaataaatttaaaatgtgacccttcaggtattgagtaacacctttatcttggtatagaactgatactttttttttgattttgaaatatctgataataatttggaatgaagtaaggttctgttaaaatatatttgaagaccctttaaagcagtgaatctgaaacaattttcacacccttaagtggttgatacgtacctattttaggtattttgaggtatttaccataaactaaatttagaaattttttagattcacttgaagtaaacattacaaacattggatacggtggggttttctttagattttacttgagagaaggtgagtacaaagcaatttgcagttgttgtaatgacaagattactgcgcaagtgtgaatccaaacagtatagcttttaaattttaaagcatttggtaaattatcgctgagtttttttctgttgccaatagcaaactgcttttccattaatggagaattcatgcctttcaagcattttaaatatgacaatatttataaatgtatggtttggaggaatcgtttaaattctctttcctaattttctttcttttgaagatagattctttcaacaagtaatttgtagtaatgactgtgttgacttcaattttggagcgcagtagctatgttaaagatgaactatttggtctcattgaagccaacacagaacttgctgctgtgttttttcttcagtgataaataaaatacttacagaatttgttttagtgttgatttgtggttatagtattttgtttataatggtaagtttgcatattcagttgagttttttttacttgaatttttatcagtgccattaaatgtctgtgtttagtatcaatgaaaatgaacctaaatataacaaagaaagcatatgtggctaggatgtccccctaacatgtcttcctttgttaatgcaggaattccttagtttccttgtaacgctgtcctctgagtttgtgtgtgcatgtgcgtgtttgaagtaccaccttgggttttcacctgaaattagaaaaatcgtagttaatttgagaaaatgttacaaattcatcatggctgtaggcacttatttctgttattgagtagtggtgagaattcctattggtacagctgtagggccagaagagggagtattgatgctttttaacttaaccagatgcagctatttttgtttgatgttaccaatgatagaaatcattttaaacaccttagtatctggtatttcaa

SEQ ID NO: 7498 - DNA, 1504 bp, Homo sapiens
cccgccttggccttccaaagtgctgggattacaggtgtgagcgactgtgcccagccgcatgtcttacaattaagtagagatgggttttgccaggccaggctggtcttgaactcctgacctcaggtgatctgcctgcctctgcttcccagagtgctgggattaaaggtgcgagccactgctccggcccatactgaagtttttaaaaagcatgtgaaaaaaaaaatccccaaaggatcatatgcttttttattttatatatttttaattgttcttgttgctgtgtagggagtggagacgtggagaagggcgagatgaggacaggtctcatagaagagatgaagagcggccccggcgtctgggggatgatgaagatagagagccctctcttagaccagacgatgatcgggttccccggcgtggcatggatgatgacagaggccctagacgtggtcctgaggaagataggttctctcgtcgtggggcagacgatgaccggccttcctggcgtaacacagatgatgacaggcctcccagacgaattgccgatgaagacaggggaaactggcgtcatgcggatgatgacagaccacctagacgaggactggatgaggacagaggaagctggcgaacagctgatgaggacagaggaccaagacgtgggatggatgatgaccgggggccgaggcgaggaggcgctgatgatgagcgatcatcctggcgtaatgctgatgatgaccggggtcccaggcgagggttggatgatgatcggggtcccaggcgaggcatggatgatgaccggggtcccaggcgaggcatggatgatgaccggggtcccaggcgaggcatggatgatgaccggggtcccaggcgagggttggatgatgatcgaggaccttggaggaacgccgatgatgacagaattcccaggcgtggtgcagaggatgacaggggcccttggagaaacatggatgatgatcgcctttcaagacgtgctgatgatgatcggtttcccagacggggtgatgactcaagacctggtccttggagaccattagtcaagccaggtaaaattctatttcctagaatatgcttaagtgttcacctgtaaaagtgaaattctgatggataaatatcagggctgtattgttattttccagataaactggtctttcatctttccttcagtatcatttgcagtgacttcgctgtcaaaagtttgccttcagaataccaccatccaaaacataaataacccaacccctctcttctttagtgatgtgctctttgttttccttctgcttcgatgactgcttctttgaaggctcttcctgtactcatgctttcagtattggtgtatttttcaggttttactgggaaccagcctccttttaaaaataaataattgaaaccaaaatgtactttatatatttatttttgccaactgagagattatgcaaggaggaactcattttactttactttttttgagacagggtcttgctct

SEQ ID NO: 7499 - DNA, 1100 bp, Homo sapiens
accatgttggtgctcagaaagttttaaaattgggagcatttcagattttgggtttttggattaggtttgcttaccctatttagtagagtctgggtagatgtaggttggagtagtgagaaaaggatgtatggatatttttttccttatggtcaaatggaaataaggctattgtataatatttttacatttcctaaattatcacccattgtaacaataaaagcaatgtaggattttattctagaaagcagtgagttatgttaggcattgcttgtttctctttattaacaattgtgcatttgtattacctttcaggaccttgaggaattggatccagattttatcatggctaaacaggttgaacaactggagaaagaaaagaaagaacttcaagaacgcctaaagaatcaagaaaagaaggtaaatgaaagggttggtaaacctttaacataccaagttaagagagattttttaaaactacgtgtgttttcgtgtcattcagattgactattttgaaagagccaaacgtttggaagaaattcctttgataaagagcgcttacgaggaacagagaattaaagacatggatctgtgggagcaacaagaggaagaaagagtaagttttttatttaattgtaatatttttagattgtaataaaatcctctgccagtaatggaaccaaggattcagaattgctttattttgtattcttctgctagaaatggtgctctaatggctgcctatgaacagattggtagaaagagggaaaatttcacaatagagattacaaacgaaacttggaaaacaaaggacaactgaaaagcccattttataaaaaactgctttatatacactttaaatgggtaaattgtatggcatgtttatacatctcatagttttcattttacttgcagaattgtgcagccatctccacaatctaattttaaaacacgtctcaaaaagaagttctaaacccattagcagtagtcatccctattcttccccaccaccccagccctaggcaaccgctaaactactcctttctctagatttgctgattctggacattttatataaatggaattgtgtactgtgttgtctt

SEQ ID NO: 7500 - DNA, 1100 bp, Homo sapiens
tgttttgcttactgtaggtcagatttaatgtactacaatatgttgtcccagaagtgaaagacctttacaattggcttgaagtagaatttaacccattaaaactctgtgagcgagtcacaaaggtaagcctttgtatttaagttctggttgttaccacagagttggccttcttgcagttttgggttgtattcatatttgttaagagagaagttttgtcctatgtgttggaattcagtgcacatttcattgtcttttttctttatttcaagagaaaagatatatctgatgtgctcagcaaacctttggaggttaattagcagcatgactaatttagccattgctgccagtcaccttcaaacaagtatcagtagcttcatgatacattttgtatttctttgcattggatgatgtttttgtatattaaaaaaaaaagagttttagatgttttagtatctcttatgtagaaagtgtgattctctttcaatttaatggattttataggttctaaattgggttagggaacaacctgaaaaggaaccggaattgcagcagtatgtgccacaactgcaaaacaacaccatcctccgccttctgcagcaggtaaaaataaaaaaataaaaaaagttttgtgatgttatgtgctcatcatgaaactaaaaactggaaaaatctagaactgcctaggaagtgagaacctccccaagttctgcccctggcaaaaattagtctatttattaatttgaaaatcagaattattatatttacatattttgtaacggacgcttttgttttttggctgaacactgtctttgggcatttttccttgttagtaatgtagggctaccttattccatttaaggtactgtggtgtatttattcagactctcttgatgaaaacctgtattcctagattttttttttccctgttagaaatcttgtagcattgagcatctttcatacatgtatctttgcatacttctattactttctgtggcataagaagtggaattagtcatagggtttatggatttaaagctttaatagctattcagaagcctggattaatagaccccccaccatgagtgaatgagacagccttt

SEQ ID NO: 7501 - DNA, 1233 bp, Homo sapiens
ctttttttttcttttttgagacagagtctggctctgtcgcccaggctggagtgcagtggcgcgatcttggctcactgcaagctccgcctcccgggttcatgcgattctcctgcctcagcctcctgagtagctgggactacaggcgcccaccactacgcctggctaattttttgtatttttagtagagatggggtttcaccgtgttagccaggatggtctcgatctcttgacgtcgtgatgtgccccccttggcctcccaaagtgctgggattacaggcgtgagccaccgcgcctggtcaatcacaatctttttctgaagctagaaaacactgacagtactgagtggatagatgaagtcctgattctccaagtattcgtttaaacacagcccatttctcttactcccatgctttgatggaataatatttatgagtatagtgcaccatggtgatgtacacgttctgtcactagcacgccttaccgtaagattaaagagaagtgcttttctgcttaccaagtatcatttacaaacctaacagatttaaaactttgttctccatagaatgtctactagagtccttttagccactctttccatccctattactcctgagcgtacggatattgctcgacttctggatatggatggcattatagttgaaaaacagcgtcgccttgcaacactactaggtcttcaagccccaccgacacgaattggccttattaatgatatggttagtattaatttgaggatttttgtagctttgggcagaaaactttgtggtcaggtttaataactcatgattaaatactgggaattctgattcagtgccaagggttctgatgtatggacagggaagcactggtgtcaatcactgttcacttgaggcagttccgcgccagtgggtgagcaggggttaaattggtgggagttttgatctagcaggacttgggttggctctggggaataccgtgggccagttagtaagagaagaagtaatgatgggcaagaagagtcatggcttatttcatggaggctctaggaaaactaattaagctgtgtgtggtaaatatgaagaggctaggtgtattagtatgttctcgcactgctatatatacccgaggatgggtgtggtggctcacgtctgtaatcccagcactttgggaggctgaggtaggtggatcacctgaggtcaggaattcaagaccagcctggcaaacatggcgaaaccc

SEQ ID NO: 7502 - DNA, 1152 bp, Homo sapiens
tccttggccgggaacccggggctctagggctgctcgctgctgctgtggcctgcgcagccacgggaggcttcctgaaaggcattgctcggaggggcgggggcggggaggcctagcctgccccacagacacagctgtgaggcctgggtcatacacataccagcaagcagctgccgagacaaatggtggtgggaagtcctgggaacacacacagcctttgcattgacagcacaagtaggatcagagcccaggtgagcccctgaggataccgaggccttccctccctgaggcccgcaagtctccatgcgtctcccgggagcctggccccgctgcagaaatcccttctcttcctccacaccctgtcctttccccaaaggctcgtgttatcagttccagctacccatcgactttcccaccgagccgctgccctcaaaacggagggggcaccgcagcctccttgagcctggcatcccaggccttgccaaaggggacggtggcttcctggataattggaaatctctgagaagaagaggaaacacctgagtgacactcagctgtcctctggggtcccctggtgtgcatgcacgtcctcctgaatacctgtacttccaagaggtggtctcctgttttcataacccaacactctgagataggatcttccaactttttagccccggctgtggaaagatagtgagtatgaagtctttgtgcatttggaagtgacatcgctgtgtggattatgaatacagagagctgccatcttcctgatcacaatagaccacgattgcaaagcctcctctcccagagaccccttctgcgcctgccctccccacccaccacccagctgttgaagctcagcgtgtgcaagtcagaccctgcacaggccgggggtgtctcacctggcctaaacgtaaaggcttgtgccggagacagtgattgaaaacatttgaaaagccagctctccctggcagagaaagacacttcccccccaaagtggaatttagatgtctttccctagtccatcaagaagtcatttttgtaacagtccctaagcgagtgttctcaattagaagagtttagtggcttttggtgttgttaaaataataagaatccttctagcatccaaagctttctaatttttttcagggagatttg

SEQ ID NO: 7503 - DNA, 1562 bp, Homo sapiens
aggtacaatgtttggttttctaatcacctctgaggagcttcatcactgttcatatgaatttcatgatacacatcagccatgttttatttgtatgttttgttttatagatcagcttatgagacagacattctcaccatttggacaaattatggaaataagagttttcccagaaaagggctattcatttgtcaggtaacactctacttgaaatatcattattactcttatatttgattcattcctttcacttatgttctccagggtatcagtgtttgttattttagtgcttctttgcagtatagaagtttaagctacctacctaatgtactttagaaaaaaaataccaacttgcaggtgtaaactgatgagtttccatgttatttattgtgttaggttcttaaaaaataaaagacaaaaccatatcatttttctttcttagattttcaacccatgaaagtgcagcccatgccattgtttcggtgaacggtactacgattgaaggacatgtggttaaatgctattggggtaaagaatctcctgatatgactaaaaacttccaacaggtaattcgatttttcatagcattctttaaggtttccatcttacatgtcacataaaagctttggaaactctgtaaaatgaacaataaaataaagcatatagctactttcagttgattgtatttcaaaattgattatttgcggtattaactgaatcttaatactttcttttcacaggtgtcaccaccccaataaacttagacaatgataaataacagagtcctattcacataagggtgcttacttagtttttctcttccttgtctcccactctttcttcatatacggtgtttcttatgtgttccctaaaacaatactttgctttttcctaggttgactatagtcaatggggccaatggagccaagtgtatggaaacccacaacagtatggacagtatatggcaaatgggtggcaagtaccgccttatggagtatacgggcaaccatggaatcaacaaggatttggagtagagtaagttgtttgggtttttccagtatagaaacgtatggttctgacaaaataaataaaagtgtgttttcctagggagaatctattttaattatatacattgagctatttggcattatgagcattatagaaactaatctaacaaaatatgatttatgaggctaagaaattacttctcattacctaggtggaaaggggggattggggtaacatttagtgtgtcctatgatccctgtaagcagttggtagaatttgatttacatttctgatacacttttatttatttttgcatgtaaaagatctttgtccagatatattcaaaagtttgatggttttatgcctatgtggtatgtgtgagaaatctgaggtttgtgtgatacaaagtaactggccttttttttttttttttttcttttgttgatagagtggtttcctcctttgtaattcccctgcccagggccagcccatagctttattttcagatttcttcctttgagactgtttccaacatgaacttgtttttaaaatttctt

SEQ ID NO: 7504 - DNA, 1151 bp, Homo sapiens
gctgtttcttttctacttaagagtcataattttgagcagcacagattaatcttaaacttctattttgaaataaaaatgagcctagttttttgtctttaaagattgagtagtcaccgtattcattatttattatttcatttttattttcttgagacagagtctcactctgctgcccaggctggagagcagtagcgcaatctggactcactgcaacctctgcttcttgggttcaaactactatgcctcagcctcccaagtagctgggattataggcgtgtgccaccacgcctggctaattgttgtatttttagtagacagggaggtttcaccattggccaggctggtctcaaactcctgaccgcaagtgatccacctctctcggcctcccagggtgctgggattacaggcatgagccactgcgcccagcagattatttattattttacaatatgccttgcagcagttaggaaaagtgttaattttgttctctagttcagccagatccggagagcgtggttcttggcacggatggagggcgctacgatgtttacctctatgaccgaataaggaaggctgcctactgggaagaggagccagccgaagtgagacgctgtacttggttttacaagggggacacagatagtcgatttattccctatactgaggagttcagtgaaaaactagaggtacgggtgctttatttctttatgagtttctttaaaaaatgtaggtcctatatacattggtgagtaacatcattcacagtggagcggactttacttacaagacagcttgttttgatgctgttcacagagaagattactttttaagtggtgtcatcactcatgaggtgctaatcgtggcatctgtgtctaaagatagaatatgatttgcagagacacatcacagatctaataaggtgcttgtgtcaagccttcaatagaacctaggccgctgggatttgttgttgatagaagatgccaagcatatggacattttcaaattagtattcagtaaaaggcttgaaattaacctctgatttgtgaaaataaataaatagaattggaagaagtgtcttgagtcttattagccatcttaaatctataatttcttcaagaaattatatgttgttttatataattgtgttaaat

SEQ ID NO: 7505 - DNA, 1150 bp, Homo sapiens
gggctcaagcaatccttctgcctcggcctcctgagaagctggttctgcaggcatgcactaccatgcctggctaatttttaagttttctgtggagatgggtctcaccatattgctcaggcttgtcttgaacgcctgggctcaagtgatcctcccacctcagcctcccaaagtgctgggattacaggtgtgagccaccatacctggcctatgttattagcttttaaatcaaggtgtaatacttctgatttaattgtataattttcaacataagcattggaaaggtatcgatttgcttaattttggtggttaatgaacactagcaagactccttcaaagtttgttttgggggaacagtactaataatttataaactctccgtactctgaggtatagcttattatgtgttaaactacttagcctgtagtggaaaagaatttgttaatgagctttgtcataattctgttgcatcttgaaggttattgttcagttccagccctcctcagtgccagatgaatggggcaccacgcaagatggacagacaaggcccagggttgtaaagcgtggaattgatgataaccttgatgaaattcccgacggtgtgtatagtttgtttagaactgaggtctgttttagtcctctccattttagcatcattctttagaatgatgaagaaataaacagttattagaatgccctgccacagcagccattgcaccaccactcccagctaatatttctattttttgtagagatgaagttttgccatgttgcccagacttttctcgaactcctgagctcaagctatttgcctgcctcggcctcccagagtgctggaattacaggcgtgagccactgtgcctggccatatctttctttttgattttattacttttgtatctttattttttaattgatacatattaatggggtacacctgatattttgataaatgcatagaatgtgtaatgatgaaattgaagtaagtattatgtctatcacctcaaacattcatcatttctttgtgttgggaacatttcagatcttttctcctaggtatttttctttttctttttcttttttttttttttttcagacagggtctcactctgttggccaggctggagtacagtggcgtgatctcagctcatta

SEQ ID NO: 7506 - DNA, 1280 bp, Homo sapiens
caggtaaggcacacttgatatgtttgtcatctctctgaaaaatgagaccttgttcccagcaaagtatctgattagtagggacatttctttctcttttacatatgctgaagaaaaatagaaaaattattgctacctataaatcagatgaatataattgtctaaaccagaattaattgtttacacttttcagagtgaaagggggcactgttaataattgctgagataataggcataaatccaacaatcctaggcaaatcagaacaataaaacctgtgagagaactatgctctccctacttattctccagactgtattgtgcttcctaccctggttacttgagtaataacagtaaaactcttaatattatgtttcagaatttaaatcaagaatgtcttcagtaggtataaaatgggcacgactagataaggtcaaatggggatttaactttttaatgacttctcaaagaaggagctgcagtgtcacttaaggggatgcgcttttgtctttcagagggcgttcagttgctctgcctgatagataaggctgcagacgcctgccgctacctgcagacatacggcgagtggaatcgggctgcatggctggcaaaagtaggtggttccaagtttcaataggtgccctcaacattcgggatagaaagctcagtcctgaactttggacttatgacttagaaacattttttggcctgcaaagctgctttgcaaatactgtcttggaacctttatccttttcctattctttatgagtgtaaattgcattacttatttaaaaatggatcttgcattggtagcaattaagtaaaagcagctgcctcctctttctcccagagtctgagccgaaactacagtccagaggtatagccaggccctgggtcccgtaggcacagaccgttatcattattcagagtatgcagcagcttcagggcagtgtgctagtcaagcagagcatagcctgtatttcatagaaacagatctcactttaactgaattattattttttctttatagagtgcaggatgtttttgttgttaacacaggcgtctttctcaggtccgtttgaatcctgaggagtgtgccgatgttttaaggcggtgggttgaccacctttgttctccacaagtcaatcagaaatcaaaggctctcctggttctcctctctctgggctgcttttttagcgtggcagagacgcttcacaggtaaaccgagagttcacatgggctgctcaggcctgcccgtgagcagtcacttcatgttctctcgcgg

SEQ ID NO: 7507 - DNA, 1286 bp, Homo sapiens
tatggtttacagaaactcatcactgctatatatgcagattatgcccggagtttgaagaacctcggttttaagcagggagcagttctctttgcttcaaaagccggagcagctggcaaagacttattgaatgagcttgagtcccccaaggaagaacccattgaagagtgacagcttaataaatgccagggaatctgacctggaaggcagatgggagggggctggtctggctgtggccaccgtcacagtccaggatgaagaggagtacagggtcctgtgagctgtttgaccactgttctaagactatgtgtgcccaaaagcacataagcatctatgttgagagtaagtttgtatcctgcgttggtctcagaaagaacgtgaatgcttaagattttgaaagtacataatattttatactttgggagagagctttaagagtccctggaaatactttttaatttttttaacttaaaattcaagagactgaatcacttttctcattgattaaatgtaaagattattgagaaacctatagtaaatgaaatttgtgagatgttttctcaaatatatgctgtgcctgtacttatatacagtctttcaagagagatacaaacaaggcagaaacatttaaactagtattaaaggtagtttaccaaagcattttttgttttcttaccttgaaaacacagaaccgttaattccttggtttaagcagttgctaagttttgtaattttaggctcagaggaccataggaggttttaagatttatgtttagtccgataggtgaggtctttgatattttgaattttaactccttttatgatacatcacagtaacctcatttttgaagtctttctttgtactttaatgttctctctgttctaatagttgaagtatgagatgtaactattataaactgttgctgaaaacataaatgtctgtaacttacaaacatgataaataaattaaaaattccatccaggcctttgtgttctctgcattgctgtgcatgaggccaggtcatgaggtggctccttaggagtcatctggtcgcccagcctctaaagcctggctgctcctgctgtatccagagaaacctgtatgtgggaatcccatgggtgcggtacagggcaggaatgacacccacaccccgggcaagtctacctctgagttcccgagtgggaatgtggcttagtgcacagcttttggagatgagggggtgagcacttccatcttttccctcctgagcctgctgggtgacacatcatacccactaagaggtacaatt

SEQ ID NO: 7508 - DNA, 1112 bp, Homo sapiens
gctgctgttctgcagtacgccagcctggtggggcagaagtgctccgagcggatgctgctgttcagaaactgacctgttcacctctgccgggaagttcctgtgttgtgctgatgatttgtgccaggatacatattcagtacctgtggggaaataactgtcaccacccacaaattagacattttttattttgactatctatggcttttaaaaaatattttgtggcaatgtatctgtgagaatctcatagttaatataaagattttaaaactgcattatgacctagcccccataattgggatttatcattttggaggattctttctagagcaagatacgctcaaattctcctgtttgtattttgtaaaatgaagaagtgaatctaagtaacttaatcacagttgtgcattttttttggttctgttagagaaattaaaacagactgtttcctcaggcccattttaaactgaacttatgctaggaaaccttaagtatggggaaggtagaaagttcatttcatcacttagaaaatatgtcttctcaagaacaaaactgtgctgttacaactcagtgttcaatgtgaaattgctgccaaatgttatgtagtttaatagagaacttgaaaaaataaaacattaaaatggagcttgtgttagcatcaggtatccatttgttcaggacagtcctgttcatgtctgttgtcttggcatagttttttcccctagaatatagtactcccttttactctaaaaaatatcccagtttggacaataaaatacataattactctagttatattatttgctttacttctaaaaatgtaagaaattgaatttttttaaagaaaaatgttggttcctgccttgatctaagtctcatccaaaggaaataaatagtcactagttttttatcttacaactcaggacatttgtctttggttattaatggaaattagtatgtgattactttcatagttatgccacaaatcacattgaagaaggaatcattccgacctctgttccaggacaagagctagaacaatccatttcttgtcctttgatttgagagtcacagtcagggtggcttctgccacccttagtaactcagagcagagg

SEQ ID NO: 7509 - DNA, 1195 bp, Homo sapiens
atcccttacccactcttgcccttccgtctaagtccccaaagtccattgtgtcattcttatgtttttgtgtcctcatagcttagctccctcttataagtgagaagatacagtgtttggtgttccattcctgggtgacttcacttagaataatggtcctcaactctatccaggttgctgcgaatgccattattttgttcctttttatgcctgagtagtatagaaatggaaggacatagtttaatagtgattttcttatcctgtaaaatgctgtatttcctactgtcaagtattaaaacaagtaaattgaagaaaacataaattgatttctctttttgaattttgtatttagtcagtatttctatgatgaaaaagttttgcagcttaatatagggtgtgactagggatgatgatggaaacaaagaggaaagttaaggacttattaacctgaggaaaatgaaagtatatattaattataagattattttaatattaaaaaaatggctgtttgtgcctctgctttttcttaggcagagactccccctaatgggccagattgtggctatggctcctttcaccagcagtactggcttgacggaaagatcattgctgtgggggtgattgacatcctcccaaactgtgtatcatctgtgtatttgtactacgatcctgattattcgtttttgtctttgggcgtctactctgcactacggtaagattgctttttgccgttattgtagtgggttatatagaacttcaaataattactcatttgattatatttaattatgtaacagtagaagtcctaattgacagtgtattataatgatttgttgctagtctcttacatagaatacatactactatataataggtaataggtattctatatgagttaaatactcctatataatatatacttatatataatttgtaattttcatttaagaatatatttaaagtcacattgaattttaaaataaacatcatttaactagtttataggaaatatacatattatataagtatatagttatgtaatatataagtaaatattatgtataactagtatctataatctataatctctagtacttttatattgtatttataaggtactatctttagaactgatgccagtgtctgatggtaattctctagctttttaaggtatccatctagttaagaagtcattgta

SEQ ID NO: 7510 - DNA, 1198 bp, Homo sapiens
taggattatatagatgaatgtctcatatttaaagaattaattaatttgcctaaggtaacatgagtagttagtggcagagcaatgtcctgaaattgcagtgcttttttttttttttttttttttttttgagtctgggtctcactgtgtcgctcagactggagtgcagtggtgccatctcggctcactgcaacctctgcctccgaggctcaagcaattcttctgccttagactccccagtagctgggattacaggtgctcgccactaccgcccggctaatttttgtatttttggtagagatggggtttcaccatgttggccaggatggtctccaactcctgacctcaagtgatccacccgccttggcctcccaaagtgctgggattccagtcgtgaaccaccgcaccccagtctgcagtgctttttatactagacatgatgttgccatttgtaaaagttaaagtgggcctcagtaaaatatggagtgattgacatcagtgagtgaagtgttcattgtaagcaaattttccaagcattggaaacgttttttattgctgagatattatgtactctaataatttaaaatgacaatgttcccaaaatgtcttgtgttcttcctcagcttctcaaacagaatgccgagcaggacttgcctgttgataatggctctcatattttcctaggaatattcttctgctcttgtcgtatttcagtgtgccatgggctactgcttttatctctaaagttactctgttgtcccctttatcctttctctttcttgctgacaattcttgtgttagtttgtctagtattagcatttgttccctttctaatttgtaatttcttaatatgctcgttaaaatatggagcacctaagtactgtcgaggcatttggtaactgtttaatcagtgagtaaatcagataaagatctcttgctcttgtggaacttgcattctgggggtgtggttgggggagaatggtcagagatagtcattaaacaataagcataatacatcagtaaattatacagaaggttagcagggggtgttgtgggaaaaatagagcaggtataaaggagggttggaagtatcgattattggcttggaaactagatcaccaagtttattgttagtaaagttacagtcaagaggaaagtgggaaaaggagcttgcaggactcttctgtaagttgggaatata

SEQ ID NO: 7511 - DNA, 1197 bp, Homo sapiens
ctaacagtaggagaactagacagaaagctggcttttaggaagactggtcagctttcattagagattttggtgagttgggcacaggagaaagtttttttttgtttttgtttttgttttgagacagcctcttgctctgacacccaggctggagtgcagtggcgcgatcttggcttactgcaagctctgcctcccgggttcacgccattctgcctcagcctcccaagtagctgggactacaggcgcccgccaccacgccctgctaattttttgtatttttagtagagctggggtttcaccgtgttagccaggatggtctcgatctcctgacctcgtgatccgcccgccttggcctcccaaagtgctgggattacaggcttgagccaccgcacctggccaggagcacgttttagaaggagatgtgtcagttgcctattgagatttttttttttttttagtccagtgggaaatcctggtaagtagttggaaatgtagggaaaaagtctatggataatgtgtattttgtaatgtgaatattttctttcttttttgaatagtgtcccgagcaagagaagcagtcctggatgcccactttcttgttttggcttcagatttgggcaaagagaaagcaaagcagctgcgctcagacctgagctcctttgacatgttaagatatgttgaaactctagtaagttcaaagctacagactctgaataaaaaatgttctgttatatattataattatttactgtgctcatatccatatgcagatgatttcacttcattcttcttttttggtctcagattcctctgtagagatcttaccaatttaaacagacgaaagtagaaccatgtggtggaatcttgggtgggggcttggagtaaaaatctcgtagcattctgtcttaagatgctgggtgctatggtcatttgccaatggccatttttcctctgttcactggtgttctagatcattctcagtgacctcagacctttgtcctgggctggacaaaagcccactctgcgatggcagagctcagctggaattgagttaggcctggcgagagggcatgttttggtctgtctttgagaatatttcaaaaccatgtgaatatgattgggttttgcttttttttttttttttttttttcctttgagacagagtctcgctctgtcgcccaggctggagtgcagtggcgt

SEQ ID NO: 7512 - DNA, 1436 bp, Homo sapiens
gaactgcgtaaccctccttatgctacatctcaaaaaagccaccgaggggtttaccccagacgctcctcacctcagatcacatccttcccgggcaaataaagggaaaggaaccagactagttagtccttcactctgtgctggtcactgccaggaaactacatttatcacctcatttacttctcagaaagaaacatgttatcacctatgttctagagataaggacaccaaggctcagagaggttgtgtaacttgtggaagatcacacagctacagctgggatatatactcagattgtttggctccaagtcatttgtctcactgctttagtggggaccaaggggcctggtggtcccccatctccccaaaaagccccatgagcattctgactggccagatttcaaacatcagcaacttcttccttgtcttcacttgcagaataaagaaatagaagaactcaccaagatttgtgacgaactgattgccaaaatggggaaaagctaactctgaaccgaatgttttggacttaactgttgcgtgcaatatgaccgtcggcacactgctgttcctccagttccatggacaggttctgttttcactttttcgtatgcactactgtatttcctttctaaataaaattgatttgattgtatgcagtactaaggagactatcagaatttcttgctattggtttgcattttcctagtataattcatagcaagttgacctcagagttcctgtatcagggagattgtctgattctctaataaaagacacattgctgaccttggccttgccctttgtacacaagttcccagggtgagcagcttttggatttaatatgaacatgtacagcgtgcatagggactcttgccttaaggagtgtaaacttgatctgcatttgctgatttgtttttaaaaaaacaagaaatgcatgtttcaaataaaattctctattgtaaataaaattttttctttggatcttggcaataagtgtgcctcgaatttattttctgggaagggttgagtcttttctcacctttgtcaaataccagatttggcttcgtgctcttctctgtctgggctcatttctttgtccatagacttaaataatatttcctttgttatcgtggctgcatttgtaggatgaagctaatgagaaatactgactttctacttaaataattaagtggaaattaattaatctcagcactggattagctgagatttggtttttacaaagcctcatgactttaggaagcaaatctatttcattttattgagtcaaggaagtaacagactgccactctttctgttcaatcctttagtgtttgaaggtcaacctgaaacccccattcccctctaaagaaagcactgggaaagggtgcacaattgccagtggccggcaggtaattagggcactttggagattaaactag

SEQ ID NO: 7513 - DNA, 1186 bp, Homo sapiens
atcagatcactgagcagctggggccttaaatacagttcagtgctcccagtgtttccatttcatgttttaattctcattttaaaacctgctttaacagcctgcttctgaaaactaccataattatctttgtggtagtatgataataaaattgaaatacaactaaacattctgctcagaaatatttttttaaaagatttttcttgtgttcaagtacataagaattagatttgcatttggaatactttggccactgatctcaggtctgaaaatttaaagtatcttaaaatgtaacactgccatctgcggaaagtagtctcatatgtagcatgatagcctttattatctagatttactatgacatatatgctagttacttacacttttaatatttttttctgatagtattataataccgccttttattagttttctggtagtgataactacagataaataaatagaaatcaatgtttctgatttcttagttgttaagtcattctctctttatatcctttttgaaatatctaagaagtcactttcatagatgttcattttgtaactgcctgtattttatgtgactttttcagcagtcaagtatgagactctctgcaaaaacagtgtctgttgggaagaggaaaagttggagaaggatgtttgtgttttgtgctttgtggtgggggcagattggactatctagctatgactgtcagcacaactttctcttttcctccctctacccagtataggttaactctaatcttagctttgcactgtgttccagatgcggcaggccagaaggctgtcgaacccttgtatacagaggtatacatcaagagctggtgaatgcagcacgtatgtgggctctcacgcaaacgtgccttcttagtggagggcccagacttactacttacaactgatcatagaaagttgagttaaccaaactgccttttgcagttatcataactgattttgtcaatactaacgcaaactgtttcactgtagtcatcaggttggatatgtgtatttaaaaataaaaaataaaacatacaactttactaacagaaagagacattaacatataaaaattaatatactcaactgctgcaagagtttcaattttatattatgtatttaaaaatttttaagatacaatacttacgaaatgcaccattgttctaataatata

SEQ ID NO: 7514 - DNA, 1523 bp, Homo sapiens
cctgaatcttgaggtgacttattttgcatagaggatatggatagaccaacagtaagggttgtgggttataccggcatagagaaaagaagaaaactagaattgaaacaactgtgtcttagacatttgtttgaaaaagcttcatcaggccttggagcagtcactgctttattccgcaaaaattatttggtaggaaatttttgggagatctgattttcttatccaagttttgtaaatagttgttatttctatatttggattggtgaaagacctcaagtttatatgtaaagacataactgcccttagtcatgaaattgttgtgacctctactttttgtcactaatagcctacattcaagtgcctgtgttttttcatcttgtttaggaatgttttgagattaatgtgcttaaaagtcctacgtgactgattttaaacattgtgataaaattaattttcagtagaatagttgaatgtgttaagataggattttatgttagagataccagaatgctggtattctactacttgtgcaatatatatgttttaaaaaacaaatttgagaatacatttaatcatagggatatagatataagcacctctctaaagaatctttagtttccgacgttgaattatagaccagtttgagtaagtactgctttttttttttggagacgggctctcgctctgttgctcaggctggagtgcagtggcgtgatctcagctcactacagcctccacctcgtgggttcaaacagttgtgctgcctcagcttcccgagtagctaggattacaggtgcatgccaccacacctggctaatttttgtattttagtagagatggggtttcaccatgttggccaggctcgtctcgaactcctgacttcaggtgatccacccatctcagcctcccaaagtgctgggattacaggcgtgagccaccatgcccggcccataagtaccgtttttgaggttcagtcttaaacatttgctttaagaaaacagtcttgaatttcacatgctgctatttttatattttgccattttacagtactgttttgttttgaattcatgcatatcattgaaaatttctcgttttcattttcttagatgacttcttgtctgagacagaaaaatttcctactacagcagtgcagtccagaggttaagatgtattagaattatacaatatcagtttaaaaatctgtatgcataaagaatgcaccactcaacttttttattcataagctaatatttttttaaagttacattaagattttttctcttttgcagctacatttgaaagtgatagaataaagagattttaatgagttatcactttttcagctgatatattcattttaatggcttttttgaaagttcctttttcatgaacacacccgagaaatcttaaatagacactttgcaatatttaagaacctaatgctgtttaattttggtacagcttccacattgcatgttcactttagtatttgcaatttgatatatttcatggtggcaaaatattag

SEQ ID NO: 7515 - DNA, 1246 bp, Homo sapiens
aataaatcctcgtaccgtcagaggataaaaacagagatccacttaatagcatctgatgattaaacagtcaacttaaaaagacaatctttaaattgacaatgcggtatagagagataaccctgctctttgtaacattttgtacactttaagacaagaattagaaaatgtagcatttgtggcagcaaagagagtaattgccttagaagtttagtaatcagagaagatttgtttagtaacaaacctcagagaagcaatcccctctggctgtttctttgacctgtctctatgcggatagcgtctgattggtcaaacattactgaagagaaatagactttgctttctacagatttacatgaaaattgcagaaatcactcaagagtcctcctctgagcagtgactttgtggatctccagtggccccaccatttggaaatgctcagtctgcttttccttggcctccatggggcctgcacctctcctactctgtcctgtacagccccaggagcagagagaggcataatcccccaccttgcacactgcaaccttacactgcagatataccacatcatagctgtcaagaaagctgaagacattgaacttgaactgagccatgttcttctggcggggatggaggttgatgtaggtattgtctttgatgcacctgatggggagaaaaaccccaggacaaaaagattaacttaaagcacgatatgagtttactgcaacccagataatcaggcatggacccagatctctgatttgcaaatagagttcttcccactacccactctttctttcataaagaaactttttaacactgctatgagtggaaaaaccactattcctggacataaatagaaaggaactagaaaataaacacaataaaaccaaaaaaaaagtaattaaattctaggtagaactcttgtcttcaaaaggcctactctgttttgtccaaagagagatgaaaagtgttggtggttttatttgaaggcaaacttggattatttaaaaatgtacatcagtaaaccctagggaaaccaccaaaaaaaaaaaattaagaagtgatgcattcagaggagaaaaaatgagtcacataaaatgctcaattaaaactggagaaggcagcaaaaagagtgtgaggagacaaacaaggaacaaatgcaactaatagaaaacagttactgagatggtagattttaatccaatgatatcaagaatcactttaaatataaatggtctaaatatag

SEQ ID NO: 7516 - DNA, 1246 bp, Homo sapiens; identical to SEQ ID NO: 7515

SEQ ID NO: 7517 - DNA, 2623 bp, Homo sapiens
attctggttttaaatatgagaatcagtggaaaataagggtataattttgtaggtcatatgattgaagaaaatattattttaacaatgtaaagcaatatgatttgttactataattaacctgtataaaagatacattttatggtggtttcagtaggtcattttaaaaaccaatgtgcattagttttcaagtataaggtttaagtaatttggtttaataatcagaaaatattcaatacagtgttggatattctgtcatgcactatttttcagttgacaatttctgtattttaattgaatactgtttcttcagtcatggttattgcactttatcctgaataataattcagaaattgggttttggttcagtgattctcaagaaaaagatctcttgcccattaagaagtgtatcaaaatctcataaggaatgagggagagaagggggctgtagagtttgaaaaagcatattcaatattaaaatagttttatatttgggaaggcaaaaatgaatctattgttttgcaatataggttataaacaggcaaaatgcaataaaatatatatctggttgtattagtctgttttcacgctgctgataaagacatacctgagaccaggaagaaaaagaggtttaattggacttacagttccacatgactggggaggcctcagaatcatggtgggaggcaaaaagcacttcttacatggcggcagcaagagaaaatgagaaagaagcaaaagtggaaacccctaataaacctatcagatcttgtgagacttactatcacgagaatagcacaggaaagactggcccccatgattcaattacctcccccgggtccctcccacaacacatgggaattctgagagataccatttaagttgagatttcagtggggacacagccaaaccatatcattctacccctggcacctccaaatctcatgtcctcacatttcaaaaccaatcatgccttcccaacagtcccccaaagtcttaactcatttcagcattaacccaaaagtccgcagtccaaagtttcatctgagacaaggcaagtcccttccacttatgaacctgtaaaatcaaaagtaaactagttacttcctagatacaatgggggtacaggtattgggtaaatacagccattccaaatgggagaaattggccaacacaaaagggtaacagggcccatgcaagtccaaaattcagcagggcagtcaaattttaaacctccaaaatgatcacctttgactccacgtctcacaatcatctctctcaagttcgaagttccacaaatctctaaggcaagggaaagatgctgccagtctctttgctaaaacacagcaagagtcacctttactccagttcccaaaaagtttttcatctccatctgagaccacctcagcctgaattttattgtcaatattgctatcagcattttgggcaaagccattcagcaagtatctaggaagttccaaactttcccacattttcctgtcttcttctgagcccttcaaactgttccaacctctgcctgttacccagttccaaacttgctttcatatttttggctatcttttcagcaatgccccactctactgttagcagtttactgtattagtctgttttcacactgctgataaagacattcctcaagattgtgaagaaaaagaggtttaattggacttacagttccacatggccggggaggcctcagaatcatggcgggaggtgaaaagcacttcgtacatggtggtggcaagagaaaatgaagaagaagcaaaagtggaaacccctgataaacccatcagatctcatgagacttactatcatgagaatagcacaggaaagactggcccccctgattcgatgacctccccctgggtccctcccacaacatgtgggaattccagaagataaattcaagttgcaatttcagtggggacatagccaaaccatatcactggtgatgccacttcttcagtattagggattctcagtcagaagagaccccctgtgtggcctgagtcccctcaggaggaaggtggacaacagagaaatgagagttttgatattttctgaaagaggaacatgtgttagagatgaagaatcttccaaggctcatgcagttgcttagaataatcattactgttatatgagaaacattttagtaatttaataaaaggataatgtttatttaaaaaacctgacttttccagagtaattttgttttgcacattcatgtttattgaagtggactaatttctataatgcaaatcagagttaaatattaaaaattgtgtaaatacaattgacataggaattacattaaaatattaggaagaaacaaggacaaatttagaccttgaatccgaagagataaagcttacttgactttcaaatggagagatgatgaaaacccactcattcactctttcagaacaaaaagacagtcatctgataagagtatgacatggatgaaatgccctacaggggccttggacatctttaatttctgcgattatgtgaaagaggtggactttacagataatggagcagaagccaacattagtaaaaggaatcccaacttcttcccatagaattagaaacatgtgaaagtaca

SEQ ID NO: 7518 - DNA, 1225 bp, Homo sapiens
ttattccttaagggatgtgttagagttactgtggatttctctgttttctgtcttacaagaaacttgtctatgtaccttaatactttgtttaggatgaggagtctttgtgtccctgtacagtagtctgacgtatttccccttctgtcccctagtaagcccagttgctgtatctgaacagtttgagctctttttgtaatatactctaaacctgttatttctgtgctaataaacgagatgcagaacccttgaatgttggatgtttttgaatgttggtaattaatataatttacttaaaaaggcttgtgtaaggcaaaactcgtcatcacaggcatgttgggggatgacattttacctttaagtccactctccctcgtttaattgtctcctctgatgtgtgttggggattcagtcctgcataaagtgatttgttggagttcagccatttccctcatgcccccttgtgccctctcggtggatcagcagggcctttgagccaagtgtgcagcttcactcaggatgggcagagactatgtggcagcctctggggaccttttggctcagtgctttactagtgccagcgcagtagtgcttaggtagcttgtgcatccccgtgttgatgtagtcatagtccacacagagccaaataacagacccttctgtacttagccatcaaatactaaatcacagtgaagcccttgggaaggtaaataatgtaatagccagggactgatggtattagttctttagtgtgattatgtgcttctaaaagtccctaaccacttggttgaggacagaccataagtttaaaacattgtataagtgaaagaattaatatagtattgttataggtaaccaaattatagtaatgtggacttgtttttgaggtggtgagggagggcttattttgtggttccatctggatgtcctcttgtctctggaaatcaagtgtgcctccctgccatctctacataccccttaaccagctctccacaatttacttgtttatggttatagctaccttttccccaagttacccaggtgtagttaccttggccttctcattggtttccctcacccacattctttaagtgtctcttctgtttatcttttcttcctactgctaccatcccagggccttttgggtgaatgtggcagcctccaatttctgccttaagtcctccatctaatagagtagtgacttttgaaccttgtagttgtgacccaa

SEQ ID NO: 7519 - DNA, 1235 bp, Homo sapiens
aagaaaaaataagattaggggaaattgtttttaatacctgttgatataagcatctagttattgatttgtaattatgaggacagatatgcttataaaaggtcctgcttttgggcaatcaggagaacctggtaagagaaggaagaggacttgttgggcagattgacaggtgtgccagagtatgaaccaataaatttgtgggtggaattgtcattacttttgtgagacagggattaatctttgtttttattagctctccagaaatagagataaaggtcaggaattggtaactgaaggaatcagtttgaaacaagcctcctctgagctattttgaaacttgctgaatgtggtactctcagccctttggacgtccaagaattgagatctaaaaagcttcttaaggcccagcctcttaactggatgctgagggcctctgagaaaacatggagtcatggctgttctaatggagtcatccatcactgccaactgcttgctggaaaaaataggggtctttcacaagagcctcataaccttcagggattagaagcctgtgccaggctgactgttacaatggcatgccattgaaggtcttctcttgaccactgcttacaggtaatcatgaaggtctgtaattcagggcatacggtgtctttttcttctctttttgctgtttctgtgtcacttctttctttgtgtctcccttccttctttccttcaatcaataaatagtaaaaggcatttgtgcacagcttgacttaggaaaatgtggctggtggggttttgaaatagttgtttgctactccattatgccatttggtccaggtggtggtgggtggcaatggataaatgagcctgttggcatgcccataagcccaagagttggatctgatctagcatgcatatgccatgaaggaattgtgtcttttgaaggcatggtgacagggcccattttacttatagtacagtgaaaccttgaaacacatgtattgtggagagaatcttccaggcagtagcttaggagacactcttatcctcacttttgggcccagctcaggtttagctgaacatggagtttcagaagataggtatttggggacaccaccaggtgttaaaattgcatattaatcaggtggttattgggatactgtagagatttttcaagtctagtaattttggagggaggaagatgggaaaatattgtgagcttgttcttgaaattttcattctgaaataagact

SEQ ID NO: 7520 - DNA, 1285 bp, Homo sapiens
agctgggactacaggtgcgcaccatgatgcccagctaatttttgtatttttagtagagacgggtttcataatgttggccaggatggtttcaatctcttgacctcgtgatccacccacctcggcctcccaaagtgctgggattacaggcataagccaccgctcccagcccaagcttcccttagttgagcaagttctgttaattttgttttgccaggctgcactttgcccatacatacggcaagggatgtttaaacgtttatctttgagcatgtacgttttactatttttctttagattgggatgcttggaaggtgtgtctacgacttcgagataatggacttctggccaagccaacccatggcgacattatcaggtttgcgcctccgctggtgatcaaggaggatgagcttcgagagtccattgaaattattaacaagaccatcttgtctttctgagggtagccagctgttttcagtggtccctgggagccagctggagacaggtggtcctgtaaaagctttattcctaatgtgggcacattccactcccatgagtcttcaaaaactttttttttgaatatatttttttcagttgatacataatagaacaacgtttatgaacctgccgtttgctttgtaacgtaactaaataatgtaatggcatctatattcagttgaagtgttttgatgtgcatgtgtacttcctaaggtgaaatgcatctatatacagacagcctctaaatcaagtccttcagtataattgatatatgtttttataatttcctcactggtataagtgtttcatatttgaaaaagttatctctgggtattgcataaaaggcttcatcttataaagtgaaatcattgttattgaattttaggaaggattaatggttaagtgtatataaaatactaatattaagtaaacttcatattggccaacaccagggttgtattctatggatgtcattattttgaattaagaattagtgtttaacattcctaaattgttttgagtgcttgattataatttgtaaaaaatgtttattttcaatacttctttaaatttaaaataaagcttatatttcaaatgtctgttttgtgatgattattcaccttaaaaggaagaagctgaggcaaaattaatatagaatgtttaggtgggccaaggttggggactgcagctcgggacacacttccaggttgccctggagagtgctccagagaacacttcttaaagaaaaaaggatagatcagctgctcttataccctctactgacacaagg

SEQ ID NO: 7521 - DNA, 1238 bp, Homo sapiens
catccggaagtgaaggctgatgggtacgtggacaacctcgcagaggcagtggacctgctgctgcagcacgccgacaagtgatggcctcctgggagagccccgcctcctccacccctgcctctcctccacccctgcctcccctccacccctgcctctcctccacccgcccaggagagccccacctcctccacccctgcctctcctccacccctgcctcccctccacctgccccagtgcccagaccaaccaaggccctgacagccctgccttctgccctctgccctgcatgggcaggcatttgttccctacctgggtggcctgctcccctgcctgggccctgacttcagctccctgtagtgaagtccaggagggtgggacaggcctgtcaggcctctgggaatctcccaaatcccagaactcaccactcaccatgggcctttaaatgcagtaaactccacctaaccagattcaggggcactatgcccactgcctcctcttcagactctttgcatttcagtgaagagcctggaagaaacccaggggcctcctatgcacagatcttgcagcccagaaccaagtcagcctccctgcgactgcccaggcacactgcccaccaccccacccccgaaacaatgccagcccgctgctttttctatcctcccagtcacctttgcagacaaagaccaggggcagctcccgagggcactgtgaaggctcccatgccacacagtgagaactgtagcctctgcgtccaaggcacacagggtactttctggacccactgctggacagacttgaaggtgtcatgcccggtgtgtgcaggaggaaactaacagttcagtaaactctgccttgaccagcagcctttgactcaggctttgactgctaggaagaaccgtatgggggaggccaccagcagggtctgggccactgtctctagtcctgccttatgcttgagccactgaatatcagaggtgcgagggacaagggccctgaaacacctcacctgctccagccccttcacttagcagatggggaaactgaggcccagaggggccagtgagctgctgttggccctatctggaacgaggcagtccagggcaaactttggcactgccttccctaacggaacagcctgtggcctgggggtggtgagctttgctttcccgaccaagggcgcggcggccttcccacaggggccctgggaacaaatcactcataactgaagtttcaggttt

SEQ ID NO: 7522 - DNA, 1110 bp, Homo sapiens
tgttctgaccagacgtacagattttcattctcagaaagccttacttttcaaccaaatttttgtagccagttttgtgaatttgtacactgaaagaaaatttaaataaaggggaagtccacattaaaaagaaaacaaaacaaaccctaactaacttccaaatgggtctcctggtgcgggggcgtgagtggccgtgccctgggtgtgctgcctgtctgagcaagcttccctagctgtggaaccccgggccccctgctgcgggctctgccttggtgtcatgcctgctgcacccccgtttccactgacgtgccgtctgtggctatgggggtggtcactggaatgacggtcactccagacgtcagccggcagggatgcagcaggctggccgcgcaccggggctcgggcaccctctggccccacactggcaatgatgccacaccttgccatgtccacgctgttggtcaaacccctctgtcatgcctctttaaagagaaaagaagagaaagattttttttttttttaatggcagaccgaagtggagatcttgtagcctagataggatagtctgaccttctagcatagtctttttggcaaatgatttgtgttttcagtgtgtggggaagctgtcctgggggctggggcgacagatagcacataggctgtttctggggctgcaggggcttccctgagctggatgttgtgggtgttgccgtgcttcaggaagtgtggcgaccagaaagcgtagacccggggcccagggtctgcccgcccctgcagcctggcctccccgcacaggctgtggcttgcactccagccgctctagtctctcaggaatttgcttgttacttgtactgtgtaaataaagcttcctggttcaatacccaagtgcctggtgccagctgtgtggtttctgttgggtgtggtgaactggcaggtcccccctgctcacaggagcattagctctgggcgcagagagacctagactggacccttctgtcccctccaagcctcggggtctgaatcgataaaatggggctagcagacatcacagagctgtggagacgccgggggacgggggaaggctgcccatggccacagctgcatcatggggag

SEQ ID NO: 7523 - DNA, 1200 bp, Homo sapiens
ttcaagttcccaatatgtgggtggcacttcttaaaaatcagctttaaggagctggcagaaagcccccagccccacagccctgagagatggtgttgctagctcaggtggctgacacatggggtatgccgggcactgggcaggtcccagagccggggaaccagctcacctctggttgctgtagctcctgccggaggcatgtctacttgtgatcccggacagccgaacccaagagctggtggctctgagcagacagagacatcttggcctgtccctgcctgggggtcatggagaccatgtcttcttagagcaaatgtggaggcggccagggcagttgttgggtgaatgtggagagcacatggccatgtcttgcccccggagtaccactgggcgtggggggtcctggcaccacatgcccggtgtggccgagggcacacagcctctatagcaggccttcctgtggaaggcagaggcagtgagggaggtggacggtgccagctgaggctgaggcatgcagcagcccccagctacctttgcttagggctggggtgggaggcacatggtgacaggtatatgtcgtgggactggggtgtgggtgacctgccctcaaaccttgcctgccacctccccattcaggcctggtggcaggaagggacaagctgtggagctggctgagtcacagccacctccccacctccccgcaagctggtcccatcgaccagcaagcccagccccagggcgcttagggagaaatgacccagcctcctcagaccccgcctgcctgtcctgtgcccaccacgcagcagtcaggggagaaaatggtggctatcccttctgcttagagaaagaaatggcctttagctggtttcatgtttgtgttttgactggagggagtagaccctatctataaggtgccaccccatcatccaagctgccacactgcccggagcagcctgttcctgcactccaccctgctggccccaggacttctgatctcagtcctctgggagggaggttcgcctaggaggtgccccccacattggtgtccccatgggcagcaggcagacagctcacccccaccagcatgatggccccagctgggggcagtggcaggagccttacttttgtcacagccttgcccacaaaccctgcctctgaggggagactgaggaagggcagagccagaagcaagccgtgccaggc

SEQ ID NO: 7524 - DNA, 1214 bp, Homo sapiens
cattagggccatggcgtcggggaacacctgcgctcccactacagcagggctccctggagcctttggctctcttgatcattcagagcatgcttatcgtggggcctggggtgcctccagactgcgcctccacagtgggagtgcctgctgtaagtgagcaaacctagacgcctcttggttgtatgtccgcctcccagatcttgggccttgccctgttccagtgggcagaatccaggcctcctcctcatttcctttgtactcataaaggacccatgttcaggtttctctttgccacctgttcaatgtgtctttctgggacctactgtgtgctgggtaccgtgctggtactgtagagcaggaaaaacagaagcaatgccccattgcctgctgctggatggatcccgttctggggctagttctgtttggtacgtacctgctgtgtgcacatactgctcttggcactgaggactgtgtggagcaggatggccatgggcccttctctctggcagcttccatctagtgtagacagatagacaatattaagagcaaagcagattgtgttggacaaagtaagtgctgcaaagacaaggagcatgggtagtgggacagaggcgacgagcagagaagtagaaggatcttctgcgtggaatgagagacctccaaggctggcgtgtgtgggaggagctggctgtggctggggcagagggaccccagcagagaacaggctgctggatattcatctgtgcctgctgaacccctgctgcagtcaggagccccagctctgccattaagcagtccctggatgacagtgggcgttacctggagtggccacgctcaccccaaggagaggctgtctccagagccccagtgctgggcagctcttcctcattcctcggcatcccgtgtttcctgctggtatcgtcctgagaagcttcgtgggatgagatgtcttggtggggaaagccaaggaggtagcaagttcaaggagcccctagtcttcctgttgacacccaggagggtgtggctttcaggcccctccccaggccagcaggtcctgacacctgaattcatgtggaaatgctgagcctctgaatggcctcctgctgtgtgagactgggtggtgtccaggaggtagtcccagggtgtgggtggggagatgggagatgagaatgtcctgaagctagccttgtcacctgaatgtgacaggacactgtggt

SEQ ID NO: 7525 - DNA, 1220 bp, Homo sapiens
tctaacttgctttggggaaaaaaagatttttttttttttttgtgatggagtctcactctgtcacccaggctggagtgcagcagtggcgtgatctctgctcagtgcaacctcagcctcccaagtagctgggactatgggcgtgtgccactatgcccagctaatttttgtatttttagtagagacggggtttcaccatgttggccagactggtcttgaactccggacctcaggtgatgcccccgcctgggcctcccaaagtgctgggattacaggtgtgagccactgcccctggccaaaaaacaatttttaaaagcatgtgtgaggttcaggtgagtccttatatgttacacatgatttcaggaagtcattgttctgagacatggcgtggtggcgtgctcctctgccatggaggagcgtggccagggtggtgtccgtctgctcacctgaggagctccctgggtctgccagcttcctgcctggccaagcccttcccctgcacttgtaagacgacgactgagcgtggctgatcctgcccggtttctgggtggatagtggaacctgggggaaccagggtagaatcccttatgggaggcagccattggcctggccaggctttgggcgctgttggagacagggctgaatttttagccctgagtgtaggcacaggcgagagctggagcccaggcacttgttccctgtgtggctggctgctcatctctgatttagctttggctcaatttttgtcctaccccctgattgctactggagccagcatggtggtcacagccactggtgtcttagggccctggaagagaagacagcaatcccaggttgccctctcctctgctcagggctgatcctggcagacatggaggaggagataggcaggaggagatagggagaagacttgggagggagctgggtcttcatgccaaatgcaggaagaaacaagccatcgttcagttcatgtttgagctgcgtcagcccatgtgaaggcccccacacctctgggaagaactgcagggagcatctctctggtccccgtctccaaggtcggggaagcattttacagttttggaggtgatgcggggaagggccacagccaaaacttcatgtggcagtctagcatgccacacctcactggaatcccgcacgctagaagggagccgccttgtgagaggtgttccagtgaagtggaaccccaccagtaggtggtggga

SEQ ID NO: 7526 - DNA, 1191 bp, Homo sapiens
ataaattggaaattagagactaagcacaattagtctataaatgttctataaatcaaaaacttacctcttgcactatcatgccttgaaatttactttttcaaagggaaacaagtttagcagcagccttcaaagaacttctttctatgatgagccaaattcatctttgccagaaaagaaattttgataattccaagaagcctgattagaacaaatcagatataccttctcttgtctgcatgactttgtgagataaaagagagggcttccaacttttttctactagcttgatatgtattatcacttaaaatggttgcctttaaaaaaaaaaagtagagatactaattaccagtaagtaatcatccaaataaatacgtcataaaataaattaattattttttctttgatggattacagtgactactgtgttgcactggcacatttatggtctctgttctggaatcttggaggacacacagcagtggagaacagaaggagtgagttttataatgaacagattccagacacggtaggtttagctgagttcatacagaggagatataactcatttagatcttctgacaaatcctagtgttagttttatctgtggaggaaagacatttaataataaactgtttgggaatcttggtgaataaagattcattttcaagctgaataaccatacttattttattttaagttgccatttggggaataattgcagtatgtgtagagactctcttgggatgcacttatatttttatttaatgactacttgttttctagttttgcccacaacgtctgaaaccactaagacattcaggagcatgttgagcttctggtttggaaacagcaagacccaccatttatgacaaggacagccatgaggttaatacttggagtttaactgccttccctttgaactagttaaaatctgtaagaataaggaagttgttgaaggcttaaaatctgggttctgaaaaagtagtttcagtttataggatacacatttactcactgagctccagttccaatactaaattagacagtatcatatagacggaaaatgaaatgctagaactgccgttctttggatcgccactctatgggggtctgtcttttaactactctcctggttatgttggccttacaccactgccatttgatttaaaacgctgcagaccactttatctg

SEQ ID NO: 7527 - DNA, 1492 bp, Homo sapiens
tttttctttgagaatttatctccagtgtttctatggaaattaaaaaagaaaattaggataattcaatgtcgaaatgttgcatgcatcttttgagaaatttatattttgtaggttgaaggacttgctttttgggcagcgtatttttggaggtggaatgtagttattttaataaccatgtcctaattatttatagcttcctgcctgacacagctcacttcaagaagtgcacaatgtcagaacgtggaattaagtgggcttgtgaatattgtacgtatgaaaactggccatctgcaatcaagtgtactatgtgtcgtgcccaaagacctagtggaacaattattacagaagatccatttaaaagtggttcaagtgatgttggtagagattgggatccttccagcaccgaaggaggaagtagtcctttgatatgtccagactctagtgcaagaccaagggtgaaatcttcgtatagcatggaaaatgcaaataagtggtcatgccacatgtgtacatatttgaactggccaagagcaatcagatgtacccagtgcttatcccaacgtaggaccaggagtcctacagaatctcctcagtcctcaggatctggctcaagaccagttgctttttctgttgatccttgtgaggaatacaatgatagaaataaactgaacactaggacacagcactggacttgctctgtttgcacatatgaaaactgggccaaggctaaaagatgtgttgtttgtgatcatcccagacctaataacattgaagcaatagaattggcagagactgaagaggcttcttcaataataaatgagcaagacagagctcgatggaggggaagttgcagtagtggtaatagccaaaggagatcacctcctgctacgaagcgggactctgaagtgaaaatggattttcagaggattgaattggctggtgctgtgggaagcaaggaggaacttgaagtagactttaaaaaactaaagcaaattaaaaacaggatgaaaaagactgattggctcttcctcaatgcttgtgtgggtaagtttctgtattctgcattttttgcgtgggatgggaaaaggtagtaaaaatgatatgaaaagagctgggtgcgctgacacacgtttgtggtcttagccacttgcttgaaaccaggagtttgaggctgtagtatgccatgatcggtctgtgaatagcacttgcactccagcttgggtaacatagtgagactgtgtctccacgcacatgcaaaaatgtgagtgtgtgtgtgtgtgtgtatatatatatgcgcaaagtcactagcatttgattcattcagcacgatagctgtactttcaagtatgcatacataaaaatttgtgtatttgtgatcttgtcgtaactttgtactaaattgcccacaattaattgtgttcatgtctctccattactgggggcagtggaaacgtttaagttaaagcaaagtttttacacatcagcagtaaaa

SEQ ID NO: 7528 - DNA, 1192 bp, Homo sapiens
atggaattaatgagtataatttacctttcatctgatcaagtaagttttgtttagtaaggcatggtgtagtttggtgtgtagtcaacttgctttatttttattttaaattaaagacgtaaagtcctgaagttcagtgttatattgtatggttcactgttacagagtgaacaaataaagatacaaaaattttaaaaccttggttctccgcttcctgttccagaatgtatatatttctatatgaaacactttttagaaaataaaactgtaaagaatttaaaagtttattaaattattctagagacagaagatgtttcaagtactcaaaagtttatatttcaattggtcaattttatttaggtgtttattggtaaattacatataaaccattttatagctagaaaataggttcttctccccatgagtattctctaatgacataggtatggaaatgaacatgtatttaaatccatcgtacagaattagaagaagaatctccaattattaactggtccttggaattggctacacgtttggacagtcgactgtatgcactttggaaccggactgcaggagactgcctacttgattcagttctacaagctacctggggcatctatgacaaggactcagtgcttcggaaagccctgcatgacagcctgcatgactgttcacattggtgagctggcattctgccctgtttcaacccaggagtgcatttgctggattatttccttgtagtggtgggatactttttatgtcagttatattttctatggaaactggaggaaaaacagttcattttggacattaaaatactttgaacacgtccatggtttctgtttttgtttttcccccaagaaatgagataaaagcaagaatcaatggtttttatacatttttttgctaaattttaaaatagaaacatttgaagctttaaaatgcaagcatttattgtttctataagacacaggcagtatatttgaacatttcaaatgcagcatttcaagttatatatagtagccttaaatattgataaggccgttgctcatctttttagggattgattgactgattgattgattgatccatcgatggaagcagggtctggctcaattgctgtgctggagtgcagtggtgcagtcttggcccactgcatcctccacctcctgggctcaagccatccatccacctc

SEQ ID NO: 7529 - DNA, 1095 bp, Homo sapiens
gacatgacagttttgtgggtatttttctatttttagtattctggcagcaaatttgaggttgtacacatttcattatcaactaaacaaaacaagaagcaagcaaatactttaaggttttcacagcctttttcatcacagggaaggaaaaaactgtgtgtgtgtgtgtgtgtgtgtgtgtgtgtgcgcgcgcgcgcgtgcgtgtgtcgtctttccaaattcctggccacatcaatagtctagaaagtgcttatcaggacaccaaatatttctgtgttcctgagataggtctgaaatttttacccagtattgaatgtatacctgaagtggtcaaataatacttcttataaaaaagtttttctacctaagattatagttttaactttaaattaaagaatggccacaattaaccaacatgcaaaaattctcagactaaacactgagaaattcttcatacaatgcatttgccaccttattgcatttttaaaatctttattctgtagtgaattggtattcccaatctgcctaagcaaaggcatgcccttctaacaagatttgcttagagcagaggtgatagaaggaagaatccgaagaccctctggcatggcaatctgggagcagcacattgttgatggagtccaagtgagcacatttcacacaattcatttagtgacaagtgggcttgctcccttttcatccaggaaaaaaactactcacagaccactgcccagaatctggaataagaaccctcattttaaggtattcttcccaacaaataaatatctaaatattgaaagggggcatatcagaaaacttaaagacacaataaccaaaaccaaaaccctcttcaaaacaagtaagcaatgtctgtatttagttcactctaaaacattcttagcttttcttgcagtttgttcctaaaagatttgattgggcacaagaggaacgaaattattaataaaataaaagcttatttttgttttgctgtggataatcggtacaaaacgtttccagatctgagacttagatggatcttttaaggtgaaagtagaatgccaggttctactgaaataatatctgaaaggaacaaagagccat

SEQ ID NO: 7530 - DNA, 1140 bp, Homo sapiens
taaaaagatggcctattttgagcctttgtataggtacattcctgtttttgtgacaaaagaaaaactttaaaattgtcccaaacagaaaaataatggctatcagaagtatgttttgttttagtgtgagttaccgttactgtatttgtttattgtaaaggtggacatttagcgttcagtgcagttttcaataaaaagtaattaaaatttgttaagttctgaaattcaagtacatctcactaatgtaaatgttctctacttgagatgtttaaggcaattgcattgtcaattagccaatttccagctcttgttactacagggttccataaccagactcaagaccgctgacaattaattacctgtgataacaaaaagtttaattgaaaaatcaaaacctcacacaagtccatcattatcacgtcatgccatccttaagatgcaatggtgggttagtgctaaatcaattcaaaaaaaaacaaagttgctcaacttttagagttctgactttaatctaccccaaagcaaaatgacctggacctggttcaagggagggaagtgaaccttgaaactgttttgccaataacctaacaaacaaaatgatatttacaaagaagtgttgcaaatagtcccatgagttaagagcttgatttaatggatcttctttttaaatagaattaaacctttatactaaaagtatttgcaagtgtcaattaagtccaacaattccaggtatgaaactccctctgagctcttccttatacttcccttcccaattaaaacaaaacaagaaaatcatggtgtcttaaagcctttggcttgcctggccttgtctgctcactcattttaaggtggtggccccatcccaactctaccataaaagtgtctattaacacaagctcacatggagagagacggcgctcatagttactgacctattaccccagggaacaaaaaggtagtttaacgtcttcgtaaccactcatcaaagaggcaatgaaatatgcgtgaaaaggaggccaagcgcacacagaatatcttaccttcacgaatatgtgaagaagtctgggacacgatgaacctaagagtcaaaaacataaaaaggcaggtctgaatccatggtccacctgggttttaattattaga

SEQ ID NO: 7531 - DNA, 1219 bp, Homo sapiens
tgtggccagtctgcactcgggccagcctgcagggagccattgtgctcatgtcaccctttgcaggagcgagcccagcaatgaggaggcaggacattactccctgtgacattgagagcaagtttttcaaacacaaagctcatgttaagaagcctgcagtgcacacaagaagtggggagaggggtgggaacggaggacacgggtggtgatgggaggggcatgtgggcttgtcagaacactctgtgtttgaaaatgtcaataacaaggaagggttttgttttgtttttaacaaaaatcctgctgtacccaatataagcagcaagcactgcggtcctcacctgtcctacaccggccatggtggcccctcgcgggcagtgctcgcctcaggcctcactaagctttgggcacacggtttctctggcagcagctaccagcggggatgccaagcccggactcagctcagaagcaatggaggtggcagcgctggggcgcgggctgtggactcactcacctggacgctctgtttctgtacaggtcgcacggggcaggcggttgcagttcgagccaaggcctttggattcagcgtcatattttatgacccctacttgcaggatgggatcgagcggtccctgggcgtgcagagggtctacaccctgcaggatttgctgtatcagagcgactgcgtctccttgcactgcaatctcaacgaacataaccaccacctcatcaatgactttaccataaagcaggtaatttgaaaatagatgccatggaagcttctgtcgaaaggtggtagcacttgcttgtgggcacaagagggacacggagggcaacggaggtggtttctggatacactgttgagcagggaagaggccctgcaacaaaccagtgacaagccacgtgaagccccttcctcgggctgagccaggctaagcagagaaggacaggcgctagccaggacccagcttcagaagcttcccagaacctttaaagaggccagcagctcggcacagtccagcctttccaccgtgttgcttcctctcaggatcagcagcaacggccctggcttccagccgtcaccaacacttcccactcccttccctcaaactgcagcacacacattaaaccaccagaccaacaaaactagcttgcagctttcttctttaaaccttggtacaagagtcttccaccatgccagtgtgcctgtaaccggcttttcttt

SEQ ID NO: 7532 - DNA, 1133 bp, Homo sapiens
gtgtgtcagttacatcctaataggttaaaaacttgctcaaatggtcagaagcctgaaagaggcgtcaggaatcctgtgtgaggtaagatgggggatctgtttgcaccttcatctctccatatgagatcttccatatgagctcttccagaaacctctgccccaggctccagcaagcctgtagggcagcggctgctaggcaagggcttgaatttcagtccagattctctggtgtgtgggtggacagtttccttctgggactgaaggagcacttggaagatggtgctttcccttctagagcaaaccttggcattgtcccagctaagctctcatgcccagggcttgggggtctcctgtggcctccatatccctgcacctcatgcagggcacgcaagcatcccacccactcccaaccccccacctccagccgtcgtgcccggcatcttttcccagcatgagaacccgttggcttttctcttttcccgccttgccatgaaggacctgctgccaggattcgagcctcagaccttggacaggtctcgggccagcctcagccacgttctgcgtgcccggccatcagggagggtagagggtgggtttcaccaaggagaaaggcaacccgtgtcggggagggagccgatcgctaggcaacctggagtttgttaccctggtaacggatccatgcactgatgatgctgcggatggacatcttgtgacaatggcctctcaggctccccagacgcatcagcggctctggattcccaccttgcgcccagcgtggttttcctgtgtggctaccatttaacgaacagcttggatttcttataatcaggcactctctccgataaccatcctgccagcacccctgaaagtgaagttggggtgttcctcactgtgtgtgggcgaccgcctggggcatgagaccaggacttccaggccccacagggttgtgcgctcagacctcaagtaggggccagaagagtgtactgaaacagaaggaatcttgtggaatttggcagttgtaccattttcttagcagaaaacaggagcccaggtgggagccatgtgtgtcgggttcctcgtcaggtgacggtgctgttgcggatctcgcggatgagctgagggggtatccagct

SEQ ID NO: 7533 - DNA, 1134 bp, Homo sapiens
cccctaagtcaagttatatggaagcatgatttatcttctccaaaaaatatgggcccctcagtgaagttaaacagagtataaaatgccttcatggtagttaaatttatactctgttaaaatgatttgtgcactttgcagtaagctgtgatattaagtgcataaatatacagcggagttaacttggaggaacgttttatttgacaggatcacttaaatgctcaggtacagtatcgaaaccatttagcatggttaccaggaatggagggtgagccgactctgtttaaaatctgcagaaaacattcagaatccaaaggaaagcttgtaagtaagtacttctccatggagtgcttaatcgtggaagtggttttcatcacaggagagaggattgcaatttctaaatcagtctccctgcatcatgtgagaaaatgccttgtaaataaactctccattggaatagtcacttgtcctaagcgtggaactgattctattcaaattagcaaccattatagatattttggtcttctattgtcaatgacaatacattttcctgtgggaataggttatttagtccatattgggacattacaggagaattaataattaatgacatgctagtgctcggcccacccttctgtttttgtagccaaggcttgattggattttctgtatgtataatgggctgtttcaaaatggtcttgcctcattgtttcttcatatcttattgaaaccaacccactgttgatctcaatctgtgtaaggagaatgcggagtatggcattcgcaggactgaatccctagattttaagtttggaaggagatccaaccgggcagatgaattgaccggtggtgaatattctgtagcattttcctccctggagaggaatgccgccaccgctgggaaccgtggactggcatgtgagccagtggctgtgaaaggcgctgtgccctgtgtcctccgtgtactttagagcaggagcgtcacacatggtggagccgggtgatatcccgggcaggctcccgaaagctcctggtggcccatcaggggctggtttttccaccttttttttttttttttttttttcctcgagacaaggtctcactctgtcacccaggcaggagtgcagtggcatgatc

SEQ ID NO: 7534 - DNA, 1162 bp, Homo sapiens
cttaactgagtaatcaatttcagtagtaagttaaaatgccttctattaatggacaactgcaaccgttaatcagagttacagtagattaacagttgtcagcatttatgctaatagcacttataaaccgtgggctcatgatttgcactttataattccatatttctcaaaacagttggtaatactttttgcttgaaggtattgattcttttgtccctttgcttgctacttggagatgtagagaaagctaaatgacattttcacggtgatgacacaatatcaccttctgcttttgcacacttggctttgtgtcaaaatagatggaaagggttcatttgttctggtgctctactgtttaatttgatctggtgtgtgactaaagcaagacaaatagtatttttaatgaaaccatttaataacctctggtagcttagagtcgaaggcattggaaaaatgcaattaaaggatgcctagatgtaaacaaaaaaaaaaaatctctacttcatcttcactgactccattcattttgctttcagggtttcatcaccttaaatggttttgaaccaatgaaggtgtattcccttaaaaagacggacagcccatcgtgtgaactatagagtttgtggacagatttatattggtgagttattgtgaaatatctccaggtaaaagttcagttttctagaatcccctttgcaatgtgtgttcaattagttgatgagtatggattgcctgcagcctctggctgtttcattgggatgtctaatcgtgggatcatattgattgtctttcaattaattgcatctagtattttcatttatcaaaagcaaaatacatgtaattaactctgaagcaatatagttcagtgtaaagtgatttttgctgctgctgctgctatagagataagtcaacggaaattatgctacaaggaaactcaagtcagaatggaaatagtgttaggatttctcgatgtattaattaaaaagaataaaaatgaattagagaaaccatctcatgacaccccgagtcagtcataagtgatagatggatgtctttaggaagaaggcggcttgtggatactggcacctcttcagtcagcttaggcttttagtgttaccagcctctaggatgtcttgaacataccatgatttttctggcggagtag

SEQ ID NO: 7535 - DNA, 1161 bp, Homo sapiens
ttgaagtaatgagactttaaaggatcttgtttttgtaatcacttgatttcaaaggatacttcttacagcaattataaagtaatagtcaaaatgctaattagacattttcagtcatagctgctttaatgttgaaacagaatttttttctttagcagagactgtatcgtagagttgaaacgctaaatattcttttgtctggcatcagatctctgaactgctctgacattctcctgaaaaacccctagtgccctttttattgcccccaaaagaaaagttaatgagatggtagatttcaagcaaaaaaacaggccctctttcttgcaaaatatgcttacagttgccattgaagttggatgttagccgtgaatgcacttgcctttaatgaaaccagtttaatcgttcacacttgatcaagtataacatgagcaaacaaaggaaataagccagcatatttctgtagagtgtaagtgttgatgttgggtcaccccctccccctaccctgcccccctgtaaaagggagagagggttgaaggcaaagggaatttatggcgctgattggttttttgtgccccaggggtaggggaccccagttacatccctgtggaaagcagttattagagggaattaaaagatcttgggtttggagcttgttttgaacctgactaggtggtttgggtttaattctttttcctgttcagaaagataaggtaaagaataccgactcccccccgctctttttttttttttaacccccacctgacaaccccctctctaattgtaccttaataagagtctgcaggttgaatgcagaaccctgtgagttatttacggtttcgcctgggagctttgaaactgacccttgaatgggtgttctcctgcggggaggggcagggtgaattaccttttcttaactgattttaaaaagcctcattgtccctaaaaatcatttccttgcacgagttgcaatttatgtgtggaactgaatcatcaattccgtgaagagaaagatattcgtaaagtacatctctctaaagttaagaaagtaagaacgtttggctagttaaaaacaaacactactgccattgtaaaaaacacgccagtgacatacttggtgagatattttggccttttgagagtcggggcacacctgttcctgtccct

SEQ ID NO: 7536 - DNA, 1264 bp, Homo sapiens
ataaaaggaatgagtactggatttcattgatgtattgaaataaatgtgtagaaacaggcccatgagcaatatgtaaaagaaggcaggtctgaacccggcaggagaggaatgcctgctgctctgtgaagagtgactgttgggctgtcactgtccggttttctggacctctgaattgtcggtaggcattgctggtcccttacctgtctctttttcttttttaaccctagcaataacatcgaagatgacacaattctcaaaaccaacaagcacatttactcccagcttttgagagcaactgcaaataaaaccgcgactcttctggaaagaatcaacgttatcgtccacctgctgggccagcttgccgccggcagtgcagcgagcagcaatgccgttcagtgactgcacagagccgtgtcccagacacgctgtcagtgccttcaacacggagccggtttgttcattcggtgctttgtttcattaaataatagggaaatatccatttaaaacaggtatatcagtggaaacacagagttattttaagtgacagacaaattacggttgagttctgtggcttcttcacttgaagtgctaacatcagaatcaaacttaaagcttccactatttatgtctttgagaagtatgtagtacctcggtattaacagacctgctgtgatgcagttacactttcacgtatttttgaagtatgtcaagctacacgggtctaagatatgattattttggataaaatgttactttggtcaagagaacttttatccagatgacattacaggttcaagtgggttaaggagacctcctgtacatctacagtgtttccttttaaattgtccagaaaaaaggtgtgttcttcataagcttcagtgcaggatttttcaaagacgagctgttgtgcaatttgctgtatttaatgcatgttctgaaaggattcacttttgactttatatgacagttgatcaagaacaggtactacccctttttttcatttcaaacttgaaactgtgaataaggtaagaaaactattttgaataaataaactatttatttaaaatgtctttgtatttttccaatttccattcttcacattgagttttgatttgaactcagtctaaaattaataaactttacaaagcaaagctcaaaacattaaaagtaaaattctgctgtccactaaattctccctagaatattttacttattgctgctgctacatggctcttgtccagttacacacaaacatcccctgttc

SEQ ID NO: 7537 - DNA, 1201 bp, Homo sapiens
gtggagccagtccctaggatcatagaacaaagggcagggggttctcttttttccccttctctcttgctaatgtgataggtgtaagtggccctcaagcattgcctagcttcactaatggtcaagactgacaagtgttctggaaactcatgagttttagatgaaacaatgctgtgggccagcagagaagcaaggcttggctccagcctaattgtgtagaaaacaaatgaaaatgctttatttcatgaggtttatctcttctggatttgtattatattgagaatctgataaaagaaaatgacttaatctggtacaaagaaatttcaatctgttcagaatctgaaaagaggaacagagtcgaggtaaagcgaaatgaacaaggtcacacagtatttaagatacaatgctttccaagatgatggtggtaaaactgtgacagtatttaaaatacaatgctttctaagatggcggtggtaaaacaaagttttgcttttgaaaagtgaaaagataaatgaggcctacatcccaagacttggttttatactcttggtattatactaaatataacatttaaatattttttcttttaaaatagcaaacggatgtttcagaagacagcaatgatgatatggatgaagatgaggtttttggtttcataagccttttaaatttaactgaaagaaaggttggtttcactggatggcatctgaatggttatttcttaggccaaaaccacttttatttaatgcatggtgaaaatgtcttttatgttaaacagtgatattaactatagggataagtgctcttgtgaaatcttattgtaatcctttttcaatatgaaggtggtggtgttgggtctgtacccagttaaagttgtttactccctgtggtttagggaatcatctggctttgcagtcctgatgttggtactgatgcaggagctgtttgtgctgtctctctgcagctgttatctttgctacttgtgtagtggggatattctcaggctttgctgcctcaatgttgagggcatttactgacattttattttgtttcgattcatctctttttattgattctctgatgagttgtaataaaaagtaaaccagctgcttacccacctcagaataagatgcaggctacacttagtctttaattttgaaataaactgtccagttacttccatctatctttatgagatggacta

SEQ ID NO: 7538 - DNA, 1124 bp, Homo sapiens
aaaaaattagctgggtgtggtggcgggcgcctgtaatcttagctacttcggaggctgaggcaggaaaatctcttgaacccaggaggcggaggttgcagtgagctgagattgcgccattgcactccagcctgggcagcaagagcgaaacgccatctcaaggaaaaaaaaaaaaaaaagaaaaagaatatcttgatgccttaaacaaaaacatttctggacactgtcttcttccacattgactctttaaaaaccagtatattcattccttgctttttctatataaaatgcaacaaacaaaaacacaaccataacaaccacaaacttctgtggaagcccagacatggtgagggccggaagctcactcagtgcaggcgtgaacctcagtgcaggcgtggtctcagttgtccagagctactgtagctgtggggactcttaaccttgcagtctcagtactttaatttgtgttagttattttatttatattatctataaaaaaatagcagcttgttcttgagcaggagaaacaaaccatttggtatccagtgcctgggcagcgctttctgggtgagcaggcctcttcaggccttgtggtgctctgaaactgccttcctgtagaatggaaagacaagttcttttttagtttcccaaatgcacttttaaagcttctacatggaaatcatttcatggtaaatgtcgttgggaataatgaattcaagtgtactaggtgttaagtatgttgctacaaaggaatggaatatttagcaggtgaatcttttaaaatagggttgatttctctgttcacaaaattttatagagaacctcacataatgcatgattaacagagacagaacagagtttcttgcttgtgaagatctgattgtcattttctgtttccagtggaccttctggggctcttgaaatggcgctccaacaccagcctgctgcagcagaacttgaggcagctgatgaaagtcgatggtggtgaagtagtgaaggtaacatggagcccaaagggactttttgggtctttttttttttttttttttaatgtatgttaacagaagtaggcagtgacttcaaaggtagtataggattgtggttatactccctttaaaaaatagtga

SEQ ID NO: 7539 - DNA, 1103 bp, Homo sapiens
gtgtctgggtgggaccaggtggtctacttcagggactttgcatgaaccgtgacaggccaggtcctgccacctgggagcctgttggcagggaaatattcggctgttagcagatggcatcaagttttgaccttcgcaaagaatctacattctgaaaatgatgggaaatggtgcaaaagtaacaaagtggtacagatccacatagttaggagttgattaatcccttgacatccagaccagcatgccttttggtcaggttggttttgtttcccactgtttgcatgtgacattttctggtataaagtaagtggtggctggcacagccaagcatggagaggattttactccttaaagggtctctgatctcatgctgggcatgctgggcgtcctctctcccaaaggaaacggatgaggctcatgctgggcatgctggacatcctctctcccgaaggaggcgggcgaggctgttgctgctgctgtggttccacagcactcctttgcgagcaggagtttgtggtttgcttctttaatcttggggctatagcagtttgagatcttccatgccatcccaaaagccccctgggtgttgggaagaggctgcacagtccaggaggaatctgaaccaaacacctgacccagcctttcctctgatgtccttgctgtgtgatcacctcacccatttatttttatttttctttaaattacagtttcattgagatataattcacataccaaaaaattcatccttttactctgaagtttttagtgtcttcatggagttgtacaactattaccactgtctaatttcagaacactttcatcatcccaaaagaaaccacatagctattagtagtcactttctcctcttcctgtaaccactaatctgcttcctgtctcgatggatttacctgttctggatattttatgtaaattgaatcatacgccctgtggccttttgtgtctggcttctctcacttagccttgtgtcttcaaggtttattcatgccgtagtgactatcagtgcttcacacctttttttgttttgagatgaagttgtgctcttgttggccaggctggagtgcaaaggcgcaatctcaggatcttgg

SEQ ID NO: 7540 - DNA, 1148 bp, Homo sapiens
tggtctcaaaactgggatactgctgtgtattccagtttcagaatcacgatcctcttccatgcctgggcaccctggttggtagaaggtccttccttccactcagctgggtcctgtccctgtgtggcttctgcccattcactagctgaagtcctgtacccagtgtgtagaatgagtgagatgcatcttcccagagttgccattcagcgctttgtcaccagccttatgaaaaccggaaagagggttggaaaggccccctgggggaagcagtaggccctctccttgctttgaccctctccatttaacactggtggcatttctttgttctgaattcgctcatccaaaatttttgtcttgtgtatctagtggctgaaaaggatcccgaatggctttataggtagtgctgggggcaaagtgggtatttggagtactgcagagatgatagttattccagtgtgtgggggaagtccggtgggttcacattgtcacccgaccttctgtgtctatgcagtttcttcaggacacgttggatgccctcttcaacatcatgatggagaactcagagagtgagacttttgacacgttagtctttgatgctctggtaagagagctttccttctcatatgcttggataacacagcgttcttccatgctgcagcgtctgaggctggagtcgggggcttcgtcacagtgaccttgaacgcattttcagttgtaaatccaatcagagatgaattggggtggcagattttttttctcttttttttaaatgtaaaactgtagttaggcaaatgtcatttctagggtaagaaaaggtaaactagccaccaacttctatctgaaaatgttatggttcatatcctaacacaggggtgcagatggttctgatgaagattataaaatggcttacattatgttgctaatgaaaatattattgattaatttgacaggtatttatcattggactgattgctgatagaaaatttcagcattttaatcctgttttggaaacttacattaagaaacactttagtgcaacgttagcctacacgtaagttcctactttgttttaaaaccaatacttctttttttggtatttgtgttatttagagtctttttcatgtacttttgtctatgactgtgtatttact

SEQ ID NO: 7541 - DNA, 1102 bp, Homo sapiens
aatccctggcacttagaaagcactaagcaattattgggtttcattatcattagatttattatgatgacttaccggctctttcttggtggaatttattggcatttattcagactttttattgtgtgagttacagcaaaacataaagatttacataatttctttaagaacatcccgcttagaatcagtagaaaggattctttttagtgtgagtaaatttagttaaaactcccttctgtgtcttcaacatactttgcaaaatacctgtttttcctccctgtgtgcagtcatgaactcaggtcagaggactctggcctcctgaagccagctgttaatataccctggtcctgcacctggattctttcatatctgcctcgtgtgcgtgtttactgtaaggtggtgggtggagctccaggaaggctaagagctgtgaggtcctcaagcctgcggaacaagctgtgactagttctttgcacttgcttgctaataaacgtttgtttaaaacattttgttcgctgagtggagatgcccagtgtgtgggcatgtcgagtagttccttacagaccgtggggagggtgcattgcagggcacttttcctggctcttgtgaccaaaacaggagcttgtggggtttgcggaagtggcctgtggactgcagcaaacgtagcacggcctccacgtgtgctcattttcaaaattctgccttttgattgaaatgtggccaaagaactcttctcagattaggctccgtgcttgaatttcagaagatgagaggcatgaatcagcttaccacactgcagccacatctcttcattggcgccagcctttccatgctgtgctgttggggaaggagtgatgcagccattctcataggtggagaaagaaaaatgggagattttgatgagtttcctaatgagacaaacaaaaagtaccattttttctttatgctgtgatgggactgagataagaatagtatcctcatggccgggtggagtggctcacacctgtaatcccagcactttggaaggccgaggtgggtggatcccatgaggccaggagttggagaccagtctggccaacatggagaaacccccatctctactaaa

SEQ ID NO: 7542 - DNA, 1204 bp, Homo sapiens
tacagaattaaaaataaaaaaatctctagttatgtttgatgacctctgagttcctggaactgtcagttccatgttttccgtaaacgttttttttttttttttcatattattgagtctttggagaattaaacagtcttcgctttaattgcactgcacggtagggctgcggatctccccgtgtccaattcacctaatttgtgttttggcacattctgcagctgtgccatactctaaatgtgtgtgcacccctcacttcggggttctcatatattagtccactaactaaagttaaagtaaaaaatcaaaaacttattttaagacatttcttacacaattttgattttttttttttttgagattcaaagaaaggcagggaatttggcttgtaaatgttgcttaatgtttttttctctttttagaaactccagtgtccatagtttaaagtgaatatggctagaatgttgtacaaacgctcctggcttcatccacatccctgtatctcggcagtcacagctccctggcaccttctcccccttgcctggacggaggcttctgagtgatctcctaggccttcctagattgagaggggaaagggaagatcttaagattccagaatattcatttcatttaagcgagggaggcaaatcctacagagctttttcccatttgtgttcatttattggctgtttccgtggattcgagaaagaaacttgaaaatctgttttgttttgtttggtttggttttgagatggagtctcactctgtcacccaggctggagtgcagtgatgtgatgttggctcactgcaacctctgcctgccaggttcaagcaattctcctgcctcagcctcctgagtagctgggattacaggcatgcaccaccacacccagctaatctttgtatttttagtggacttagggtttcaccatgttggccaggctggtctcgaactcctgacctcaagcaatccacctgcctcagtctcccaaagtgctgggatcactggcgtgagccaccgtgcctgaccgtttttttaaaaaaaaatagagatgggcgtttggaaactgagtcactcaaaaggtgaagtagctttgtcccacagatctgttactcagtacaaagttgaaaggaaacctaaattcattttatttgtgtttccagtgtgcatcccagacatttgtttcagaatttgttaaacattgaa

SEQ ID NO: 7543 - DNA, 1113 bp, Homo sapiens
cctgtgagctggccctggcttgcttctgactgagccatgcaaagtgctttcacctgaaaacaaccgtctatctgtaatcatagagccttggtcaggatcaaggtagcagacatttctttgcattgacgtctatttttccccattaaaaaatagacaaaatatttctatataaatctctaaaagacgagggttccccttttgaaatatgccctaaataccatcctcccatcgtaaatgaacaattccttaatatcatcatcaaatatccggtcagacttcacatttgccctatcgtgctaagtgttctatctttttccagtttatctgtgttgggattgaaacacagtccttgcatctggtgactgtgtatctgaagtcacccttggcctcccttttaaatcactgctttcattgtaaatgtcttcgatggattgtgagtgactttacacgtgtctgtgggctggaaagcaattgctctcctattaagacgtcattgacctttcctttaggtttgccctggagcctctcctgccaaagaaaatgcactccaggtcccaggacaagctggacaaggatgacctggagaaggagaagaaggacaagaagaaggaaaaaaggaacagcaaacatcaagagatatttgagaaagaatttaaacccaccgacatttccctgcagcagtctgaggctgtgatcctttcggaaacggtaacccgacagggtatctttcctcgctctgcggtagcttcagggacctacctttgccccacctgtagccaacagggctgacggtgggctcttattgaacttgttataaattagcaactcagaaacctggggtcctcctcccctaacctcaaatgtcccaaggcagtaggacagccagagccacagagagacctggaggaaggtgggcttagcatttgtcccccttccgcagggcctggggcgaggccgctctgctgctaggctctgccgctctgttggacttgtttcctacacatgtcctaatatcccagaagatgagcaggagtccttttgttgtcaggaaacagtccttggtgtccgctaatgccttccccttgccccttgctgactggaactcttctaagc

SEQ ID NO: 7544 - DNA, 1085 bp, Homo sapiens
ttagcagtgatggttaaaggaataggaattcatttactccctgtaaatgaatgaataacggaccttctttctataatgtaaactgtaaaaattagatttgatatatatcttattaggcattgttattgaaatttatcctgaattccttatttataatttgtcagcagagacagtcatttctccataggagcaaagtaccaaggcattaccttgactatcctagatgacaagtctcttagacaattcatcagtgtgtgattttcaaatgatttctccttttaggttactgttgattgtgctccctgttgaattttgaagtttgttttactaattattggaattttgtggatgtcttctcatttctttagggaatatccctgcgctccagacgccaaaataagactgaggcagaacagcaaataactgaggtctttgtattagcagaaagaatagaaataaacagaaatgaaaagaagcccatgaagacctccccagagatggacattcagaatccagatgatggagcccggaaacccatacctagagacaaagtcactgagaacaaaaggtgcttgaggtctgctagacagaatgagagctcccagcctaaggtggcagaggagagcggagggcagaagagtgcgaaggttctcatgcagaatcagaaagggaaaggagaagcaggaaattcagactccatgtgcctgagatcaagaaagacaaaaagccagcctgcagcaagcactttggagagcaaatctgtgcagagagtaacgcggagtgtcaagaggtgtgcagaaaatccaaagaaggtaagccatttactgtttccctgttttaaaagacacagaatgttttgatgtattttttgcccaaggttgcaaaggcaaacaaaaagcattatcttcaacagcactctgccagctcccagttacattaatggaaggagcattatgctaagacataaatttggtcattttagttatattttgttgtgtctactttgggaatttcacttcaaatagcaaattcacgttatgaagactttcttcagaaagaaaaggaatttgtctagtggctaattt

SEQ ID NO: 7545 - DNA, 2288 bp, Homo sapiens
tttaaagagctcttccagacccctggtcatactgaagaagcagtggctgctggcaaaactactaaaatgccctgcgaatcttctccaccagaatcagcagacaccccaacaagcacaagaaggcagcccaagacacctttggagaaaagggacgtacagaaggagctctcagccctgaagaagctcacacagacatcaggggaaaccacacacacagataaagtaccaggaggtgaggataaaagcatcaacgcgtttagggaaactgcaaaacagaaactggacccagcagcaagtgtaactggtagcaagaggcacccaaaaactaaggaaaaggcccaacccctagaagacctggctggcttgaaagagctcttccagacaccagtatgcactgacaagcccacgactcacgagaaaactaccaaaatagcctgcagatcacaaccagacccagtggacacaccaacaagctccaagccacagtccaagagaagtctcaggaaagtggacgtagaagaagaattcttcgcactcaggaaacgaacaccatcagcaggcaaagccatgcacacacccaaaccagcagtaagtggtgagaaaaacatctacgcatttatgggaactccagtgcagaaactggacctgacagagaacttaactggcagcaagagacggctacaaactcctaaggaaaaggcccaggctctagaagacctggctggctttaaagagctcttccagacacgaggtcacactgaggaatcaatgactaacgataaaactgccaaagtagcctgcaaatcttcacaaccagacccagacaaaaacccagcaagctccaagcgacggctcaagacatccctggggaaagtgggcgtgaaagaagagctcctagcagttggcaagctcacacagacatcaggagagactacacacacacacacagagccaacaggagatggtaagagcatgaaagcatttatggagtctccaaagcagatcttagactcagcagcaagtctaactggcagcaagaggcagctgagaactcctaagggaaagtctgaagtccctgaagacctggccggcttcatcgagctcttccagacaccaagtcacactaaggaatcaatgactaacgaaaaaactaccaaagtatcctacagagcttcacagccagacctagtggacaccccaacaagctccaagccacagcccaagagaagtctcaggaaagcagacactgaagaagaatttttagcatttaggaaacaaacgccatcagcaggcaaagccatgcacacacccaaaccagcagtaggtgaagagaaagacatcaacacgtttttgggaactccagtgcagaaactggaccagccaggaaatttacctggcagcaatagacggctacaaactcgtaaggaaaaggcccaggctctagaagaactgactggcttcagagagcttttccagacaccatgcactgataaccccacgactgatgagaaaactaccaaaaaaatactctgcaaatctccgcaatcagacccagcggacaccccaacaaacacaaagcaacggcccaagagaagcctcaagaaagcagacgtagaggaagaatttttagcattcaggaaactaacaccatcagcaggcaaagccatgcacacgcctaaagcagcagtaggtgaagagaaagacatcaacacatttgtggggactccagtggagaaactggacctgctaggaaatttacctggcagcaagagacggccacaaactcctaaagaaaaggccaaggctctagaagatctggctggcttcaaagagctcttccagacaccaggtcacactgaggaatcaatgaccgatgacaaaatcacagaagtatcctgcaaatctccacaaccagacccagtcaaaaccccaacaagctccaagcaacgactcaagatatccttggggaaagtaggtgtgaaagaagaggtcctaccagtcggcaagctcacacagacgtcagggaagaccacacagacacacagagagacagcaggagatggaaagagcatcaaagcgtttaaggaatctgcaaagcagatgctggacccagcaaactatggaactgggatggagaggtggccaagaacacctaaggaagaggcccaatcactagaagacctggccggcttcaaagagctcttccagacaccagaccacactgaggaatcaacaactgatgacaaaactaccaaaatagcctgcaaatctccaccaccagaatcaat

SEQ ID NO: 7546 - DNA, 1103 bp, Homo sapiens
aaatatttcctgtgtaatatggaccctaaccacataaggataatccatgttattttattggcgatttaaggcaagaaacagctgtttgtttctaatgtttgaaggaaaaaatgcctatatttacgtcaatgacacagggcatggcaacctttggaggaaccttctgaagcagtatttttaccttctatgatcatttcagcatctaactttgcttaatgatgaccccactatagcaccaaataacattattcttaattgtgcatggctcttataagacagatttatagacacataagtagcctcatgtcgttcagtgaatacgaagctaaatatttagttttttaccatattttatgaggctgtaatactcgattgacatgagacactaatagaatgtttttattgtgtatgtttttatttcaggaggaaatgtgttcttcagtgcacagaatgcagcaaaacagccatctgataaatgctctgcaagccctcccttaagacggcagtgtattagagaaaatggaaacgtagcaaaaacgcccaggaacacctacaaaatgacttctctggagacaaaaacttcagatactgagacagagccttcaaaaacagtatccactgcaaacaggtcaggaaggtctacagagttcaggaatatacagaagctacctgtggaaagtaagagtgaagaaacaaatacagaaattgttgagtgcatcctaaaaagaggtcagaaggcaacactactacaacaaaggagagaaggagagatgaaggaaatagaaagaccttttgagacatataaggaaaatattgaattaaaagaaaacgatgaaaagatgaaagcaatgaagagatcaagaacttgggggcagaaatgtgcaccaatgtctgacctgacagacctcaagagcttgcctgatacagaactcatgaaagacacggcacgtggccagaatctcctccaaacccaagatcatgccaaggcaccaaagagtgagaaaggcaaaatcactaaaatgccctgccagtcattacaaccagaaccaataaacaccccaacacacacaaaacaacagttgaaggcatccctggggaaagta

SEQ ID NO: 7547 - DNA, 1215 bp, Homo sapiens
taaagaaatttccagcgttaaattagtgagccgttatggagaattgaagtctgttcccactacacaatgtcttgacaatagcaaaaaaaatgaatctcccttttggaagctttatgagtcagtgaagaaagagttggatgtaaaatcacaaaaagaaaatgtcctacagtattgtagaaaatctggattacaaactgattacgcaacagagaaagaaagtgctgatggtttacagggggagacccaactgttggtctcgcgtaagtcaagaccaaaatctggtgggagcggccacgctgtggcagagcctgcttcacctgaacaagagcttgaccagaacaaggggaagggaagagacgtggagtctgttcagactcccagcaaggctgtgggcgccagctttcctctctatgagccggctaaaatgaagacccctgtacaatattcacagcaacaaaattctccacaaaaacataagaacaaagacctgtatactactggtagaagagaatctgtgaatctgggtaaaagtgaaggcttcaaggctggtgataaaactcttactcccaggaagctttcaactagaaatcgaacaccagctaaagttgaagatgcagctgactctgccactaagccagaaaatctctcttccaaaaccagaggaagtattcctacagatgtggaagttctgcctacggaaactgaaattcacaatgagccatttttaactctgtggctcactcaagttgagaggaagatccaaaaggattccctcagcaagcctgagaaattgggcactacagctggacagatgtgctctgggttacctggtcttagttcagttgatatcaacaactttggtgattccattagtaagtttatttaattgtaaatttatttttctaaaagatgaacaccttctatgtagctgtgagaccttcattctttcagtagtgattagctttgtggaagagaatgtaagcacataaggcacagggataagacagacacgcacgctgttttcgctaatagatgaatactgaaggcctaggtaattgtaacaaggaatgacagaagagatggaagttgtcaggcaatcatgaagcaggggttattgaaggagatagggtggccccaaaaatatttgattctcctccatctatcacaaaatagaaaagagaataatcataattgcttttcacatggagtttaatt

SEQ ID NO: 7548 - DNA, 1181 bp, Homo sapiens
ggcctggatcatcatcagatgagcagacatgaaagccgctctcaacaggattagaaaacacagtttctaggggattcttgcagggaaacagacatggaggggcaccatttggtttgtaaaaggaaggtatagccctgaagttggcaagctcttggcctgctggcctgatgcagcaggcagctgagaattgcttggcctgtccatgggggcctgacaggtatctcaaattttaattgccagcacacacgaatcaggagatttcatatttcaaaaagcatgtatggctgctgtttcttttttgtataaggcttaatttgttttttttttcatgttatagctttcctgagatacattttacatactctaaaatttacccatttaaattgtacagcatgctgggttttcatgcatttatacagttgtgtgtccatcatcacagtgtaattttagaagatttaaatctccctcttccccactgcccctgccaaaaaagggaccccagacctaccagcagtcatttcccatccccctccctctggtaccagcccaccactagtctgtctgtgtctgtggttttccctgttctggatgttttgcatcaacggaatcctgcaccatgtggccttttgtgcctggttcctttcccttcgtgtggtgttttcaaggttgctccacgctccagcatgtgtcagaacttaattccctgcggccaaacaatatcccatcatgtggatgaaccacattttgttgatctatacatcagttaagtcagtttcgccttttggtgttgtgaataaggctgcagtgaacatttgtgtatatatgtgttcatttctcttggggtatatatacacacacacacacgtaggcctaggagtaggattcctgggtccgatggcaattgcatgtttagcattttgaaaaacttatggttttctaatacagctgccccattttacattcctgccagcaatgtatgagggctccaatttcttcatatactcaccaacactttccatgttgtctttttgattttagccatcctaaagggcgagaaagatatcttcttgtgtaaaacgggcaaataatcaagctgggaatggtaagcagggtttttattcacaatagggctggttgatgggattcacaattacagaaggccacagagggaggacacactt

SEQ ID NO: 7549 - DNA, 1263 bp, Homo sapiens
ccgctccccccactgaggagtgctgctgtctgctcttgttttgaacagcgccatcatgaccgggtcctataacaacttcttcaggatgtttgatagagacacgcggagggatgtgaccctggaggcctcgagagagagcagcaaaccgcgcgccagcctcaaaccccggaaggtgtgtacggggggtaagcggaggaaagacgagatcagtgtggacagtctggacttcaacaagaagatcctgcacacagcctggcaccccgtggacaatgtcattgccgtggctgccaccaataacttgtacatattccaggacaaaatcaactagagacgcgaacgtgaggaccaagtcttgtcttgcatagttaagccggacatttttctgtcagagaaaaggcatcattgtccgctccattaagaacagtgacgcacctgctacttcccttcacagacacaggagaaagccgcctccgctggaggcccggtgtggttccgcctcggcgaggcgcgagacaggcgctgctgctcacgtggagacgctctcgaagcagagttgacggacactgctcccaaaaggtcattactcagaataaatgtatttatttcagtccgagccttcctttccaatttatagaccaaaaaattaacatccaagagaaaagttattgtcagataccgctctttctccaactttccctctttctctgccatcacacttgggccttcactgcagcgtggtgtggccaccgtccgtgtcctctcggccttcctccgagtccaggtggactctgtggatgtgtggatgtggcccgagcaggctcaggcggccccactcacccacagcatccgccgccaccccttcgggtgtgagcgctcaataaaaacaacacactataaagtgtttttaaatccaaacagaagtattgtctttttatttaattttattgcatagaatgaagttatgcagggttcttctttggaactaactgtttgagaaatgtgtgtccttctttggcagcgtgggggtatgtgtgcagcatttctgtccccaagctgctgcccgctgtgtttctgtagaagtagcccatcagatacaccaggtaaggtctgggaaaagccagaaccgaggccacctctgagaaagaaaattgcaaggaagaaccaaaattgctgccatccagtaagcctggtttaaagtagcttcaaattcactacagttgaagaaatacgtgcttgctttctaaggcttttgaaaaagcactt

SEQ ID NO: 7550 - DNA, 1377 bp, Homo sapiens
ccacgtcacttgtgtttatttgttctgtaaatgctgcgttcctaatttagtaaaataaaagaatagacactaaaatcatgttgatctataattacacctatgggatcaataagcatgtcagactgattaatgtctactgtgaaaatttggtagtaaattttcatttgatattagatataaatatctgaatataaataattttaatatactagtcatgatgtgtgttgtattttaaaaattatctgcaaccttaattcagctgaagtactttatatttcaaaagaatgaataacattgataataaaatcgctactttaaggggtttgtccaaaataaatattgtggccttatatatcacactattgtagaaagtattatttaatttaaatggatgcaggttgtctactaaagaaagattatatataactatgctaattgttcataatcaacagaaaccaagatagagctacaaactcagctgtacagttcgtacactaaactcttcttgcttttgcattataaggaattaagtctccgattattaggtgatcaccctggatgatcagttttctgctgaaggcacctactcagtatcttttcctctttatcactctgcattggtgaatttaatcctctcctttgtgttcaacttttgtgtgcttttaaaatcagctttattctaagcaaatctgtgtctactttaaaaaactggaaatggaaaaaaaaataaatctttgccaaatccttcagattactgtatttacatatggtttaaaatcagacgtcatgatagcttcttaatgaaaccaggactggtccctattttgacattatctttcctacagcaaactttttagaaaggctgcctgccgccttgatgtttcacctttccacgcttaattcgggtgttaaatctaacgttttcatttgtaaaaatctttgttgatgctaccttggaagcagtcatctctcagtcttacatttggagaatgtggatggcatgacatcagaattcctttatataatttaacttcagaatagtctgagatcatcgaagcacgatggtcaagggaattccgtttttgttttagagcaaatatgtttgctgtttgtctttcatcacaaacatcagtggagtttcagcaccttacagagctcagtgaaccccctggtcaccatcaaagttagcacacaacaaagccaaccacgtgtccccctcacagatgacaatggctgaactctgagtgaaaccacctgtatggccgggcacagtggctcacgcctgtaatcccagcactttgggaggttgaggtgggtggatcacctgaagtcagaagattggcctggccaacatgatgaaaccccgtctctaataaa

SEQ ID NO: 7551 - DNA, 2009 bp, Homo sapiens
aacctcatgcccatgtgcacaagtgttgtgtcgtgcagtgacgtggtggtaaatatgactcctccctccagttcagcttttacgcagcttttcctggtgcgtttgttcctttaacaaattacgaattccgtgacagggaagagatgccagcgccacgagaggacacttcgtgagcctccctgtagccgtggaccgaatacgcactcttgaaagctgcatcgagaacccgcccaagcgccacctgctagacggccagccccacacttcgcttcagcctccggaccattccggagcagcctcacatacctcactgtctcgtctgtctatgtgacattaagtagaaatattggttttttttttttttttttaaataagtcacagtcctgttgtcaaaactctaatagacagcaaagagggtctgtaccgtagacttcacagttttcagtttttaatgattgccagtggaggggcttcttcagcacagagaccccccactgtgtccagggaccccctctgccaggtggaggtgtgtccaggggctggggaagccgagacgggcactccctctgccggccggcagcgtggccctgagcatggcaagggggtctgtctctgccgatgctccttccgcggcactgactctgcgccgtgtcacatggtttttgaatcacactgcagctgctttccatttttatatatatataaatatatataaatatatactttttaaaaataatttataaatcttaccaaaacttatgctaaatatactttccagtatgaacgcacaggagagtcccatcagcaggcggcattggagtctaggagctcagctgtgtgtccatcaacacacaaattcgtaaaaaacacacatggcctcgccatcgtgggtaaaatcggccccacagcacgtctgcaccagcgggccgttactcccatgccgttcttctgtgtaatattaagaactgaatgtgaagtttatagctagcctgggtgtaccttttaagaattttgtaaaccgtttgtctgtcttttgttactgttttatggtgccaagtatcctacgttacaacaataatatcatgggagaaatagaaatagcctagtttgcttccaatagaaactgcttttaacatgggctgtatataaaaatattaaagagaaacaaaactgtacatttcctcattgctccgctacagacaacccatgtcataaccttgttgcaaatatttttctcctatagcagtaagtacagcattagaaggtgattagagagtctgttgatgaaacacaaatgtatgttttattgattttactttagaacactacagagttcctggaccgggtgaaggcattagctgggtgtttgtgtgggataaatactaccactgcaagtgactgctgtccgctgcggaatctgttcttggtggaagcacaggtccgtgtcgctgctgtggttgccgctgtccgcggttcaacacggagtccgccccgcgggtttcagctgttggtcgttctgaggggcctttggaagtgaccggtctggttcctaagcaataaaattgaccgtggtgaaaatagtcccgtgttgctttttcttcctttcccttctcctgccacctttgaaatgctaactcaggggagcggcctcctgtatagcctgttatttgagatcaagctcattagaaatcctggaatttcactgtatcacacgctgtcacaaaacactaagccgttcattgagaggagaaacacagccttttggactttctactgtaataaaggatttatccctcaacattttaaaacgggattatatcaacgctttgccttcctcaaaactttaagaagcccctctgctctgagctgagaggggctccccacagaaaagcgttgcttctgcccttcgagttgcttccttgtaaagaaggctgctaagagcctaaaacaaaacgcgccgagtttaagccctttctatttccctttaacgcttccgcaaatgccaagag

SEQ ID NO: 7552 - DNA, 1192 bp, Homo sapiens
gtctttgctctgcgtcttcccggccgcagcgccaggaccgaccccttaggacccggcgggcggggcggggcgcgcggggcggggcggggatggtgggagggtcgcgtagacccggctgggacggagggacggcggcgcgggatgctcagaacgcgtgtgggcggcccgggcggcgtctggccctctccccatcctcgcgcgccgcgccccagccccgggatgctgctccggccccgcaggccgcccccgctcgcgccccccgcgccgccctcgcccgccagccccgaccccgagccgcggacacccggagacgccccggggaccccgccccggaggcccgcctcgcccagcgcgctgggggaactcgggttgccggtgtccccgggctcggcgcagcgcacgccctggagcgcccgggagacggagctgctgctggggacgctgctgcaaccggccgtgtggcgcgcgctgctcctggaccgccgccaggccctgcccacctaccgccgcgtgtcggccgcgctggcccagcagcaggtgcgccgcacccccgcgcagtgccgccgccgctacaagttccttaaagacaagtttcgcgaggcgcacggccagccgcccgggcccttcgacgagcagatccggaagctcatggggctgctgggcgacaacgggcgcaaacggcctcgccgccgctccccggggtccgggcgcccccagcgcgcccgccgcccggtccccaacgcgcacgcgccggctcccagcgaaccaggtaggcgggggactggggggccaggtggggccgaggactgcggaggaaccgggggctgccgagggctgcgggggaggggcgggcgcgccccgcgaaaatccgcccgaccgcctgctccgcgttcccagacgccaccccgctgcccaccgcccgcgaccgcgacgcggaccccacctggacgctccgcttcagcccgtccccaccgaagtctgcggacgcctcccccgcccccggctccccgccagctcccgccccgaccgccctcgccacctgcatccccgaggaccgcgcgcccgtccgcggccccgggtccccgccgccacccccggcccgcgaagaccccgactcgccgcccggccgccccgaggactgcgcgccccctccggccgcgcccccgtcgctgaacaccgccctgctgcagac

SEQ ID NO: 7553 - DNA, 1104 bp, Homo sapiens
catcaagtacacaggctatgggaatgctgctggccttctggctgccaggggcctcatggcaggaggccggcccgagggccagtactcagaggatgaggacacagacacagatgagtacaaggaagccaaagccaggtgtgtacccccaacacaccctcgggtctccactcacagccccatagtccctgcttccacacccatgtggacccctgtagggtgggacaggatgacaaatgggcaagagcttccagaatcaagcacctgttcctaagtgctatctgggataccagaaggtggcagatggcaggagctggttacctgtgccgcttctggagggaggcctcttcctgcagttgccttgcccacctcaccccactgggaaaataggtggcttgcctcctgtcctggagagtcactaatgcattccccacattccacccactgggaaacagcataaaccctgtgaccgggagggtggaggagaagccgcctaaccctatggagggcatgacagaggagcagaaggagcacgaggccatgaagctggtgaccatgtttgacaagctctccaggtgtgtggcatgaggaggaggggcctgcagctgggagaagggagagctgacccacatcctgtcttgtgagccccaggaggtaggatcagaggagagcttaggatcctggtattaggttgcattgctcacgtttgaaatcacttgccctggaggaaatcccccaggggatgggtatattgagatcagtattgtgccccttttacagatgataactgaggcccagagaaattaagagactgtctaaggccgggcgtggtagctcacgcctataatcccagcactttgggagactgaggcaggtagatcacaaggtcaggagatcgagaccatcctggccaacatggtgaaaccccatctctgctaaaatacaaaaaaaaagttagctgggcgtggtggtgggcgcctgtagtcccagctgctcgggaggttgaggcaggggaatcacttgaacccaggaggcagagcttgcagtgagctgacattgtgccaccgcactccagcctggcaacagagtgagacttcgtctcaaaaa

SEQ ID NO: 7554 - DNA, 1176 bp, Homo sapiens
aaatttgtcaattgcctgttaatgtcttttgcccatttttctactgtgttgcttgtctcctgactcatttgtaagtgtttttatatttccttggtcataattgctggtgggttataaatgttgtaaatattgtttcccagtctgtagcttgtctttgtacttttttctgtgttttggattaagttttccattttaacgcggtcacattcatcagtctttgccttggtagttgatgcttttcatctcacaatatattactttaaaaatcttagccaagcacagtggcttgaacctgtaatcccagctactacagaggctgaggtgggaggatcacttgaggccaggagttcaagaccaccctaggcaacagagtgagaccctgtctctaaaaaaataaaataaacttttaacttaaaaagagagatgattttccttcctgtgtataggaaacaattgaagatgttgaagaaatgctcaacaaccttcctggtgtgacatcggttcacagtcgtttctatgatctctccagtaaatactatcaaacaatcggaaaccacgcgtcctactacaaagatgctctgcggtttttgggctgtgttgacatcaaggatctaccaggtaacctaggccattaaatccatgtcacacaggagcatattctccaaacttagcatctgtgagttgcttgaggtgacagttctcagaaattactaaggtggggctgggcacggtggctcacgcctgtaatcccagcactttggaaggctgaagtgagtggatcacctgaggtcaggagttcgagaccagcctggccaacatggtgaaaccctgtctctactaaaaatacaaaaaactagccaggtgtgatggtgggtgcctgtaatcccagttactcaggagtctgaggcaggagaatcacttgaactcgggaggtggaggttgcagtgagccaagattgtaccactgcaccccagcctgggtgacagagcgagactccatctcatccaaacaaaaaagaaattactcagatggattcatcctgttttgaagaaaaaaatgggaagatttgtgtaacctttagtttctacattatatttgtctccagcatttaatttacatgaaaatgaggctaattcctcctcgctccttcactgtcccttctccagtccctcactg

SEQ ID NO: 7555 - DNA, 1305 bp, Homo sapiens
ttagtttcatttggatggaagccatttgggaagacagcattattagacaagaggttttggagaaggaaatactgctgttgggtttttctaagagcctaatttaatgcaagcctagggtttgaaccctgcatttaaaagcttatgatgacaatggcactggttgtgctgacggtgccttttaatcttaagataggagctctgatcagatacgttcctggttctgtgatttgagctcacgtcgctcttacatttgctggaaatgcgatcctgtggatttcctctgtccttgtctgctttctttcatgcaagttttttctaacgttcctgtgaaaagaattaacccggcaagtcccgtcccactcccccagctcagaggtcctttttactagagctgccctagagagttagctggagatgtagagtcaccccatcaggtgctgtgccggccgctcggcctgtgtctcctgcgtgtcttaacgtcccttgtgtccggatttccatttcagatcaagggaatgaaggaccgcctggagttctggtgcacggatgtgaagagcatggagatgctggtggagcaccaggcccatgacatcctcacctagggccccctggttccccgtcgtgtctcctttgactcacctgagagaggcgtttgcagccaatgaagctggctgctcagacggtcgacattgaatttgggtgggggttgggatcctgtctgaagtacagactgttcttgctctaaaaacaggactgtccctgatgggagccaggccacagggaggaggcttctttgtgggtctctcctgcagagggtgggggtctcagggtcttaggtgatacgggagagaaagaacgtgccaggcaggaggccccctgaagtctgtgtactccgaggtggatctccatccccatccacctgtacggacatcttttccgttgcggtttgagaatgttcctataataaacccctctgctttgttcttcttgtggctctgttttcttgggcttagcttccaggccaagcctgtgcctggaggttaaaaagcatgagttggaaccttgggaagacacggtgggggtagccttggcccttctcctccctgcacatacagtagacgggcagaatccagcaccaaggactaacgaagacgctggtcctatctttattgttagtcaagagagacctaggggtatccactcccttctccagccctctcaggtacctgccccgacacaggcatccatccacatccttgtcaccactcatcattcaaatagccaccagcatctgtgacctggtgt

SEQ ID NO: 7556 - DNA, 1236 bp, Homo sapiens
gaggcccgcagggtccccccttccctccacctggaggcctcctgtgcagctgtagcgggaacgagcagccgagggcccagagggatccgcctcattgtggggagaggcagcggtcgggtggtccactcctgccccagagaggccatagcttggcaacccacctgccttcgcttctgcctccccaggctcctttcttcacaccctggagggcccccgcttccgggcctcccagtgcatctatgcgcatcgcacgctgccccacgtgctggctttccgagtgtccatcgcccgcctggccccggggagcgggcccatcacgctgctcctgcggtcagccttctccccagaaagcccagacctggacctgcatcagggtcctgacttccagggagcccggtaaggagggggctggatttgcagccagggagtccagggagggagctcatccctgaggcatggccacgctctcacaggtacctgtatggccacaccctcacccctgagcagcccggggggccacagcaagaggtacacatgctgtggacaccagcacccccagacctgacccttggggaaggtgaggaggctaggacgtgggacttcctgacagcagtgggcggcagccaggctgaggctcaggcctgcctcactgaggccctgcagctgcaggccaggggagctctgtatacggctcacgcacaggcctgggcccagctctgggtagaatgtggcttggacgtggtggggcccctgcagctgcgccaggccctgcgtggctccctctactacctgctcagtgccctgccccagcccaaggccccaggatacatctgccatggcctcagtcctgggggcctctccaatgggagccgtgaggaatgctactggggccacgtcttctgggaccaggtgagcactgtacacccagcaccagccacacagcaggcgacacatggaggtccacggtctctgccctccctgggaccagggctatggttggggaagcacagggactgtggcaaaagggaagaggcctggaaggtgtgcaggagtttggtagaggagtgatctaggtgaggggaatggaaggtgcagagaccagagctgagagggcctgaggcactttccagagcgtggggaggggcctccaccaaggcgagaagggctgcaggtccagatcaccagcgtttgtagacagtagtgtggcgcttggagtttacctgagggccagtggag

SEQ ID NO: 7557 - DNA, 1209 bp, Homo sapiens
agcacagaggccattgggaggcacccacagaggtctctgcaatcaagagggggttcacatgctgtgggcttctggaacagaggtccctttgacttcagctcctggctggcagggtggggggtgtctcagcaccctgggggaccctcacccatagagagctctgataggctgacactggcctgggatggcccccgggtccatagctggggccccaaggagtatctcctcaggccacacccctccatccagattttgggtgcagtaggggccttccaggtgcccagggtgtgggtggggaagggcccccaggccccgaggacacatagagatctggccctgtggtctggtctctctgcaggcccgagatcagaaggtggttggtgacctggaagcggcccggcgttttggctccaaagccaagtgctacaacatcctggccgcgatgtggacgctggtgccgccactgctgctcctggggctggtggtgactggtgccctgcacctggcccggctggccaaggactctgccgccttcttcagcaccaagtttgatgacgcggactatgactgacaggctgggtcctgatctggggcactagccccaggacactgaccccaggctgctgcccctggggcccaatactgactccccggagcctggccctccttctgtggggcctccatccctgccccatcctgatcctggggccctccagccccaacatgggcacctaaggctgaaccagtcagaccccggggtcttcaccctaacccgagagttcccgggccctaactctgcccccgatcctgcccctccctcctcacactccaggcccctcggttccacgattaaaagtgcctggttccagaaagtgcctcctggcctctttcctgcctagcgtgggggaaggagctgccctagggaccaccaaagccaaatgccacagggccagcccccagagtcagtggcgggagcgccccccgcagctcagcagccctgcttggccccaactgtccccttctctcagccactgggcggcctgtggcttacggggcggaggcccagagtattttagactaagtttgagagcccaggcctttgatctctgctgctctgtggtttagcggcctgtgctccagaacatcatgggtgcgtcccaaccccacgtgtgtccaccccatctctctgtgcgcatgtgtgtgcgtgct

SEQ ID NO: 7558 - DNA, 1193 bp, Homo sapiens
cctcccacctcagcctcccaaagtgctgggattacaggcgtgagccgcggcgcccggcagaggtgagggctttgggggaacggttgtggggcctggagtgtggaggcgtcagcgcaggcctggcaggagccctgaaccgggacagtggggtcctgcagctgctggcctggggtgtggagacccccaacacaggggaagtctccaggaccccacaccactaacaagatgagccttgtgctcccttgggctctagagaggaagcccctcttagccctcagcccctctttcctccctctcctaaagtaatttgatcctcaggaatttgttccgccctcatctggccccggccaaatcccgatttgacaaatgccaggaaaaggaaactgttgagaaaccgaaactactggggaaagggagggctcactgagaaccatcccagtaacccgaccgccgctggtcttcgctggacaccatgaatcacactgtccaaaccttcttctctcctgtcaacagtggccagccccccaactatgagatgctcaaggaggagcacgaggtggctgtgctgggggcgccccacaaccctgctcccccgacgtccaccgtgatccacatccgcagcgagacctccgtgcccgaccatgtcgtctggtccctgttcaacaccctcttcatgaacccctgctgcctgggcttcatagcattcgcctactccgtgaaggtgcgtatggccccagggaatgctcagagggtgccgctgagcctggagctccacctgcccacatgctgcctggggtggggacttgtgtgtccctgtgactgtgagtttgtgtgcacctctgtcccgtgtgtgcccacgtcagtggctttgtctgtgtgatctgtgtgtgtgtgtggcttggggaatctgcccagtgcaggtttaggaggaggctccaggaggctggctggctggctcagagtctgtccccggctatccactagcccagagcagttctccctatagcccagtaagaaattacaccttcaccttccagactggcacccaggctctcccagaaagtgagaagggaactcacaggtgacttcaccccatggtggggagaacagcctgtgctgaggtcaaggcagaaggaggatgagccccgaggctcctggagagtctgagcccgggtgaggaaggggaggaggtg

SEQ ID NO: 7559 - DNA, 1792 bp, Homo sapiens
gtgagtgcggctggagaccccgtctcccgtccgggactccgcggagccttctccagccccttgggaggccgccccgggaggtccgcgccctgagccctgcgcccccccaccccccaggtgtacctgtccttcgtttatcccaacgactacactcgcctcacccacatggagacggacaacaagtgcttctaccgcgagtctccgctgtatctggagaggtgggcgcgcggccgggctaatgcggggcggggtgggcggggcgggactcggctctgatgccccgccgcgccccaggtttgggttctataaatacatgaagatggacaaggaggagggggatgaggatgaagaagacgaggtgcagcgccgagccttcctcttcctcaacccggacggtgagtgtccgcagcgcccctggcccgcacccacctgcgcagggagcttctaacccgcgtttcccgcagacttcctggacgacgaggacgagggggagctgctcgacagcctggagcccaccgaggcggccccgcccaggagcggcccccagtcccccgccccagcagcccccgcccagcccggagccaccctcgccccgccgacccctccccgcccccgggacggggggacccccaggcactcccgggccctgagctgggccgccagggccgcccgccctttgccgctcttcttgggccgagctccgcccccgcgccctgcagtggagcagccgcccccaaaggtgtacgtgaccagggtgcggccgggacagcgggcatccccccgggccccagcgccgcgtgcgccctggccgcccttccctggcgtcttcctgcaccccaggcctctgcccagagtgcagctgcgggcgcccccacgcccaccccggccccacggccgcaggaccggcggcccccaggccacacagccgaggcccccagcccgggcgcaggccacccaagggggccgggagggccaggcgcgcacgctgggacctgcggcgcccacagtggactcaaacttgtcctccgaagcgcggcccgtgacctccttcctgagcttgtcccaggtgtccgggccgcagctgcccggggagggcgaagaggaggaggaaggggaggacgatggggccccgggcgacgaggccgcgtcggaggacagcgaggaggccgcgggcccggcgctcggacgctggcgtgaggacgccatcgactggcagcgcacgttcagcgtgggcgccgtggacttcgagctgctgcgctcggactggaacgacctgcgatgcaacgtttcggggaacctgcagctgccggaggcggaggccgtggacgtgaccgctcagtacatggagcggctgaacgcgcgccacggcgggtatgggggcggccgaacgcgcgccagggcggttttggaggcggggacagccggggagaggaggtcctggccttggcggactcctcagaccttccccagggcccagtggtgtaccggcctgggggctgaggcaccgcgccccaccccagggaagccccagcttctctccttccttcctggcgtcctgactgcccgggcacttgtccagcctcagggacctccctggagccccacccagggctggcgccccatccttgcacctgtgtaccccacttctgtcatcctggacctgggcccagggatgagtccaagctgcagagatcagcgtcagtcgcatccagttgctgcgcagacagccccattccgggggggccaggcagagacccttagggcaaagctcaagacccctgggcccctcctc

SEQ ID NO: 7560 - DNA, 1200 bp, Homo sapiens
ggacgggcagacccacggctcgtggctcactccagctagcagcggtcactctgcaggcctctgctcaggccccttctcagctcttggtgtcttgggctgctgcactgaatctcagatgttatttcatgaacccaaagagttgttgtctcggcttgtcttgcgcagtgaaaagcgcgtgttttacgtgtccagttgctcttaatagcagatacctgccctggacgccagtggcagcatgtgccctctgagcagcggccttcagcttcccaggaacacggggctcttcctgtccagcctcctgggggctggtctcagccctgactggccagcagacgcagggtcatctcggagttacccagctagggactcgcagccagttgctggttgggagttggagagtggagtttaagccctctccttgacgtagagaggatttggggcctgttacgtgagtatttagcaatgctgcccaagctctgacaccatgcttatgcgtttttggatttcaggcgagcccacaccttaaccgtgctcttcatcctcacctgtacgcttggctatgtgacgctgctggaggaaacacctcaggacacggcctacaacaccaagaggtaagctgccctcttgtcctgccttctgaaactgccctgtgccccgtgtggtgggtgtggcacccttactgctcgggctgccgggggctcagaaggccttcaccagagggctgcgtggggccgccggcctctcccttgagtgtgtctgatgtgcagactccagggctgcccttggtgctgcgtggcgttcccggtcagcccccgtcgcctgtcactgggagccaggagtctgtgtcatctccacgtgaccggcagcctgtgctgcgtttcctctgagttttgcatgttgaggttggaacgagctgcagcagctacagggctgagcccttgagtttgggcgtctccgggggtgaggttcctgcggtggccgcgtgctggttccgttagccagcggggctcttgcacggacaggggccgacacggaccgcagaccatctggtcagcagccaagcgagtaaactcgtcttctcaggtttatctccacaggcaggcaggctagaccttgggtgtgtcctctgcctgaattccatggattctgacgccagtctcagaagtgcgtgtggaagagaagctggttttagagcctgtg

SEQ ID NO: 7561 - DNA, 1120 bp, Homo sapiens
gcgtggcctgcgtcccatactctggctgccagccgggtgggggctgcacgcacccgtgggcagggccgggcgtggccggcgtcccatactctggctgccagccggggtgggggctgcacgcacccgtgggcagggccgggtgtggccggcgtcccatactctggctgaccctggcgcccacagaccctgatgatccgagactggtggatgtgcatgatcatcagcgtgatgttcgagttcctggagtacagcctggagcaccagctgcccaacttcagcgagtgctggtgggatcacgtaggtgccagcacagcccccggggcagtcggtgcaggctgaggggcattctcggaacccctgtgcccagcgcggcccctggaccccctcattctccccggggggcagtgggtgcaggctgaggggcattctcggttcccctgtgctcttccggggtcctcctcggggggctcgttacccctcacccctgcaacgagtgctggcccctccctgcagtggatcatggacgtgctcgtctgcaacgggctgggcatctactgcggcatgaagacccttgagtggctgtccctgaagacgtacaagtggcagggcctctggaacattccgacctacaagtacgtcgtgggggctgcgagggcagggccgggtgggggttacctggaggcagcctcagcgtccgtgctccagcagaccccgagcaccaggcccgtccagtgtgcggctcaggaggggtgaccgtggggctttgcctcctggaacctccctctgacctggtgtcactcaagcccggccgcccctcacagtggccatggcgtctgacccacgtacctccctcctcaatccctggccggcctggcgcaggggctgtgggatcattccgtgcttctccctcccttggttgctttggttatgaaatagttgcaggtactttgtcattatgactttggaatttaaaaaagaaacagaagtctaaggaaaggcctgggggacgggggtctcccctcctgcctgtgggtgccccggctctgcctggctctgcagacatggctagctcacggcaccgtggagcgccctctgaggcgctgcagccactgctcaagct

SEQ ID NO: 7562 - DNA, 1400 bp, Homo sapiens
ccacggctgccgtcccagggccagggtacccggcacccacccagtccattccggacctccacagggactaggtgccagctgtccatggggcctgcagtggggctggtgtgggggcaggtggtgacgctgcatcccgctccccagggacatcacattgaggtacaaggagacccggtggcagaagtggcagaacaaggatgaccagggcagcaccgtcggcaacggggaccagcacccactggggctggacgaagacctgctggggcctggggtggccgagggcgagggagcaccaactccaaactgacctgggccgtggctgcctcgtgagcctcccagagcccaggcctccgtggcctcctcctgtgtgagtcccaccaggagccacgtgcccggccttgccctcaaggttttttgcttttctcctgtgcacctggcgaggctgaaggcgaggggtggaggaggccccagcacagcctcatctccatgtgtacacgtgtgtacgtgtgtatgcgtgtgtgtacgcgtgtgtacgcgcgtgtgtacacatgcgtggccgcctgtggtgtgcacgtgtgctctgggctccgaggcttctccagagctgggagctggctggcgtggcaagggcatgctctggggcagtgtgtccctcaggaaccagggtcctccctcccctttctgcctggtcagccccgtggcctctggcccaccaagctccctgtcacccagccatggtgtggtccaggcagggacatctcggtaccctttctgcactccgtgggccctgggtgcgctgaggcctggaggcgtctacactggctccacatccacttcccccgcagctcgtgtgggcgctcgtccacaaacactccgtggctgagaggcagcggatccaggcagcgatgctgagccacctcctccgagccttcctttcacacagaccaccccggaggacacgtggatgatggggtcagagatcactgagctgcccctcaagggggcctggaacccgggtgctggggtcatgctgcctccgtggctccaaggtgagggtcatcttcacgagcaaagagaaccaataaagtgacaacgaacgtctgaggcttccagccctccccccagctccccgtgtcctgctttggggtccagtgcagccctccagcctgccctcatgcccagtgcccacttggggaaaaccacacagaggacaggaggcactcagcctctgcacctgagcaaagacttggcgcctgccccgccccaccccccagagagagcaggtgccagatgcagcccctctcccattctccaggagggtccaggtggcacccaccctctgctgcgcttgtccaagggctggcggccactgggcagtggacacaggattcctggggtac

SEQ ID NO: 7563 - DNA, 1214 bp, Homo sapiens
agtcggggggacataggctgaccttctcctcttcttcccaggccagactggccgctttgtgcttgtgcagcggcttcgggagaaggagcggcagttgctgccacaagagtgtccagtgggcgcccaggccacctgcggacagtttgccagcgatgtccagtttgtcctgaggcgcacagggcccagcctagctgggaggccctcctcagacagctgtccacccccggaacgctgcctaattcgtgccagcctccctgtaaagccacgggctgcgctgggctgtgagccccgcaaaacactgacccccgagccagcccccagcctctcacgccctgggcctgcggcccctgtgacacccacaccaggctgctgcacagacctgcggggcctggagctcagggtgcagaggaatgctgaggagctgggccatgaggccttctgggagcaagagctgcgccgggagcaggcccgggagcgagagggacaggcacgcctgcaggcactaagtgcggccactgctgagcatgccgcccggctgcaggccctggacgctcaggcccgtgccctggaggctgagctgcagctggcagcggaggcccctgggcccccctcacctatggcatctgccactgagcgcctgcaccaggacctggctgttcaggagcggcagagtgcggaggtgcagggcagcctggctctggtgagccgggccctggaggcagcagagcgagccttgcaggtgagcccggggacctgatcccctgtcactcccccacccctgatatgggcagatacggggatcacagggtcccactcgggaggcaggtgagcccggggacctgatcccctgtcactcccccacccctgacgtgggcagatatgggggtcacagggtctgactcgggaggcaggtgagcccgcggacctgatcccctgtcactcccccacccctgacgtgggcagatacgggggtcacagggtcccactcgggaggcaggtgagcccggggacctgatcccctgtcactccccaacccctgacgtgggcagatatgggggtcacagggcccgaccagggaaagtgctccctccggagcacaagggctgtggagcccagtggctgtgcctcctaaggatctcatgtgtccccaggctcaggctcaggagctggaggagctgaaccgagagctccgtcagtgcaacctgcagcagttc

SEQ ID NO: 7564 - DNA, 1182 bp, Homo sapiens
tcaggcactgtactttgtcatccacagagtggctgttgaagcagctctccgggtgtggaaaggcgaggtgtccacctcaacaggcagacaggagtttaaagcgcacgacctcacagaaaaccagttgtgataaaaattaaaccactgacatttaagaagagtgggtgggaaatgattgccattgacttttttgttttttagctccagtttcttttcagcgaaactcaggcagtctgtccagaggggaagaaggattcaagggctgcctgcagccccgagcactgccctccgggagcccggcccaaggcccgtcaggaaacaggccacagagcacagggctcagctgtcaaggcaggtcccgcacccccgcccgcaccgcgggggcgcctgtgaggctggacttgccagcagcccctggggcggttcaggctcggaacttgtcaaatgggagtgtgcctggcttcagacagagccacagcccctggttcaacggcaccaacaagcacaccttgccccttgcctctgccgcgtctaagatctcaagcagagattctaagcccccatgtcgcagtgtggtgccggggcctcccctgaagccagcgcccagaagaacagacatctctgagctacccaggataccaaagatcaggagagatgacggtggtggcagacgggatgcggccccggcccacgggcagagcattgagatccccagtgcctgcatcagccgactgactggcagggagggcaccgggcagccagggcgaggcacacgggcagagagcgaggccagcagcagggtgccccgggagcccggggtgcacacgggcagctcccggcccccagcccccagctcccatggcagtttggccccactgggaccatcaagagggaaaggggtcgggtcgacctttgagagcttccggatcaatattcctggaaacatggcacattccagccagctctccagccctggcttctgtaacacgttccggcctgtggacgataaggagcagaggaaggagaacccctcacccctcttctccatcaagaagacgaagcagctgcggagcgaggtctacgacccatccgaccccaccggctccgactccagcgcccctggcagcagccccgagaggtctggccccggcctcctgccctctgagatcacacgaaccatct

SEQ ID NO: 7565 - DNA, 1163 bp, Homo sapiens
accagcactttgggaagccgaggcgggtggatcagaggtcaggagatcgagactatcctggctaacacgatgaaaacccgtctctactaaaaatacaaaaaattagtggagcgtggtggcaggcgcctgtagtcccatagtcccagctactcgggaggctgaggcaggagaatggcgtgaacccaggaggcagagcttgcagtgagctgagatcacgccactgcactccatcctgggcgacagagcgagactccgtctcaacaacaacgacaacaaaaaaacaagacaaaaggtgcaggtgacacccagttcctgtgaactgagctgaggcctgggagaggcacgggacagggctgcgcccaggaaccatctgggggtgaaaagccatcgtgacccacgggacaggagacaagcgagaagaagcaggagggaggcagggctgggacgtgttcctcaagttgccaggttagcttgggacttgtagatgaaggctctggaagtgggtaccagaggtgctcagtgtgggacctggttgagcttgcactgcctgtggacagcgggtggagagatcacgtagggggtcagaggcacaggctgcaaaggcagacccgtggtggacctgtcagggccaagtatgtgggtgggtgagatcacatgagccgctggggcgctggtgctggtggaggggttgaggaggcgccaggaggtaggcaatggcagaggtgacgttcccacctgccatcatcatgactgctgcccttccttgcaggcggccggggacggtgcatcaagcagggggagaactggtacagtcccaccgagtttgaggccatggcaggaagagccagcagtaaggactggaaaagaagcattcgctacgcgggccgacccttgcagtgcctcatccaggtatcgtccgtgacctcacctgtgctcagcacacagttcagacgtggggccctctgaggcggcccagccagagggagggcacagaccacggggtcagacaaatggggtttgcagcctccacctgctgtctgtgtggccttgggcgagtgatttaccctctcatgtttcagtttccgggtctttcacgtggggatgacgatgatcgtgaccctgtgaggattgttgggagaagtgcatgaggtcacagcgcctgg

SEQ ID NO: 7566 - DNA, 1190 bp, Homo sapiens
ttggcatcccacagtgctgggattacaggcgtgagccaccgcgcccggctgcaaacaggcatttttagggcagtttggtgagtgctgggttaatggtatggtcaggactcattcaaccagtatcttttaagcatctgctgtgtgccagagattgccctggacacaggacattctagaactctgggtgacagaagagccacttgcttggcctaggagcatcacaggaagactttgcagaggcagagaggagggtgtgggggtgttggcggcagaaagtgtttctctagaaacactccagcatgtagaggctggagctgcaggacctatctgggatgacaggggcaggaggtggggtgcagctgacctctgtggtaactgccctgtgtgcagatgctgctgaagggcctgtctgcatgccagggggctgagttccatgttgtagggggtgcggtggggtggcaccaagggacataggcaggttagatgtactttttaggaggaaggggtcagagaccaagggcaatggctgtgagcatggggccgaggtcacctgacgatggtggcctgacccctgcggtggaggagaggcaggaatggagctacaagagtgggtccaggaggtgtcctcacctgcggggaggccgagagctcctcgtaggcatagggcacacctgaccagcagaacccacagctgtgccgcagaaggagatagaagccccgtggtggtttgatagagctggggctggctggggtggcgggtttgttgtatgcattttttactgcacgtaaaaggctttactggggaagaatagatttcctctctttttcctggaagagccgaatgacttagacaatggaatagaaatgtaggtcgagcgtgttcatggaagtgttaagatcttcctggttacaagggcacacacctgagggggagtcactttgtttgaagcacctgagcgaggctgttcgctttgtccattctggcttttgttgcttgttaaatgaggctccttctgttgcagaggtgaccacagtgacagtggccaacgtgggggctgctgcagacaatgtcttcaccacgtctgtggcgaacgcggcatccatctcaggacatgttctggtaagctgctccgaggggcacagcccagggcgggtggtgccacgctgggggcctccggcttccccgaggc

SEQ ID NO: 7567 - DNA, 1214 bp, Homo sapiens
tctttccaggggtaaagagtgtcactaaaatctacaactactacaagaagtttagctacaaaaccattgtcatgggcgcctccttccgcaacacgggcgagatcaaagcactggccggctgtgacttcctcaccatctcacccaagctcctgggagagctgctgcaggacaacgccaagctggtgcctgtgctctcagccaaggcgggtgaggccccactgcccagctgtggctcctgctcgggcaaggccagcactgccgtgccacgctgccctgtgggtgatccctcccacctgtggggcgagctcatcttgggagacatgagggtgaagtagacctcaacggagggcttggctttcctaacacatctcactcaagtcatcagccaaggctctgtgggctgaaccccacttccagcgtgagccttgctggggccaaggcctggccctggtgggagatgcttgggtgcagcagttcaggccctgagcccaaggggccaaggtgggcagggacatggagcaggcatggaaggctggttcttgtcccccagcccaagccagtgacctggaaaaaatccacctggatgagaagtctttccgttggttgcacaacgaggaccagatggctgtggagaagctctctgacgggatccgcaagtttgccgctgatgcagtgaagctggagcggatgctgacagtgagtgttgtgtgtgggtacctacatatgccaagccctatgagagcccgggcctgggcgtcggggttcaagctgggcagagttaaaactttggtgagaccccaggtctcattcacgtgctgtccagcaagtggggcctgttgaggccatcccagggtggagggtgcatggcacccaggggtgcccccaggatgcttggtgggtcctggctcctctctggcctgtgtggtgactgtggtattggccaccctgtggccgtggcccccacacagagtgcagaccccacaagggcctccctccttccacatggtgccttgtgaggcttcaaggtgcagaaggtagggtggggagacacagctcgtgctctgtttgtttctaggaacgaatgttcaatgcagagaatggaaagtagcgcatccctgaggctggactccagatctgcaccgccggccagctgggatctgactgcacgtggcttctgatgaatcttgcgttttttacaaattggagcagggaca

SEQ ID NO: 7568 - DNA, 1673 bp, Homo sapiens
gggagctggcccgtcctcctgtagtggccgtgtcgctctcagggacaccccatgggaagatggctagactttgtcatctctccgccctccagccttagcagctgtccctgttatgagcagtgacacccccggtcccacttggttgggtgaggctccctgccctgacttgaccttcctgacccctggggtgggccgcagggcctgggcctgtctcaggagcccccaccccgctcccgcagccctctgtgtgtgagctcgtcagggcccccggcttcgcccgcctgccgctcgtggtggaggacttcgtgaaggattcgggcgcctgcttcagtggtgagcctcgagggtgccccctgcacttacagaagatggggtggggggcttccctgctgcagcctgggggagaagcctcctgggccctgggttctatagacccccatggcactgactcagacccagacaggctgacctactgctgaccctgggagcccgcctggagttcgaggctctcagtgggtgaggtggacattgcctgaggttggtgccctcggtcctccccagcaagcgagcctgacgctgtccacgtcgtgctggaccgccacctggtcacaggccagaatgccagctccactgtcccggccgtgcagaacctgctcttcctctgtggcagccggtgagggcaccagggtgggcacattcctgccacatcagagctgcacccggtgcttttgcccaagctttgaccacacgtctgtcctgcaggaaatgaacctgctgggtagatgcaccccctgagacagcccaggtgtctccagaggcagccccgtctcaggcttcagggaccccgcctcttccctcctgacaagggccctggatggcagcctggtctggccctgatgggattgttggaggcctcctggaatcagctctgagggggtgtcggctctcctggagggtccaaacccccatcctcctgcatgttctctggtaggaggcagagaaaagaccccacgtgcctggagagctgtgctagctgctaggtggtcctcgggaattccaggctgggttttctagggaggactggttgtcacgtgtggtcactgttgactagacagagtcggctcgggggtcctctgtgtgggtttgccctgctgtggcctgtctgccacccaccacctctttcactgttggtgggggccttgaggggagggcccagccggcgggagctggctcagaactttggccaaaggtgaacggaattttttaggagcagcagcctcctgccccaaggccgaccggcactggcagcactttcctgttgaagaaatcttcctggcgtgtggtttcaaagtgtaagcacctcagtgatgcaccctgtcctaagcattgagaggcacgtttacttgtgaatatgagaccatgagattctcaatgataggaaagtgctgtcccccacggccttgcacagtggcctcgggtagagcggctatcaagagcagacagtggtccagcctgctgggcacctggcctgggctgtggccctccagcgggctgccccctggccccaggttagggcgtccaggagaggcttaggccctctacttcctcacagttccccagtttgagccatcgaaggccttcttcctgcccacctccccgtctcagccacagcc

SEQ ID NO: 7569 - DNA, 1101 bp, Homo sapiens
ccatcccagcggctctgggctcactgccaggtgccccacttctcctggttccttgtggtttcccgccctgtgtccaatgcctgcctggtgccaccggaggggacactgctgtgctcctcgggtcatcctggggtcaaagtcatcttcccccctggggccactgaggagcctcgtcgagtctccatgcaggtatggccaggacagcactgagggtggcaggccgcgcctcagcccacaggcaggtgctcagggggcctgtctgccccaggtggtgcgcatggctggccgagagctgcaggccctcctgggagaaccagaggctgcagtgagccccctgctgtgcctgtcacagagcggtccccccagcttcctccaaccggtcaccgtgcagctgcctctgccctctggcatcacaggtgagaggcagccatggggcatacctggacctgtggccatagggtggagggggtctccggccaggaggcctcagctcgctgcccctcccatccccaggcctcagtctggaccgctcccgcctgcacctgttgtactgggcccctcctgcagccacctgggatgacatcacagctcaggtggtcctggagctcacccacctgtacgcacgcttccaggtcacacacttctcctggtcagtgccccccagctttctcagcccccctcccccagtctgtacagccctcctcacccccagctctcccaggtactggctctggtacaccaccaagaactgtgtgggaggcctggctcggaaggcctgggagcggctgcggctgcaccgtgtgaacctcatcgctctgcagcggcgccgggaccctgagcaggtcctgctgcagtgcctgccccgaaacaaggtgggggcacgggccggagggcagcagggtggtgaccagagggctggggtggggtgcagagctttgggtcctgagctgcacgggcttccccgcaggtggacgccacccttcggcggctgctggagcggtaccggggccccgagccctctgacacggtggagatgttcgagggcgaagagttctttgcggccttcgagcgcggcatcgacgtggatgctggtagggatgc

SEQ ID NO: 7570 - DNA, 1190 bp, Homo sapiens
cgctataagagcagtcacttccggaactgctgcccttcgcctttgccgcgaaaagtgcctgacgggggctgggaagggggagggggaaggagtcaacgactccctccccgtcgtcattggctgagcgcctcgtgacgtcactctgaggcgcctcatgcggcgccgcgcacgggtcccagagccttctgggtagcggtttaaccccgcctcttgcgtcggcgccttccttttcctccctgtcgccaccgaggtcgcacgcgtgagacttctccgccgcctccgccgcagacgccgccgcgtgagtgtggtgaccgggcccggggtgccggctggggacgcggagtccgtggggatgcggggtgggcggcggggtatttttgggacggaggcctacgggccgagccacgcgcggcctcgcccggcggccccgggatgggccggcaggaggccgccggggtaactccgccgtcgcgtcctctccgcccgcctcaggatgcgctacgtcgcctcctacctgctggctgccctagggggcaactcctcccccagcgccaaggacatcaagaagatcttggacagcgtgggtatcgaggcggacgacgaccggctcaacaaggtagcggccgcccttgccccgcagccgccgtggggccccagtgtcccatacaggcgattcttctgcctgatccggccacatgctggagggttcggggagaggctcgtttcagtctagttggcgatttcttggatagagaagtaagccgggcggaggtcgggcgcggtggctcacgcctgtagtcccagtactttgggaggacgaggcaggcggatcacctgaggtcaggggttcgagaccagcctggtaaacatgtcgaaaccccatccctactaaaaatacaaaaattagccgggcgtggtggtgggtgcctgtagtccccctacttgggaggctgaggcaggaaaatcgctcgaacccgggagatggaggttgcacggatcgtgccactgtactccagtctgggtggcagaaggagaccctgtctcaaaaggaaaaaaaaaaaaaaaagcagggtgggtacgaggcaaaatcgtgattaacaagctttggaagtttaataccagtgagctgcgtaagattgcgttaaaaaaaaaaaaaagcagtcctggcgcatggctcacccggctttggg

SEQ ID NO: 7571 - DNA, 1336 bp, Homo sapiens
gaccttcatccaggagcacctgagggtcattggggctgtggggatcggcattgcctgtgtgcaggtgagggcacatgggggtggcggtcatcttgttggggacacggggcagggcggtggctggtggccccatgacgtctgcttacgcccacccggctctgcacacaggtctttggcatgatcttcacgtgctgcctgtacaggagtctcaagctggagcactactgaccctgccttgggccttgctgctgctgcacccaactactgagctgagaccactgagtaccaggggctgggctccctgatgacacccaccctgtgccatcaccataacctctggggaccccaacctcagaggcagcttcaagtgccttttgctgcgcaccaatgcccagcaggggaggtgaggggggctggcggggcgaagtttggggggtgttttgtggggctccccagacacactctctgcctggtggtcagatgcaggttggaaggggccttgctgagtggcgcaaggccgagcgttcccagcagggggagaaacccttcacaccccaggcccttcaggaactggggccttgccttgcagccacatggccccatcccagttggggaagccaggtgagctctgacccttgggcctgggcctctgcccctcccaacccagccctcgtctccctcgacagcgcccctgctgtcttccccaccgcagtcaccaccacccgaaatgccacgtggtcactgtgcactgccctgttcatgtgcctctgcggggcagggccttcctggttttgttcactgctgtacccagatgcctacaaccatccctgccacatacaggtgctcaataaacacttgtagagcagatggacgagctcgctgtgctggtaacagatggtggtctgttctcagggccctcgcatccagcagggcagacagacccacccccgccccgcccagtgtcaggacaaagaagggcagagccaggaggacacaccccccatggggctccagggaagggaggtctgatgccagggacagctgagcacaggcctcagcagaaagaactgaacatgttcctaaatggtgagatggtgtgttcagagcccctgggggagaggaaaaatggtttccaaaacccttctggccatggtggggagcagacgtgggaagggtgcagactgggggccgtgcccaggtaagaggtgtcaggcaggtggggtgggggcagtagggtgagggggtttacatggaggagcctataggccctgctgggggccagagggtaggaggtaccagagcctggtgtctggcagaggtaccctggagatgggag

SEQ ID NO: 7572 - DNA, 1191 bp, Homo sapiens
tgggctgacagtccctttgtcttgcaggagccgcagtgggaggcacgtcgtcttctacccaaccctgaaggtgcgtgtgctgccagccgtgggaccgggggaggggtgggccatgcgacagcacagcaggcactggcctggggtccaggcggtgctgcccctcggcctggaggacatccctgggtgttggggggacaggccccagcaggtgctcacacctccatctgtgcccagtccctgcaggtgcggctggagctggcccgggagctgggcgttggggtctctatctgggagctgggccagggcctggactacttctacgacctgctctaggtgggcattgcggcctccgcggtggacgtgttcttttctaagccatggagtgagtgagcaggtgtgaaatacaggcctccactccgtttgctgtgacgggtctgctgcagtcctcagtcgggggtcctgggcaccatgtgactccccatcctcccatgaggggtccctgccctggatgagtcctagctgggggacaccctgagagctcgagcccctcccacccgggcatccgctggctgcctcctgtcagctgggcaggcggggcccacagtacctgccccaccaggacagcctggctcaggcctttctgggctgcttctcacatcctgggctggatgtgggtttggaagctctggaaccatcccggactcgcccactcctggattcgagggccctcgcagggacagctctgcccagcatcaccccagggcctggcagtgatagagctgagagctccacccccacatacctgccacccacctggccagccacagcacgtgtgtcacctgcagagagccacccagacgtccccaccgagtccagcacggcaagggtgcaggggctgccctagaaatgggctcagaggagcctggcccaccctcttgaaactggtcctggaccttggctcagctctgccgcctcaggtagcacgacccccaggccagcctggacacatcagggagcatggtgaggggcaacggcaggacccgtgggccatatcgggacaggcatttccagcgaggggtggggcagaggacatgtggctggcaggctacacccaccctgccatgcagcggtgtccaggctctggggaggccctggggaatttggaggcatcatgagccaaggcctggtggc

SEQ ID NO: 7573 - DNA, 1106 bp, Homo sapiens
aaaaaggagaatggaaaaggacttctccagttgctcttttctatagtctcacttctgggttgtaaagattcagatcagtgtaaaggtagcgtctccctctacagtgaacatgcgttattaaaccagaggcagcaagtgcagatgacggtggaggccaggccaggagagggcagcaggcaaggtggcgtgtgcagcccacatgcttgacctgcatggctggacgtggccctctggctcttcgatgctggcagggatctgggctaagcatgacggaacttcccagtttttaaggagaagctggaaaaagaaaatctgcatgtgccatctgggagaacattgtaggtttctcggagtaggcctgaggccgaggtggctgtgggctgccactgtgctgctggttggtttaaggttttctttggaagatgagtgaacacaagtggttagcttcaagtgttctgactcttgtgtgtgtgttttctttcagggtgtggtaactgcagccacaagtctgatcaccactttagcacagaagaacccagaagagtttaaaacctccgtgtctctggctgtctctaggctaagcagagtaagtctgttcgtgggggagcagaagtcagggtgggttttgtcttagttatttatttattagcttatttgtagaatgcaaggtatttgatcagtttataaattcagggatgaaaaccaacttggcttctctgtcagccttcttgttgagaactgtcctgtctgtacagaagcacagctccctgttcccatggtgtgagtgagcacccaacaccatgtgggtggaggaggggcacccagtggccccgtgtcccccactggggaagcgtggctggtgcttcgtggacccaccatctggcgtgcacgctaaagcctgccattcagcttcctgttctgagtttgatgcagatggacctgcagcacacattcttttgttttgctcaacatggtaaaatttttgttttgtgtgcagctgttatacattcatgtttgatgcttcatagaattggttgtgtgaattgtccgctgcagtttacctgctgtcctgttgaacacttagctccttgccctctgaggctgct

SEQ ID NO: 7574 - DNA, 1622 bp, Homo sapiens
caccctgcccgcgatcacactgaagctgggaggcaaaggctacaagctgtccccagaggactacacgctcaaggtgagcgggcaatggggtgccgcacgccccaggtgagcgggcggtgagggggcgcacgctccaggtgagcgggcaacaggtgggggggcgggtggtgctaggcctgggtactgaccaccagggccgtcccaggtgtcgcaggccgggaagaccctctgcctgagcggcttcatgggcatggacatcccgccacccagcgggccactctggatcctgggcgacgtcttcatcggccgctactacactgtgtttgaccgtgacaacaacagggtgggcttcgccgaggctgcccgcctctagttcccaaggcgtccgcgcgccagcacagaaacagaggagagtcccagagcaggaggcccctggcccagcggcccctcccacacacacccacacactcgcccgcccactgtcctgggcgccctggaagccggcggcccaagcccgacttgctgttttgttctgtggttttcccctccctgggttcagaaatgctgcctgcctgtctgtctctccatctgtttggtgggggtagagctgatccagagcacagatctgtttcgtgcattggaagaccccacccaagcttggcagccgagctcgtgtatcctggggctcccttcatctccagggagtcccctccccggccctaccagcgcccgctgggctgagcccctaccccacaccaggccgtcctcccgggccctcccttggaaacctgccctgcctgagggcccctctgcccagcttgggcccagctgggctctgccaccctacctgttcagtgtcccgggcccgttgaggatgaggccgctagaggcctgaggatgagctggaaggagtgagaggggacaaaacccaccttgttggagcctgcagggtggtgctgggactgagccagtcccaggggcatgtattggcctggaggtggggttgggattgggggctggtgccagccttcctctgcagctgacctctgttgtcctccccttgggcggctgagagccccagctgacatggaaatacagttgttggcctccggcctcccctctgtgctggtgtgctcttgtgcctggtcaggggtggctccaacttgggatggggaaggagggtgggtagtgcgaagccagcacggcagctgactcggcagcaccgggacaagcatttggggtgccccgggcctatggccccctgccctgccctgcccagcccatgggctccagcctggtcggccagcggggactgacttgttcccaggtctggagcagtagccggcaggatgtggccttggctggggtttcagggtgtctagtgtgagtgccagccttgaggagtgatttcagggaggtggcccagccaggcagccacggcactcgaacagaggctatttctgctctcggggaccctcagagcaggcctaccagtcaccctcctcagccctcttgtcccgggaaataaatggccccaggtggcgtgggggggctggcctagctgggccttcttgcctcccaggccctagaagcggttttgtgtgcagtgagctgagctggca

SEQ ID NO: 7575 - DNA, 1118 bp, Homo sapiens
agccctgccaggagcatgatatccgctgcggtgcagaactaatctcaaagctcaaacccaggtaacagtgtaggtaaaacagatgacagggcatgagactcaccccaggacaggcgaaggacccaggccgatgggggcccagaacagtcctgatcctggagctccttcccgagtgggaccccaggggtttccgaggggcttagagtagggcttagaggcttagagtagggctagggacttcctggcttccctgcctcgggaacagctggtcctggaaggggcttggtcctcggggcactggtgcccaccacccctgatgcctgggagacaccagcatcctctgagcatgtgtgcgtcctcctggtcccgagggaagtgactcctcacatcccccagctggcggggccagagggccagcatcctcgcctgacacctatttttagatgctgagacaggcggcttcctcggggccaggggccctgtgagtggagcttccgcttcctggcctaggagagaattcctgctcctcttccctccatgctgccttttcgcccctggaggccacaacggggtcagaggggcagctgctcaccacctaggagggcctgagagggccctacgtcacccagggaggagtctggccccgtccccaacctccacacccaggcctggcactgccccttcttggtgggcagagagtgaggggttggcctgcagggacccaggctggaggggccgttcacctccggcccccagcgtcccttcctggaagcaccttggtgagcccctcccctccttcacccagtatctccaggggtacttcctcctttccttcctgcctcagggcctcactgtcctcctggggagggtgtctcaggccccagcacctcccagtggctgagccgaatgggcacttcccggtgtgtttcccatatgtgcagtccctaggtgtcggtgagcaggcacagagcccgcagcgtggccctgcctggtggaccccctccccaagagcatcaagggagggcctggactagagacacacagatgcccagcctgtacgtaaaggcgggtgagctgatgtaccatcgtcctcgtcccccactggggtgcctgggcag

SEQ ID NO: 7576 - DNA, 1655 bp, Homo sapiens
gccctgacactgtacgtgcccactctccccttcaggcctctctggagggaccgtaccctgacttctgaggatgcaggaacccagctcccctgaagcctcagccctgagtcttccctgaccagaacacaatgcctcaaggtggcccctttgcagcaacctccttgtttttccctctcccagtcccctcttcagatccctcaccccaagccccatgcctgggctccttcctgccttcccaggctggctcatatctagcagccacttttggaacagcctgctctgagagaggccttggtaagttacagggcagggacctggttgggtaatgactggagtctctgacctgcctgggcccacttatcactggaggccatgggagtgccaacctgaaaaggctgcaggatcttgcagaatggtaatgtgccagacccaaagtgggcagagagcttggggatggatgttcaggtctctcaggccctgtcatcctggagtggaacaagaaacagcccagtgtcctagatgacacagccacactggcttggggtcacccttgggcaggtgggtaacctctggctccagggagcttggcatgtgctgataccagcactggcagccctcacccccatagtggtgatttactgggcagctgcaagtttggctgtgatccacataagtgcctggtctctcaccaccttcacctgcaggggccttgcaagacccaagagttggtaaggcctggctgcccagctagatggactgtgggtgatggccctctcctcccagtaggactttttgcatgtctggatgctggtccgtgaccaagagaaccaaggtgagcgagagctccaacaggagaagcaagcagccagaaggatgagaagggacagtcccctctctgaggggacagccaagaggcaatacaggcactgccacctgtattgcacacaacatgagccactaaactaacactgatcactttggaggtccatcatatccaggacttggtacaggccttggccacagtgtaagccatcattctgccttctggtgctgacctgtacctgggcagcccatctggctaccagcctgctcacacctctgctcctgcctttttacccagccaggaggggcccagaagctcagagccctattctcagggtgtccatgactagtcacccctgctttccagtgatctgctggctcccttggagcctcttcacaccctacccaccatgaggtactgccaacctctctgtgaactgggggggcctggaaagacagtgggcaggtcctgtctgatcataattaccccttaagatagccactccttccctggaggtggcctcattctggctacccaaccctgccagttctctggttacacctgcagcccccagcaccatgggtcccgatttcctcagtgatttgcaaggccaggccttgcacctggctggctgcaaaggcaggaggcccagggcctcactacgacaaagacacacatggctcaggacaacctcctgacccccagagagtccaaagaacaaaacaccctttagaaaaatgttggtagagagaaggagagtttccacaagtgaccctcagaagggccgcgagtgtcactcacagatcttgacacaaagacatttatcaagggg

SEQ ID NO: 7577 - DNA, 1221 bp, Homo sapiens
tgccagataccctctagtggcttctatttctaggaaataaaattcaaattccatcaggtttttacaagatctgccctgcttacctctctgaccactgtcctccctcactgagctttggctctgccagccttcttcttctttgttaaatctgccaagtatccctcctgccccaaggccttcaccacctctgcctggcttgtcttttctggtgatcttcccttgacaattccttcttcttatttaaatctcacaggaaattttgctctgacctgccatatctgtcatccccttcagtcactcactagctgacgactacctttcgagtctctgcaaagcacaggctacgcttttctagttccttagacatctacttatttgttggctgcctatctcttccaccggaagagaggccccaagagagcatatctgtcttccgtatagggtccgcacatggtgggtgtgtcacagatttctgttgaatggtttcattcatttattgaacgaaggaagaggccaggccaggaaagtgtgcctccattttcacaactcagtgagaaagcaaatagcatgtcaaaatctgaccccttgcaaccagggtttcttagccagccacactggtaatgcttgggacaggatgtatctttgttgtgaggggctgtcatttatattgtaagatgtttagcaccctgcctggtctctacctagttgatattagtaattctcccatagtcatgatagccaaaaatatctccagacattgccatatgtcccctggggggcaccgcagatgacaaccacttccttagaacagctcttgggactgggatggtgtctctgctgtggctctttaaaggcagcaggccctggcttgcatcctgccacatctaacacctatagcctcaccacctcggtgagaaagaccctggcccaggcctggccaatcagagtaccctcttccctggtcagcagtataatttgtttggcaagcacttccagtcccacaacctatgggctgccacccagaggtttagttggaactacgtgtcagctgccgtccctcagccatctatggcatgggcacctgtggcttgaccaagttggaggtggcctagagaggccgggctgggcctgctcaccttctccagttagtgcagactgatgaatgagtggttctcagcggataccggatccaggtttgcagtacactccaggaggaggacg

SEQ ID NO: 7578 - DNA, 1878 bp, Homo sapiens
aaaatgtttttgacctttcctgaaagggtctggggggctctctggaatccccagactacactttgaaaattactgggctacatggaaaaaaaaaattaaggaacttaacaactaaagagagatttcagatttcagagaggttttggatataagatcagtgtactcaaaacaaaaaacaaaaacaaaccacatttctttatgccaatagcaactgactaaaaaaaagcataatagagattaggacagcaatcagaatagcagcaaaatttataccagtctaggaattaacaaagacgacgacttttatggaaaaaattttaaaactctattggaggatatagagggagatctttccatatgcagagacattttattttcttgaacagggcaacttggcattagaatgacgtcaggattttccaaatctgttaagttcaacaggactccactcaaacttccagttggagggcttgagtaatttaacaaacatattctaaaatgtatgtggaagaaaaatatttgtaaatgccaactgaacttttgaaaaggagagcagaggacttctgctggcagataccagggcacacgccaacttcagcaatcagagcggtgtggtgacagaggcccagaagagagctcagaggtaactccaagtctagaggaaggggacatgtgataaaggtggcaccacatatcagtggggactgttcagaagatgatgttggaaagccagccctaaaatggaggaataggaatatggattcctaactgagcccctaggaaaagtagactccaaatggactaaatatttgaaagcaaaaggtagttgccatttgtttaataggagaaaaaatgaataatctccagggccagggtggccgtggggttcttaaacaggatccagaaagcacaaacctcaagactaaaatgtatgaacttgaatgcattaatgattatggattaaggatttctgttaaataaatccatcatggcaagggtcaagactgttttcataataatactaaggaaacaatttgcgtttttcacttttacactcatgaatgtaactttgccatgactcattacaagatatttgaaacaattaaagctgaggagggaacaacagctaaaatataccagaaagcaccacaaatcattaagaaaaaggtaggaagattgccagtttgcaggagggttaacaaacagatgaaaatttgcccaagctaatcagttatcagagaaatgtaaatgaaagcaacagctattcttcataggagaagcattagaaagtaggataaggccaagtgttggcagaaggcaaggaacaagcctccctgtgtgctgcaggtggggacggagacaggcacagacgttctgaagagctggccaacacttcttcctcaaataaaatattttatacctgtggcccagcagtttccctcctaagtaaacatgctggagcagttctcacccagaacaacgagaggctgtgtgtgtgcatgctcagggcagcatggcccataggggtgggcagttggagctggtcactgtggttaggagcaggggactagatgtacacttcacaagatagagacgcgtggaaacacagtgctgagtgacacaaatgccaaacagaaagagggcctcagtacatgactgtgtatttaaattaaaattacacaccacccagacacgcagtactagggagtgctcgtgagtgcacacacacacacacaatgatataaataaattaccctggagaagctgtttgtgtagggaggagagcaaggatagaggctagagatgaagtggaaaagcatggagaggaagagagcggtgactttatgcagacccttacagggtgacagtgtttcatag

SEQ ID NO: 7579 - DNA, 1213 bp, Homo sapiens
tccctgtgggagggccctgtagaccacatcagggtggggtgggggtcacttggcaaaaagggccgaggtctggtgatgtggttcccaggatctggaacctctcccacccctcctgcagttggactgaattcttccctttcatccgaagaaacccacttgctgtttccagccgctgaatctgctgagtgtgcagcctgcatcacctgctgtatgccgatcatctcagaaagggctgtgtagagtagggccctgttctccttaggatgttgcttcttgatttttttttttttttaggggtgggtcagggttgtgacacaccagcccaggtgagagctgctgcgggtcacctcatatttatttatcccttcttgcctgtgaggactgcggcttttcgctgtggctcgtccttaacgtttctgaaccaccttggtgccctgagcaggaagatgtgccacttcctagcaggcgcaaggcctgtgcggaagaaacgccgctccctgccaccagggctgaagatgcgagcccgtcctcatgacgcaggcgccaccctgctgccggagccgggcttcggcagtcttctccactgagggactgggctgggaagtcctgcgtttcagtggagcgtatgagcgtcaagtcctgctttctcagtagccccattgcggggccccaccattcatcctgtctgaaggtcctgggtttggtgtgaccgcttggcggctggtgggtggggttttcaagtgggtgacggcgctctccggcagccggggatggccgtgtccgcactgaccaggcctgtggagagtgctcggcctaaccttagaacacatttgtaactgaatacagtgttttcaatttgtacagaatagttagaatattctattaaagtggtgaaacattgagtcagcactgtgccatgtgggtctttgcaggggaatgtggtggggaaggctcagatgtgctgcacacctgttgggctctgttgagccctgggtattggtggctccaagaccggttgtacagtttacttctgaggccttgaaagctcagtttgaggcagaggctgctgtagcccccccactacacctaagttgctgctgtatgcaggcagcttcactgcgggcccaggggaagactgttcctgcccccaggaggggatcatttctcagagttagtgggactgtgctttgtagatccagaaggctccaagagg

SEQ ID NO: 7580 - DNA, 1249 bp, Homo sapiens
tgttcttggccactacactgggccaccttcagtctacccttgaatgtcagattgacatggcgagggtttttggtcagcctcgttttgtcttggccaggctctttgggcagcctctggggtggctgagattgggagcttagacaccagggttcaaggttattgattttgttttttgcatattttacacatattttttcggccatcccttaaatgtgatttccaaaagaatgaactgtagcctcagcttatactgtggaagatatcatttatggtaacccagggatctttttgccccatacagtacaagttcttaggttccataggcacgctggattaagggcaatttgtaatcttagccagaaatcataggttacaggttcgtaaagttactagcgcagaagcattagcaagatcgtgatgtatttcttaggctattgttggcctccacacaaattcatggagttgctggatgtggtttaaagggtacaagatctctgtgttagataatattggagttaatccattcctctgggaggggaattttgtgtcccggatgccgttactggaaggatagcattgccccttggtgagactgttaggagagtgaaggagagtgagtgacagatggagctcttgggagtggcagctcatcatttgttggtgcagtacaggccaccagaagaggatggatctgccggggcgctccctggtagtacaaagagcaggaacccgctagaggagagatgtgctttccatgagcgccaagggcccagcctacccccagacagatgtgcccttgagaagtggggactgttggcaccaagaggggttgcctccgcggtggccttcctggatggagctgcccgtgttgagcgcactgtgctctgtgtgggcaggggttccagctgcttcccagccctttcatgggcaggcccctggagctccaccaccccaaggagccccaaaaccctcctgctgaacatgccatgaatttgaatgcttgaaggcatagctttaaaaacaaaaaaaaaccctgctttgactgcagggtggtagggggagttagctttgtttttgtcactatttttaaaagtatatttgcagtaaccatttttttcaatgagaatgaactcattcagtcttggctttcattgttgattggagctaattggtgaatggagctggctttgctctctacaagccttgtctttttcattgacagaaggaacccagccagccggcggaatgc

SEQ ID NO: 7581 - DNA, 1395 bp, Homo sapiens
gcgtggtgctgagtctgcatcatcctcctgatagaacctccgactcaacaccagaccctcagcgagtccctttgcgcctcttggctccccacattggccggcttcccatgcctgaggactatgccatggacgaactgcgcagccttacccagtcctatctgcgagaactggctgttgggagcctgtgagccccaggcactttgcatcacagtcacatgcccattcacaccacacagaggttccctgccttgtttggattggcactgtttgccattctctgggttggctgtggcatctaccctccctccctgctgccagaagcagcatcctccacttgttcagggcttttcttaatactgaacgtagcataagggcttctggaacccagaagaggagacagtttaccatcctcaagatcattcagtgtttttcctttaaaaaaatggtcaataaagctcctttggcagaatcccccaaagaaccagggtattctttttccatccctagccattctggatcttgtgaccctccatgccaaccagcttccctactcctaccctggcccttttatactaggactccttaggaggagtgagacaggtgataatggatccttaacagatgaactatccacagaaggaagagggatccgtctcttaagtaattggttagttaacactgaattttggaggcaaaggagggttggcctgagttaggaaacaaaatgggatctttctgacacacttagggcagaagtgaatgcctgtcacggagggattgatcttcagggctgtttttgttcctgcctttagagttccatgaacaccatacctttgctactactatgtgcaggaacccttggtcacatgtgacatgtctgtgggaagctcccagagtttggtttggtccctggttttcagtcttgctgagactctgtctggatttgcctgcagagtttggataaaaaatggcaggttgggtaaccctccctgttcatcccatgttagctccaaagcatttcccaccctccatctaccccttccagaagcaaaaacaaaccatgactgaggcaggcatggagttgggcgttaggggcaggcagagggcctttgctacactgctgacagctatagggagccccaggtaatggcatgagatagctggtgttagggctatctcaggcaatatggccacacctgggtctttatgcatgaagataatgtaaaggtttttattaaaaaatatatatatgtataaataaatgatctagatattttcctctttttctgaagctactttcttaaaaaataaataaaatgtttatagcattcctggtattggctttccctttgtatttttgagccttcttaccctgaggatctttatggtggcctt

SEQ ID NO: 7582 - DNA, 1185 bp, Homo sapiens
gagaactgacttcagttatcttattttaagaaattagcatagccatcacaaccttcagcaggcaacaccctgatcagtcagcagccatcagcatcaaggaaagaccctccaccaccagaaagatgacttgctgaaggctcaagtgattaacatttttagcaataaaatatttttaaattaaggtatgtatattggttttttagacataatgctgttgcacacttaataagtgacagtggtatagtgtaaacataacttttatatccactggaaaaccaaaaaatttgtgattttattgtgatacctgctttattgtggtggtctgaaatgaaacccacagtatctttgaggtatgcctgtatgtgcttttacttctgaagtccagccaacattatttctccttcctttctgtcttcctgccatgtcttctgtacttttggaaactatgcacttgtgcagacattgtgctcaatactttgtttcttcagatgccatcattaatgagaactatgactacctgaaggggttcttggaagacctggcacctccagagcgcagcagcctaattcaggattgggaaacatctgggcttgtttacctggactatattagagtcattgaaatgctccgccatatacagcaggtacctgagatcctgaaactgctgcctgattttccttttctcaggcccttaaatcttcagatacctcacaaggccttagtatacacttgagaatgcactgacagagatagcactgtcaaagcaggcatcttgctgaggctcatttgatataaccgtttctgacagctatatcgaaacttaaaaatgctattttatgttgattaccaactagtatgtgcaatagacattcctgaggcttgtccatagacagtctcttccccttgttcagtcctagtttgagtgagaagcccaaagatgagagataaaataagaatggagatttggtgagggtgaggatagctgttttacacatcatttggcatgttttaaaattgcaaatatgggttttaaagtcaatgtcttcggtcagttttttttttttttttttttttggaacagagtcttgctctgtcatccaggctggagtgcagtggtgtgatcgtggctcactgcaacctctgcctcccagtcttaagtgagtctcatgccccagcctcccaagt

SEQ ID NO: 7583 - DNA, 1199 bp, Homo sapiens
ccgcccacctcagccttccaatgtgttgggattacaggcgtgagccaccgcgccttgctctatttattttcttgatcgtgatggtggttttacaggtgtctacatatgttaaagctcattaaaattgtgtactctagatacgtgcagttttaaatatgtcagagaaagaaagaaaaggatacttcaaaataccagaaatgggcaacagagcgagactctgtctcaaaaaaaagaaaaaagtaatgacattataatgaaggaatggaagggtgagaactgtgaagactccctgtatcaggatggtaaaatacatacgccaaaccattaccagcaaacctgttagatcacacaaccttagaagagaaggtgccttgtttctttgtaggatctaaagtctggctgaacccagagatagattgataaaacataggctcagagggagagaaggcctataatgctttcactctcaggttcttttattgtcttagacataagcagaacagttgacatatcagtccaggccgtctcctggctgtgtatgttgactctcaacacgttctttgcagacattatgatctcaaccagctgctggagcctcgaagcataacagcagatcctttggactaccgcctaagctggcacttgtgggaagtgctgagggctcttaactacacccatctctcagcgcagtgtgaaggtgtgctacaggccagttacgctggccagcttgaaagtgaggggctctgggagtgggccatctttgtcctcctgcacattgacaactcagggtgagtgagaagccgttgaacccactgggtacatctagcactacagggcaattccaaaggaatcagtctttcagggttcagtttagcaagtaattgtgtagaatgtgtgttagatccagcgttgtgataaacctcaagatagttaaacccttagcctagactgtttctgtattcatgtaaaccagttaaaactgagacttcctttgattaagtgccaaattataatatttatcacaaagtctctcagcagtctgagaaaaaaagatctctgtgaactgcattgatcagagaaattcttcatagaggtaagagtcgaagaacctgtaaaattggaataggaaataatgaagtggaaatgagagaatatgcccagatgggacaatagcattatgcctgggccaaaaaactagt

SEQ ID NO: 7584 - DNA, 1072 bp, Homo sapiens
tgagatttgtttatgttccttcagttctttgtatttacttaatcgtctcattgtcttttcaaatgtgtaagttattttaccagtgcatacttgtaagtggcttaaatgataaacagtacttttgtagattgatttttatagacagaatttgatcaaagtagatatcatctgagatgacactagccataattaggcttggggaacctgtttaacggttacatttgttatgtaagtaccacagaaacatgatatgagcaagcatttatttatactatgtacttctggaaattgtaagacgaagttgagtgaggtagagacagattcagggtaatcagcttgagtggttgtttgagatgtctattaatttatgtatttttaacatcacagttagaaggatgccctctgtgaagttgttgtaagactttgtctcgtaacattgtttttctcttcctgccttagttgtgaagcactggagcctgacatggacactatgtgaagccctatggggccacctgaaggagcttgacagccagctaaatgaaccccgtgaatacattcaaattctggagcgaagaagagctttctcccgctggctatcctgtactgccacacctcagattgaagaggaagtctccttaacccaaaaaaacagccctgtggaggctgtattcagctacctcacaggcaaaaggatcagtgaggcctgctctctggcccagcagtcaggtggggaaggcatatggtccttctctgcgcctctgtcgccttcctactcactgcctcctaccgctccccgctaattgtgcatttccctttggcttctagcctatgagtattaattgcggacttcccagaaagattgctggttcccgtggaatatgtaatataacataaaatttaacttttaatcaagtaaacaatgtttaaggtcctaaacagagaattagaagacatagtgcggctgggctcagtggctcatgcctgtaattccagcactgtgggaggccaaggtgggtagatcacacccacctattcctatagaataggaaccatgactttttttttttttttt

SEQ ID NO: 7585 - DNA, 1212 bp, Homo sapiens
acaagttctcagggcctcctgagggctgtatcacgaaaaagaaaaaaaaaaaaagaaaccctttgtatagacacctttgtactcctgttttttttttcttttggataaaattctagtgttttttattattattattatttataaagcattttttaacattttgttgattgtaatcttaaaaatctaacatttttttcagtttttaatcttaaaattaaccaattatttgattccatataggagagtatacaatagagatagtaattatctgtttcacagtactgctgtagtaagtattaagtgaatttttaatacatggaactatccagaacagtgccaggcacttagtaaaggctcggtattagttagctattatcattgttattactactacaagaggctaaggtattatttcttttcctttgcagatttagtttcctaagcaaacctgttgatgagaatcaccagcaggatggagatgaagattcccttgtttcacatttttatactaaccctattgccaaacctattcctcaaaccccagaaagtgctggaaataaacacagcaacagcaacagtgtggatgataccattgttgcattaaacatgcgtgctgctttgcgaaatgggctggaaggaagcagtgaagaaacgtcttttcatgatgagtcacttcaggatgaccgagaagaaatagaaaataattcttaccatatgcacccagcaggtcaggttcagattggtgcatgtttaatctcttaccagtcattcgagatgacttgcttgttgcagatattcaacatatggaagtcagctgtttggcattttaagtattattttatgtgatcccacataggagagcttaatatttaaacagttttatgctttagttgattcagagttcacatactctttggaccttagagtatgaaaattgatacatctttaattatcctggtgtagtctaaagaacccaaattttatagccaaagagactatcctgatattttccctggctttgtaaactcggatagattgcttattgttttttgtttgtttgtttgttttttcttgagacagtgtcgctctgtcgcccaggctggagtgcagtgtcgcagtcttggctcactgcaacctcaacctccagggatcaggacctctcatctcagccacccgagtagctggcactacaggcacatgataccacacccc

SEQ ID NO: 7586 - DNA, 1197 bp, Homo sapiens
actttaaattttcatacttcccctggggcgatgaataaaatgtctgtggcttggtttttactctgtaattcatactctgatgggattttgaaaaaatgtttttaattagactagtagttcaaatgcagaattttttttttttttttgagacggcgtttcacacttgttgccccggctggagtgcagtggcacgatcttggctcaccgaaacctctgcctcccagattcaagcagttctcctgcctcagcctccctagtagctgggattataggcatgtgccaccacgcccttctaattttgtatttttagtagaaacggggtttctccatgttggtcaggctggtcttgaactcccgacctcaggtgatccgcccgcctcggcctcccaaagtgctgggattacaggcgtgagccaccatgcacagcctcaaatgcagaattttaagaaatattaaaatgccttttcatttggtcatcttacgtagattttattctaaattctaatttactctggattttgctttttcagatactggctttggcactactagtggaggggcatttggaacatctgcatttggttctagcaacaatactggaggcctctttggaaattcacagactaaaccaggtaggggctttatttgtgatataactggtttgtttgtagctagtataggaattgacttagtggctctgatgtacttaactttttccctccttctccatctcctcaggaggattgtttggaaccagttcatttagccagccagctacctccacaagcactggctttgggtttggtacgtcaacaggaacagcaaataccttgtttggaactgcaagcacagggaccagtctcttctcatcccaaaacaatgcctttgcacaaaataaaccaactggctttggcagtaagtgggacatcactggagttctgcatctaataatttggtttgcttattgaatgtgttgtcttttctccgtttttctgtgttcatctaccttcttttcctactaaatggcaaaaacaagggaagaggaaaacttcaatatgtactgaaaaggttaataggctggaaaggaagagagtatgtacatttctataaggatagaaatttgaagcactgttatttaagggatatgcagaggaagagcttcctgatgcaaaatggctagagaaaggatgaaaagcc

SEQ ID NO: 7587 - DNA, 1238 bp, Homo sapiens
cgggagggcaggccctgaggagcagggggtgggatcctccagtcttagaatagtcccagtctggctacaaccttcaacccaagacccggattcttcagcaccgagtgtgagtgttccttcatgaggcccccaccccattcctgggtctccttagtggagggaagtatgagtgccgaggggagattgggtcctaggccttttaatatcaagccatctctgtctgcctcagcttgatccagagggaagcccagcttgaggggtcaaggtgtttgggcagtggggttgtgagggggagttgtcggccaggagggagaagagattggaagaagctcagttccctgggtctgggtctgacctggacagagatctcctgggtctggcccaggacagcaggctcaagctcagtggagaaggtttccatgaccctcagattcccccaaaccttggattgggtgacattgcatctcctcagagagggaggagatgtaggtctgggcttccacagggacctggtattttaggatcagggtaccgctggcctgaggcttggatcattcagagcctgggggtggaatggctggcagcctgtggccccattgaaataggctctggggcactccctctgttcctagttgaacttgggtaaggaacaggaatgtggtcagacagggtcagtgggagggctttggccattctgagccaacggtcctttgttagttggcctgaaagaagccatgacttagaacctgaagctgtcaggtggcaagaggccttagtcctggtgtttgatcctggcatagttctgggcctcagtctccccttctgtgaaatgggaataataacctttctacctctgacccttctcctgagtggctatgagggttgtgagagtgaggtgggccaccagagctccctgtccaagccaccgggagcctctcttctgtaggctcttcaagaggtggacctagagtatcactgtgccagggggattcctaagctctgaccctgcctgtctctgctgctcctgccccatctccctctgatccttctcctctgcactgtcttccttttccccttatgccttttctaccctttctgctctggcttttccttatactctgaggagccatctctggaaaaggccccactttcccagacccaggtgtcctaccaggccccaagttgtatccctcgtgctgcttaggccacgccctgcaggatgttctctgcggcctccc

SEQ ID NO: 7588 - DNA, 1233 bp, Homo sapiens
aaaacaggccgaagtggctaaccaagaaactaaagaacatttacctgcagtaaacagggaaaagaaaactgaggagagtccagcctctgatgaggcaggagagaaggaagccaagtctgaataataccacacatcatacattatcagtggtccctgtctcccttcttgtacaatccagaggaatatttttatcaactattttgtaaatgcaagttttttagtagctctagaaacatttttaagaaggagggaatcccacctcatcccatcttttaagtgtaaatgctttatttaagaggtgaaatcattcgctggttgtttattttttggtacaaccagaaaacagtgtgggttattgaattatgggaggttttgactgtctttgctgtcagcttaacactccatagatgggggttagtttttatatcctataatacaatgcatattaaatgacaatatggagtcagcagccctgcatttaatgtcttgaacattttaaattacttctattcccatgttattttttagtagaattgtttcctaaagaaaaccagtccttgatcatggctctccctgtcagaattgtgtgtactctgtaacatctttggttgtggtagtcctgttttcctaatcacttggttactgtgctgtgaaagattaaaaatttgaatatgtagtatacatgctattcagttgtgaattggtgggacatatgtaacagcttatcaacatgtgaacataccggtacttgatagcctcttaaggacaatttgcttccaaattttaagctggaaagtcactggaataactttaaaaaaaaagaattacaatacatggctttttagattttcggtacgtatgttaagaattgtgtacaaattgaaatgtttgtactgatcctcaaccaataaaatctcaattatgaaagaaaaaaatgtaaaaatcatttttagtttgcaggctacacgaaaaaaacagtttgctgatccctggactagatataataaatccaccctctgctctggcttcaggtgctgaggaaatctctctccctgacaatccccatgaacaaacggcaacttcgattcactgctcagttttccctcatgctaccatccctatacatggctttcaaacaccctgagaggatcacaaacccagccaaacactcaacagcaggaaaacctctaggactccatttccaaaatagaacacccacttcaatagacttgg

SEQ ID NO: 7589 - DNA, 1199 bp, Homo sapiens
tgcaagtgatgagagttgagtagagcagagccaaaaggaacaacactggaattcttcagtgaatgaagggagttttcccttactggcccacaattgaatttttctttggatcagatgctattttaagtaagtagaatagcccttatggtaaagctattgtcctaggcccatattctgccagttcagcgggagggcagaaggccggggctgggttaggggcttactttcagattctttaatcaggctggattcccactcgagacagaatttatttgtaattttatcaataatactttgcccctggccaagcctctttgttcttctaatctgataactcgttaggcctttaatcaaaggcttaacaaggacaggatcactgacaggcagagcttgatcctgacttgctgatctgaaggcttctgtgttctccaggctgggagggaccttaattagctctgagctacccaatccctgcccccagcccttcctttattacattgatggcaggccgaagccctccataaatcagattctcttctccttttggcctggctgttgaccctagatgctgcctggctgatggggcgtaggttcagtgaccgctctctctgctctacatccgccggctcggatgatcagtccctctggaaataccccggtttgaggagcccctttggggcattttgtttttctgactttcgggactaaatcaacactcttaccccatgggtcccttctcctgcctgcttcacgcccctgcctgctccctctatcccctcagcactgtccctactaactacagggaggggttcgggggtgagaagaatcagcttgcttggcaagagctggacagagaacacccatggtaatggaaggcttaggcttctccctttagcgcagctgtgcaggtaacctggtagcccttcttccatctgggctgggagggaaagagggaaggacaaatgacccctttcttttctctttttcatgtttctcccttttcttcccagtttcccccttctttctcccccttcccccccctattccagacttcctcatcctcttcagcctctctttcgtaccttgaaagctaccagcatagaagccctacctcctgaactctccatcactatggaattatgctgtctccctggtggtccttccaaggcttcgctcacccttgtaacctggccctttct

SEQ ID NO: 7590 - DNA, 1839 bp, Homo sapiens
tgtctctccttccctcccttccttcaagataactggccccaagagtggggcatgggaagggctggtccaggggtctgggcactgtacatacctgccccctcatccttgggtccttcattattatttattaactgaccaccatggcctgcctgccctgcctccgtcccaaccatgggctgctgctgtcactccctctccacttcagtgcatgtcttagttgctgttccctcagctcccagctccacctctggggttcagcttctgtctctgctgtcccagttttgaggtttggtttcttgtttctgtctcttgctttcgggctcctccctcccaccactccccaacttcccctagcagttgcagggaagataggacgagtagcttctgacatgtgtgcctcagatctgttccaccccactcacagtggttctgtttgctccagactggggctagggcctaatctttgaagtttgttctttggtattgatgtgggtcagaaggagcctcatcctaatctcactcaggcctccagggatccatgggggagtgaaaccaattctcagagaacaacccaccagagacttttaaagagaggccaggcttgggaatgggttgggagaggcatctgttcattggagcatgagtggatgccagaactgtaggttataaggcagtcactttttctctctactcccacccacacctgcctccctcttacccctgctcccccacactgcaggaggatttgtctctaagaggtgctgccccaaagctccccaagcatcaatactcctagggctcaggacaagtggctcccctggccaggagagccacagccatgatacagggctcttatggagccctggagttgttgggcaaggatgctgtcattttttgaaccaaaagacaaacaggttaaaaggaaaaaaagtaatctgaatttcccaagtgcctacgctgcatattccccttgttagatcccattttcatgttactttgtagccttggccagaggctcaaaaaggacacaaccagtttggggaaggggtggctaaggaagatggtataggtgaaggcggctgtgtgaccactttcccccacccttcccaccctctagacaactctctcccttacctgtttttgctatggctgtaaaggtatttttcctctgccccactccctgccatacctttatcctgggatcctattttgggcctggggtgggtatacctggggctggtcttaggagggtgctaggctgcagactgccttgtactccctggacaccctcaaatggggttttctgtgttatttcataaaattctttgaagtccaataaagcatgtaggagattttaaccactgctggctttgactctcattgtgttctctgtgctgtggcatgatgggataaagagacaatctttcctttgcccagggaaaatgaaacttgaatgcacatgcccagaagctctgtgggcagggttaccagataaatgcaggatgaccagttaaatgtgaatttcagataaacagtttttaaagtataattttctctcatgcagtatctgggacacatttttatttgctaaattgggaaaccctatgtctgggtaaacttgaccctatctatcctataacttcacttacgacttttaaaaaacatatctatttaatttttctttctttttttttgttttttttgagacggcgtctcactctcttgcctaggctagggtgcaatggcgcgatcttggctcactgcaacctctgcctccagcgttcaagcgattcttctgcctcagcctcctgagtagctgggattacaggcgcgtgctac

SEQ ID NO: 7591 - DNA, 1172 bp, Homo sapiens
tcctcacttcccagtaggggcggccgggcagaggcgcccctcacctcccggacggggcggctggccgggctgggggctgactccccaacctccctcccggacggggcggctggccgggctgggggctgactccccaacctccctcccggacggggcggctggccgggcggggggctcacacccccacctccctcccggatggggcagctggccgggcggggggctgacccccccacctccttcccagatggggcggctggccgggcagaggacctcctcacttcccagtaggggcggccgggcagaggcgcccctcacctcccggacggggtggctggccgggcgggggctgacccccccacctccctcctggacggggcggctggacaggaatgtattttaaatattggtgtggaatgtctagtattctcacagagtttctcctaataattgtctttactttccttgtagggtttgaagactgggatgtattatttaaggacaagaccagcggctaatccaatccagttcactctaaataaggagaagctaaaagataaagaaaaggtatcaaaagaggaagaagagaaggagaggaacacagcagccatggtgtgctctttggagaatagagatgaatgtctgatgtgtggatcctgaggaaagacttggaagagaccagcatgtcttcagtagccaaactacttcttgagcatagataggtatagtgggtttgcttgaggtggtaaggctttgctggaccctgttgcaggcaaaaggagtaattgatttaaagtactgttaatgatgataatgattttttttttaaactcatatattgggattttcaccaaaataatgcttttgaaaaaaagaaaaaaaaaacggatatattgagaatcaaagtagaagttttaggaatgcaaaataagtcatcttgcatacagggagtggttaagtaaggtttcatcacccctttagcactgcttttctgaagacttcagttttgttaaggagatttagttttactgctttgactggtgggtctctagaagcaaaactgagtgataactcatgagaagtactgataggacctttatctggatatggtcctataggttattctgaaataaagataaacatttctaagtgattgtatgagattaattttg

SEQ ID NO: 7592 - DNA, 1173 bp, Homo sapiens
agcaatacaatagggtaccattttctccacatcttcatcaacacttatttttcatatttttgttttgttttgttttttgagagacggtcttgctctgttgcccaggctggagtgcaatggtaccatcatagctcactgcagccttgatctcctgggctcaaacaatcctcccatctcagcctctcaaagtcttggggttacaggtgtaagccaccacacccagctcatattttttataatagccatcttaatgacttgacaatttcattataatgtgtcttggtgtgggtctctgagtttatcctacttgggacttcctgggcttattggatttgtagattcacatcttttgttaaatttgggttgtttttggccattatttagataatttttcttcccctttctctttccttatagggacttccatagtgcatctattggttgacttgacggtgttccataggtctgttaggcgttgtttacttttctttattttttctttctattccaagacttgataatttcagtgtcctatcttccagttttctgattctctcttcttcctgctcaaatctattgttgtgctcctctagtgaatttttcatttcagttattcttttcaactccagaatttttattcttctttgtaatttttgtctctgttgatattctgattttgttaatcattgtttttctgatttcctttacttatttgttcatcttttcctttagctctttgagtatatttaatacagttgttttaatgtctttgttgagtaaatccaatgtcttggctttctcagggatggtgtctatcattttttcttgatactttgaatgggccatgttttctttctttccttttttttttttttttgtatgccttgtaatttttgttgttgaaaaatgggcatttgactgttataatgaggtaactccagtaatcagattctcctactccagagcttactgttttttgtttcattgctatgttgaagactgtagtactccatttgagacatttccaaactttttttttttttaagacagtgtctcgctgtgtcaccccaggccagaatgcagtggtgtgatcttggctcaccgcatgctctgcctctggattcaggcaattctcatgccttagccccctgagtagctgagattacaggtgtg

SEQ ID NO: 7593 - DNA, 1141 bp, Homo sapiens
agcactttgggaggctgaggagggcagatcacgaggtcaggagatcaaaaccatcctggctaacatgatgaaaccctatctctactaaatatacaagaaaattagccaggcgtggtggcacgcgcctgtagtcccagctactcagaaggctgaggcaggagaatcgcttgaacctgggaggtggaggttgcagtgagccgagatcgtgccactgcactccagcctgggtgacagagcgagactccttctcaaaaaaaaaagttaaatcttacacaagtttatgtagatggtgagatgatagtttctagtctagctcttctggctccagtgccagggctgtttgcagaatgatgctaagtgtattcagaaaggaggattggaattcatcagtaggcttgggaggtaagggagatgggtggtggaggaacccacagtcagcagtgtgggaactcagaagtcctgtcctttctaggagtgagttctggaccctgaggaagccagaagctctccctacaaagctgagaagtatgttccgagccccagatctgaaaaggatgctgcgagtgtgtagaggtaaggagattcaggggaaagagtttggatgtgaaattactgtcgtgggaagaaataaacgggatagaggctatagtcggtatttgagcatagtggcaaagagggaggtcccagagggagggacatagtgtgctgaagaagatgcggtttgtatttaaggggagatgaaatggccaggtgacatcctcacaggattcctcaccattcccctcaatgtagtaaggagagagataccagacatgagacagttggtcctattcaacattattgactcttttcatcattacagagctgacagatgtccaaagctactggggtaagtagaagccatggcctctttgggctggcacattctgatctcctttcacatgccctccccagacatagccacacagatcctaggtgttgatgcctcccccatccccgccatatagttccagttcctccaaccacttcctgtgtttcctcttctcagcataacgagacccatgtccccgttctcatctgctgatgttgtaccttttcctacagttgacgtgaccctgaatccacacacagctaatttaaa

SEQ ID NO: 7594 - DNA, 1141 bp, Homo sapiens; identical to SEQ ID NO: 7593

SEQ ID NO: 7595 - DNA, 1315 bp, Homo sapiens
caatactggatttattttgataacgtattgtttagattttgttctcatctatgttaatgaaagaaattggcctgtatttttacattcttgtaatatctttgccaggttctataaaatgcaataataagcaaataaattactttgtttttgtataagtatgtataggattgagctctaaaaccaaaccattataatgataatttgggtagcttcaaactcaaattgaagagagtcttcactacaatcttcactacaacctttggccttcctctctacatttaagagtagcaatagaacaataaaaaaaaatacgtctttcaaattaattgcagtaaaaacaaaagagtagtggggagagaaaaacaatccaatacatatttttctctcagaatagaaagaaaacacaaagagaaaatatgaacaatataaagcacttaaaggaagaggatgatttcttccagcttttccacactctctttatgcgcaggaacaaacagctgttgagtgagctgctatgactttggtagagaggtgcaatatgttttttgaaccagctataaaagaaattaagaggtacatgtgagggtagaaacaaatatcaaggatgagaatggcactggctgtcccatatggtatccaggagccaccaatgtctgttgagtacttcatacatgcctagtctgaattgagatgtgctcaatgtataaaatatataccagatttcaaatacctacttcaaaaaataatgtaaaatatctcactaataacttttcctttgtgtattgcaatgataatatgttggctctattggattaaataaagtatgttattcattttacctgtttcattttacttttttaatgtggatactagaaaccttaaaattacatatgtggcttacattgtatttctattggacaactctggagtagatcctataatgaaatttctgtccctaagtgagccctagtgtaaaagcctatggactcaggatacagaggaggtttcaaggcacatatgtttatctctacagaacctgcaccttcccagctgccctgaggcatttttatggaaggtaatgacagagaaaagaagatctcaacatatctagaagtgtagaaatttggaagatcatagaaagggctcatgaccagagaatgattctgcagactctggcccctgccgttagtcctcagtctgttgggcacttgaagctccttcatggtttgatgaaacactgatttgttatcaaggctcagcttgggtgtctatggtgagataaagtagtgcagattatagtaaaagctcactactg

SEQ ID NO: 7596 - DNA, 1508 bp, Homo sapiens
agagggtgaagggactcttccctcttctctggatcccagaaggaataagcagcatgggcccaggatggtttgggggagcagcagctgatgtttattagagaccagtacccctatgccagatcttgggggctttgcccccggaatcttttgcttcagcttcagtcgtcactgtcgaactctgaggatagaccctgcagcaggggcagggacatggagtgcccgtcggggtccctggggcccccaccctgggctcctggtggagggctgcgggggctgaagagccagttctctgccagggttggggatagtcacagcttgactcatggctggtcttttccccccctagcttttccctctggtcctctgtgccatcccaatccccttcctagggcctcctcattccatctcaccctccccagtctccctcattccatctctttcaccagagccctgtgctgagtaatggattcctcacatacttaattctcatgccttctccctccttcactttgtccctcccatccatctcatcatcatttcccctagtagtacctgacagtatctggggccccctccagaaggggtttcggcccttgtaggagaatctggtgggtttgtcctctggcccttcctggggaggtggcgtaggtggggctgggacaggtgggggcacatcagcagcttcagttgtatcagcaggtgctgatgtgggggccagaggcggcatgatgctgaggttgggtctgacccagttggccccatggggcaatgggtctttagtgagaggcttctgtggtcccagcacgcccttagactgcagtgaaaacttgaggcaggagaaggcaacaggtaatgaccgaagtagccggaggagctggggctcacgggctgtagacgtcagccccagctgcagccaggaacaagagaagacctggtagatgacatagatgctgtgggtgcttcggagccagggaagagtctgctgtaggctcacctgccctggtggcagcaacaggaaggcaaccttcttgcgcaggtcacccatatgtaggcggatcttgcagggctgtccatccaacattcgcgtctcttcataggctctctctgctcggccatttggtgagtattcccgagtgcagtgggcgaaggcaccctcagatcctgcctgctccaggaggcttggtagtggccccactggtttcagtgccctccggccctgccgacctggcaaagccaggcgggtatgggctgggcgggactgttttaccagcacacccagtaggtcatagcaggctgcatctgacaggaaaggtactgctactgcattgggcccaaagtgctcctcgatgacctgcaggtggccagtttataggtcagggacttagggtcagaagttaactggttgcctactttaaattgacccccaggttcacgttcagttacatctctataatgtgttcagatttatgctttctgcttacctcccagctctccggcagcaaaacctt

SEQ ID NO: 7597 - DNA, 1275 bp, Homo sapiens
acggaagtgggagccctgggaagctttgtgagcagaggcagtacatagagggaggtgttttaaggagttgggatgaggatttggttctcactgggtcttttctgcccctaggacctgaccaacagccatttcttcttgtttgatttccaaaagactgggccccctctggtagggcccaaggctcagctttcaggcctgcagcttcagccatgtctctacaagcgcaggtgacctctggatcttccttgaaaggggaggcagatctcaaactccaggctcagaactgtgaagactgtttccagcctggctgtgagccaagacctggttcctggtggaccctgaggacaaagtgtgataaaacctctggctcagacttgctctactgaaggcttcttggttataagatgcataaagtcactggggctagctaaacaataaagagtttattgtgagaacatggggatatctgtctcatgacacttcaggtgttatgaaaactagatggtttggaattcaaggcatctttaggttttgctcttctttccaactaagaagccacatggccttcctgtcctgccatctccactctgctgtcatctgatctgtctacagatcagcttcctctgctcacccatagcttctgctccttcagcttcagtttgcccaggccttcaaggttgcagacaggcagctgttgctgtttgactctgaggcaactggttgtccaccaacatcttggctcaagacatcagtctgagccaccaacttgagactgtttggttgtccccataccgagcatttctagtggtttatctttcccctctcccctcatctccatttttggaaccatatagcatcaagccactcccaacacctattgtcctgtgggactttgggatgtatatagctgagagcacagattttggaatcaggtagacctggatttaattcttggcctgctacccagaggcacttaaagtcatttaatctctgtatatcacattcctcatttggaaaatggtagaatttttgtcttgcagggtggttgtgtgggttaactggagaaatctgtagccagggctgggaacataggaggtgctcagtaaactagctatgactattatgtgttgtaagccttattgttttttgaagatcttccctaggctggttggaggctgaggggtaaagaatggatttgttgactaaggaagcctctgggagaggctagacctttcaacaggcctgcttcataggctatttaatgacttttaatag

SEQ ID NO: 7598 - DNA, 1483 bp, Homo sapiens
gagatgcttggctagtggaaagaatggattgccttccggcattagagaaattagattggcaccttgttttcttgctcggttggatccgtgatgttatgtcctcacagctcatcgactatgggaagctgggagacactaacgaacgagccatgcgcatggctgacttctggctcacagtgagtgcgacctatctgccttcaaaatcccaccctttgctccctgggggtgggggttggaaaaaggagaactatgcagaattaaacttgggtactcacttatgggccagtgctgctaactaaattagaaactgtgtcttaagttagttgaagtcgatgtgaatatacctctgcacaactgcctataaacgacccctttgtgtaacactgactatgccagattggcgaggggagggggaggtctttctatgtgtggatggaccttacctttgggaatggtgtaaagttaaatgcctctgcagttttgcctgactctgctgtctcttggataattctccctctaggagaaggatttgatcccaaagctgtttcaagtactggcccctcggtacaaagatcaaactgggggctacacaagaatgctgcagatcccaaatcggagtttggatcgggccaagatggcagtgatcgagtataaagggaattgcctcccacccctgcctctgcctcgcagagacagccaccttacactcctaaaccagctgctgcagggtttgcggcaggacctcaggcaaagccaggaagcaagcaaccacagctcccacacagctcaaacaccagggatttaactggatctgaagagtctgcagcccttaatcagtacccatgatcacaggcctttggagcacttttactctctgagaagaactggagctagagatgtaaaatggacagtcttgatggggttgagaaccttctggggagccagatgaccctctctttgcacaatagataaaagtctttatatgaatatatataaatttatttattttttccttcctgtgggatttctggagaatgagaattatccaaatgctcagtctacctgagatagtaaattcatggcttatgcttctggtccttaaatttgggttatttttggttagtgcaattttgtttttcttaatgccagtttacatgggaatgcatcctataattccaaatgttgccagaggtggttgtgttttgacatctggtctcctagagatgagtgcttgggatttcttagagaaagattacttcctgacaggggtaggggagtgacaatctgcaagtgaaacttccttaaacaatctagtaccctgcgaaccttcaggggatactgcaatcagtcctctgttttgaggcaggatcacacattaccttaatgtgttcccttcaaccccctgaatgggcctgggaggagaggacccaagaactcagatgttccaccagtttggccaaaggggtggagacattcagcagag

SEQ ID NO: 7599 - DNA, 1112 bp, Homo sapiens
ctcaactttgtaaactcttgtattatctttcaagacacacatcagtgtcacctcttcccaaaagatttctcttgcctttctagtagggtttaagtgtgccttcctctgtcctccactagggtcctgcctgtacagcagttatagcatttgtaatattgcactgcagttactactttacatgtttactgtccccaagtgacagtaatcctgtttcagtgaggcagtgatactgtttcagtcatcattgtgtacccaacacccacttcagtgcctggcaccaagtagctgctgaatagatattggttgattgaacgaatggatacctgaataaaagaacaaggattctgtagctggttgacttacctaacatttggcagtcagtagaaagaattgttaaaaaaaatcaaaatctcaagtttctccgtgtagcaaggaagagatatttgccattgttattcatgggcagctctagaaaatggcagaatcacagacaaaaattggcaagctgccagacattaatctcagtgaatttctgaaagacattcatatgccctaaacaaattccttcaagctgtttctatgtactgtgtaggtctcataactcagaattgtatctcctcaagcacctaaaccattatgttgtagggacaatgagaaaaaaggatatgcaatagaactggggtaagccttttcacagcggctagaacacaaagcaaggatttcccaaataatctgtcctcaaacagctccttttattctcccagggacccaggcagctgactaacaagatagtatctgccatcccaaattaaggtctaaaagcagagcccagggaaagagggaagagagcattcttaggtaagcagcaggtgtgaacagcacaaaaaccaggatcagtgtaaaatttggctacaaatcaacaaataagcaccacatacaaaattatagatgtaaagatacatacgaacatattttccagaaagtagataaaaattttggaaaacaactattttgtatgctaaagaaaattaaagacattacatactctgtaataatcgagactcaaaaaaagagatcctaaaactctagataacagtaatataacacattct

SEQ ID NO: 7600 - DNA, 1108 bp, Homo sapiens
acctttgtaattatgacacaggggatacttaaacaggactttgcttgccaaacaaatataaacacaaaattgctttaagttgctaactgttcttcctgctgtggacattggccatgacccagcaacttggctgctatttcagccataagagattttctgtaggtcctcaaatactatctcaagtaaaaattcttatggagtccactcattccaggttagggtaagaaaacttttctcctaataatgtaataaaattttactttataaaatgaaaataagcaacattctttcatattataaagaacataacataaaaccaaataatcttttggctgagaggaaatgccaaacccatttcagaacatttatgttatttttccatgctctcttcaagccaagttgattgcatacaaatctcctaaggggatgtgcaactgattccatggtcctggctcagggcaaaaaaaatggaaccatgactgaggggttttataaaatatcctttgcccaggtaaatatggaggtgtgagttcacagagacagtcaggtagacagatgtcaggttaggaactccaggctccaaggtgctgatgaccagcagtacctaattacagctcctctagtgtgcacctctctgagtactgtgtgcacgcttgccagcctagaggtgtcttcagtggccatcggggtcctccaacctggagtagcctgtaggcagcatggtgggaagtccctgagaggagaaacattcttaggtgctgtcctgtgctttctggcagttgtttcccttgagacacagccccttttgatccctttatggatccctgtgagtcagaatttggaatgtttcagcctcctaatttaaagcatgttttctttaaattacatttaacttctctacattttataatttttaataataattatccaagtaatatatgcaccgtgttaaaacacacacacacacacgcacacacacacacacacattaccaaaggagagagagaaacagagattgagagagagagagagaaagctttaatttagaatggacctgtgggtccactcccagaggcaaccatttttatttacccttttctagttttag

SEQ ID NO: 7601 - DNA, 1145 bp, Homo sapiens
aagaatttatatccttataaagctataagccagtggcaagaaattctgtgtaatttagagaaagattcattcttcttaaggcaacacttggctatttcaatttcagaattatattatatataaagttgaataattttatttttaaagcagtttgtacaaatctttacattccaccagaggaataagcttctttaatggcatattagacagtttaggaactatattaaacctttaaagctctgaggtcacatgttactaggttcatttcctgataccaagcctcagttgtgagcttcaagccttacggagcagcttactcacactgatgagcattttgaatttaggccacacacacacaaaaaaggcccacagatctaagctcctgacaaaatataacagtctacctacatcccaggcaaaagtttctgagagacccatagctaataaggttataactttgttctgtgttgctcttcattcaaggcataattcaatccgaagacaactcaacttgtcaaacccggacttcaatatccagcagcttcaaaaacaggaacagttgactggaattggtagaattaaaccagagttatataagcagaggtcattggataatgatgacgggagacggagtaacagcaaggcttgtgggaaactgaacttcattttaaaatatgactgtgacttagagcagctcatagtgaagattcacaaagctgtcaatttgcccgccaaggacttttctgggacttcagatccttatgtcaagatctatttgcttcctgatcggaaaacaaaacaccagactaaagttcacagaaagaccctgaaccctgtgtttgatgaagtgtttttatttccggttccctacaatgaccttgaagcacggaagcttcacttctctgtgtacgactttgacaggttctctcgtcatgacttaatcggccaagtggtggtggatcacttcctagacttggctgatttccccagggagtgcatcctttggaaggatatcgaatatgtcaccaatgtgagtccagcatttcttcatttttgtggtggggggcatcttggttagcaaggaaacagattacttacacattatcttgaggacaaagtgtaaaattcctgtcaatgtacatgta

SEQ ID NO: 7602 - DNA, 3214 bp, Homo sapiens
agtattctatgcagcttctcacatcataatatctccatctgtgagccctttgaaagcagggggagtgtcctacttatgggcttagtatccccagcatctattaccatgcctggcacttgtttggtgcacattaaaaatgtatgaatgggccaggcacagtgactcacgcctgtaatcccaccactttgggaggccgaggcaggcagatcacaaggtcaggagttcgagcccagcctggccaacatggtgacaccctgtctctactaaaaatacaaaaattagccaggtgtggcggcgggcacctgtaatcccagctacttgggaggctgaggcaggagaattgcttgaacccaggaggcggaggttgcagtgagccaagatcgcgccactgcactccagcctgggtgacagagcaagactctgtctcaaaaaaaaaaaaaaaagaaaaaaaatgtatgaatgaaagccaaattatttttttgttttttcttcctgcagaaacgatgaccatgggtaagaggactgcttgtgccaaggacaaaataggacaaccatctcacaaagatcttaagtaactttttccatccagcaacatccagacgatttcagtgaccaaatgctcagctgtaaccacagcactaactggccttctttccagattgggtttggtgaacctgaatggtccagccaccttctgcaggtggcccaaggtgatgtgctgcagggaagcatgtctctcatgccaagaaccaagatcggactatgaacaaaaacaaatgatagatatagtgacagtaccaagagtaccaggactcaatgtttcatatgaagcccttggtgatgaggacatagcatctgccctggaaatcgttattccaacataatattattttctagaatgccctggaaggacagaatatttaaaaatatatccaggtgctaaataggcagcagatctcaattcacacatgactacctttgagctaatgactgtctccagaaaataactgtgccccaagaagtgctccagatttgcaaggaatagccccaagagaataccaagacaagcaggctgttccctggaaaaaatctaatgcaaggagggctagttcacagcaaattcactgcctcctcccatgcacgtggtagagagtaccagtatcaacatggccctgttttctgctaaaaccagattttgaggaatcagagacccccaacactactcactcagtagctagcagccccttcctttcaactgggagtgttattagaatgaaaagtaattagttagaagggcatacatctcagtggcatgagcattgtggaatatcctttcctaggcacattcgtccactaagggaacagcctcagaaactggtacagcaatgggtgagatgagatcatggagagagaacacagccatcccctatagaaaggcacagcttttgggcttctctggcctgaatgccttctggggtatttccatatgcaacagcccagagtcatagccttgggcaaccacacatagaggtttccttctcacttcagacacatacatcactttcacaccacttggggatggaaatacctacaagagtgaaggtcaagggccctccccaggcatctcattcattactcagcttccttcctgaccaagtctgccaaccaatggccagctatgcgcctcatcctcattgcttctgcctccacgtaaatgaaaccaaaggcctcagcatatcctgggaggactgggggctgttacctaatggtcctctctgtcccattataggtgcaaggcaccccatccacacatttgcaccactactccaagatagtatttttcttttcacacaatctctttacagcagaatccagagttggattgtagtttaccttcctggaaagctcattatctctgtttgaattaacatttcagcatggaactaactgggcggaggaaggatcgttatacgtcttcagaaagttctcattgccccagctgcctagtactatacaagaagctctactttgatggcagatctaagaaggctataggcctttgtttgtaggaagcagtgtcattacattcaagcttcacttctctgattggcttccaaccactgggattcaaagagaatccaaggttctgcctatgtctgatgacataaggaaaacttggcttcctctgctcaaggttcccctctgctcatccctcctcattcagacatcctccaccataccagtgtttagaagcaaaacatgaagggctagcgccaccaggatagttagcagaaatattgtctgtaaagctaggcagatgagcccagaagaatggtcccagagaaagcagactggctccaatagatatcaggcagcaatcccaataaattctgacatgtccttggcaatggaagcctgggttggagatcctgaggcagctgtgcctactgttccccacctcagaagcttcctgcccagagagccagcagccttgggatactaatgaggatgcaactggcttattggtatgaaatagaaggtggctttgtaggggcaagcaggcaaagagtactatccacatggcaggcaggtggctttgtgtctggaaagctttgcctagccagtacagctgtgagcagaggctggttataaatttgaactccctcagcccatttgcaactctgcctctgttctcttgcattctgtttggttgccctttagtttcctagtaaatgctccttttgaaaaactccaaccttgtcttatttaacttgggggaaggggattctccaatgtcttttccaggataaagaaggaaattaaaataccatgaaaaaatggacatggcagtagaaaggaaacattctgatcagaccttgggaaaagctggtgccgagagagggagaggccaggtgtccccccacccaactggcactgattctcagccccttcctcttacttctgttggcttcaaggagacctgcccttgatgtgtgttgctgctgaagcaccctcccagccagtgagttggacatatgcagcaggcactttgatgtccaggaagtacactggtacatgacaggagcaagggtcagggaggggaggggaaaggtttctacaatgcagatgttttcaaaattctccaacaatcatgactctaaatggtatgatttagggctgggtgcagtgactcacacctgtaatctcagcactt

SEQ ID NO: 7603 - DNA, 1160 bp, Homo sapiens
aaatcctttttaaaggcactttgacatccattatctcatttaagtctaaaacacgaatttcgacctccgcgctgctttctggttccacctggcggcagctgcacaaagtgtttctcttcgaacgccgtcccaagttttacccggaactacttagcccagggtttcctgagtgctcctcgggccaaaagcagagcgcacaaattccagaagaaattaccaacggcgggactatttcagtgctccgagaagtatcaccagtaaccaatcagcaaaaagctctagctcacgtggtgtatattcagcctatcaagctcctgatattcatgaatgctgtcatttccgcttccgcctccttctttctcgacaagatggccacaccggcggtaccagtaagtgctcctccggccacgccaaccccagtcccggcggcggccccagcctcagttccagcgccaacgccagcaccggctgcggctccggttcccgctgcggctccagcctcatcctcagaccctgcggcagcagcggctgcaactgcggctcctggccagaccccggcctcagcgcaagctccagcgcagaccccagcgcccgctctgcctggtcctgctcttccagggcccttccccggcggccgcgtggtcaggctgcacccagtcattttggcctccattgtggacagctacgagagacgcaacgagggtgctgcccgagttatcgggaccctgttgggtgagtggtcagagaaagttaacattcttttcttcctcccacttctcatttatctcactcccctaactcattaattctttaattcctggtgtcctaccgtcctttcctcccatccccaatgacctcttaatctatatctgcatcctaccttttgctgtgacttatcttctcaagcacttgcatctctcctctctctcctgccggattgctgtcactttaagcgacataaaatacacaaggagtagttgtgtcatttactgaatattttatgccagtggtttacatttatgccagtggtttacattttacataaacagcagtttatggcaagtatgatgggctgcatctaccaaaaatgagttcacacgccgagtgggaagtcaggaacccttgactccctataccagtgaccacatatttctccctta

SEQ ID NO: 7604 - DNA, 1339 bp, Homo sapiens
ggaccagatggctaaagggaggtacagatgaagctcctgacgtctcagtgtctgaaacttggccactatattagcagtctatgtaaccattaaaatattccaggtagctctgcagattaaattacagggagaaagtgtagaggctgaaaaaaaaggccgtagagtgaaggtctggaataggctagtagtggagagtaacaggcaaaaggagaccttgtaaaggaagaataaaccctatttggtgatgattagagggagaagttggcgatcacaccacagtttcagttccctggagaattctggtcccatcgatgcaccggactaaacttggagctaatgagttcagttaggtgttcattgacattgaagagatcatcaaaagcatttcaaaagtagtcagaggttgttgggagccctaggattatataacacatggacgattctctctttcacaggaactgtcgacaaacactcagtggaggtcaccaattgcttttcagtgccgcacaatgagtcagaagatgaagtgagtgggaatccaagctgtccctctgcagtttttagctgttcatttgctcggctcccctcacggtccctcccacactcataactagagctcctgtagccaaggagcttcttcccatttgtacgtacttcctgggcctcttctgtttattgggggtggcctcttgtcctttttaaccaatttttctttggacttctggcttcttagcttgctttcctgccttccctcttaggtggctgttgacatggaatttgctaagaatatgtatgaactgcataaaaaagtttctccaaatgagctcatcctgggctggtaagttggggaggtgggggctggggttaatggaaggtctcttcgtgattgccggtgtcttttgctactggactggatcttatactcttccttttggaggcaagagtattgcaagtgtattactgactgtgagcagtggctcaatgcctgtaatcccagctgggaggctgaggcaggaggatcacttgagcccagtagttcaagatcagcctgaacaaaatagtgagaccctgtctctacaaaaacattttttaaaaacttagccaggcatgatgacacacacctatagtcctagctattcaggaggctgaggctagaggatcacttgaggccaggaatttgaagttgcagtgagctatgatcatgccttgccactgcattccagcctgagtgacagagtgcgaccctgtctctaaaaaacaaaaggaaagtgtgttacctgtaggaactgtgaattcagtgggttttgctggtggttctgatcctgtggggccaggatat

SEQ ID NO: 7605 - DNA, 2298 bp, Homo sapiens
cctctcccaaggccatctgtttactttggcttctccttccgcagcactttaatgggagtccctgggaggaccatgggagtgatgttcacgcctctgacagtgaaatacgcgtactacgacactgaacgcatcggaggtgagtaacctttccatacactcgcgagaggccataggcattttcagggaagggggctgctagtctgcaacatggacggaggccttgggtggtttgaaaagggactattgatctaaggtttgtgaagactagaagtcacagtcatctcttgtataaatgggatttaaggagttatttgagaaactgttaaaggtgggaaatgatcagcaccagaggccacataccattcacatgagatcaaaaccggtgatgagcataccaggtaaaaggagttgagctctattaggaggaagaaaagctgataagggcacagcaggaagtgtgactgagcagactgagtctaaggggagttgggaaacagagttagtaggacgttaagaccatctctttcctggtgggatgactgaattctctctcttactgcccaccactgccgctgccaccctgccaaccaacttccatagttgacctgatcatgaagacctgctttagccccaacagagtgattggactctcaagtgacttgcagcaagtaggaggggcatcagctcgcatccaggatgccctgagtacagtgttgcaatatgcagaggatgtactggtgagaggggaaagaaaaaacaaagggggaggacatagttctctatcctgggatcactgaggcatgtgctgatgaaatggtagggctcagtggttataattaactgcctcatcgagtctttgttttggtactcagtctggaaaggtgtcagctgacaatactgtgggccgcttcctgatgagcctggttaaccaagtaccgaaaatagttcccgatgactttgagaccatgctcaacagcaacatcaatgtgagtgcccttcctgagccccttcttgcctggtttcttcccccacctcagcacatacactcaaatgtgaaaagagttgggtgaggtgacctggagtaggatagagacagggcttcacctatagccccactgaagtccaggttgggaggaaggaagaggtgtgttatgcgtggttggagacttccttccttctcccatgattccattgtctcatttactgctgatactactgtgacttactgtctaaattcgtgatggaaagaaacactaaaattcagaggttaatgaaaatgcaattacttatttcccccatctgagttcacagaccccctatattccatccatgggtttcagctaaggcacccctagtctataagtgtatcagtagagataagaaagccttctcaagcatttcctttctgtcttctacctttttgacttttattcagtctctcctagctgtcatttatccacagctgtcctcatacccagtgtctaccatagagctggccaaagccagcctttttgctccctttccacccaaccccccactcattgtgtattctttgtcttccaggaccttttgatggtgacctacctggccaacctcacacagtcacagattgcactcaatgaaaaacttgtaaacctgtgaatggaccccaagcagtacacttgctggtctaggtattaaccccaggactcagaagtgaaggagaaatgggttttttgtggtcttgagtcacactgagatagtcagttgtgtgtgactctaataaacggagcctaccttttgtaaattaatttcatcttatgtgagtttattgccgggtggaagggaggaaaatgttttagatcacacagaaactaggaagtgaatattgtaggtagagaagttggttatgtgtttggcatgttactgttttaccaaactgttcttttggttttcaatatggaaaggtgtccattggcaaaacaaccttttcttgaggattcatgtgatttctacaggaaatgaaaataagaatccatggagaaaaaatagctaagaaaattggatgcttaatctgaactaaaagagtagagtgtgtagtcactatcttaaaatacattaatagtaagatggagctctttgccactttggttcggggaggcagaattaagatctgtgggttaaagattaaagaggtttccccaaaacttcagaaaattcttaggtgctatctgtaactcgaggatagagccttgagttatactgaggtctgccagtggctcaatttaagcaaagactagatggcatttcccagaggcc

SEQ ID NO: 7606 - DNA, 1163 bp, Homo sapiens
acatgcatcttactttgtcctttgccatctgccacctctttcctgccacttctcccaattggcctttgttttacttccctttgtgattcccctggcatctctgcttctcacttgttcttccctcatgtggtttgggtgtctgtctatccttccctggctctaccattcctgtcctgtccttttctctgtctgtgcctgtgcttggccccagcggactacatcgtgatgcagtttggccgggtagcagaggatgtgttcaccatggattacaactacccgctgtgtgcactgcaggcctttgccattgccctgtccagcttcgacagcaagctggcgtgcgagtagaggcctcttcgtgccctttggggttgcccagcctggagcggagcttgcctgcctgcctgtggagacagccctgcctatcctctgtatataggccttccgccagatgaagctttggccctcagtgggctccctggcccagccagccaggaactggctcctttgcctctgctactgaggcaggggagtagtggagagcgggtgggtgggtgtgaagggatgagaataattctttccatgccacgagatcaacacacactcccacccttggggtagtagtgtgttgtagtcgtacttaccaagctgagcaacctcttcagctgggaaggccgcaagaggcatagagggagaggaagcacactgcagggctgctgtggcccagtcgtccgctcagccaaggagtcagatggcaatgggtactccagcaggtaggggcacagtgaatgtgtgtatgtatgaaggccacatcaactttatgtagcaaagggcttggtggccaagcctggcccttaaacaactgcagaaagcccttcaacttcagaaggcctcactcaagcctgagagaagttgggagggtggtggggacaggtaagtggcaggaccctgtcaggattgcaggtgcctggcttgctgtggctatgggaatcagctggtggctaggtttctagcgcatttgatttctccaggtttgctgtgtctcacagaggcagtaggaacccagctctcagggctgtcttggtggatgggccctgcaagacacaggctcagcatgcagaagtgcatgaacagggtccctggatcagggttgttctgggagtcct

SEQ ID NO: 7607 - DNA, 1969 bp, Homo sapiens
tggatcttttggtggagtcaggaaagacaggctgagctttctagcctaagtgtggagaaggatagcctcagccacaaaactctgtcaggcattgaatgacaagcatcagtagctgagtgcactcctggtgatcctggttttccttgaccactggccctggggccatgggtgcatggactcgtaaagctgctagggcccctagaaaccacctgggttcagcctctcccacaataagagttcttgcccttcataccctctacctggatggatggtctttgggcagggaattaatgacagaatgagcagtccctaatggtattgggcagttgggagtgagtttaggcagcttctctgtaaccgcttctggggccacaccccaaaactctacaccctctgccccagaacaattctgcagagtggtgaagttcacttccccaactcttctccaagtctagctttcctttccttctggctccaaggtgctctgtgtccgtctgtgtatgtgtgtgtctgtgcgtctgtgtgtttatttggggaaaagggcaatcagcaatcaactgaggtttcttaattgtgattatattcctgagaatgaatgagtaggaaaggaataaggatgttgttatgatcgcctgtggattttgtccattcatctcatgctctctgaacagaaggtatacctgggaagataccagctttttctctcagggttctgagtcagaggacaccatccaagaatgttgttagcttttcagttcccgctctgcattgcctgaaaaaactggtatgttgcacgtatgcttttggttgaaattgaacatactctagtgaatgtgccttaaaaatcaagacactagttcagaggaagcacataatgtccagatctatggcgaacacaggtgttggaagccaggactgtgataatcagaagctataagagaactttcggagcctgcctccttcagtgacaagtagggcacaaaattctagaagcagaaggttgtttttttttttttttctccattctgaaaatagcaggacatttacctcttaaataaacttagcatttagaggtaattctaaatttaacaagtgacagggttggtttcaaagaaaaaggtccatgctttgcttacaatggagtctgcagtgaggggagatgctgggatagccatttccatggctctgttatgcaagcacaaatttcatctcctagatggacttcctggttttctcttactgcagtaacactggccttcccttctctaattccttaccccagctgcggcatccctgtgttaactcaggatgccaagtggccctcagattacacttctccagatagctgaatgagtctgctttcactgtgactgggacctgaatgacctgcagtcagggcccagagttgggactctatactaccctgggctctggtctgtaggtttgtagtagccaccggtaataagccaagggctaggctcttgtttgagtttatggccacctggaattttcagtcatctcatgatacaggcgggaggggcagaacagatagattacgacaggtttggtttttaaattttccaaccaagtggaaaggcaagttggtcttatagaaagcactactgcacttagtagctatgtgattttgagcaaaccacataatctctctaggtccattttcctaaccacaagataaagatgttacattgtcaaagcttgccgtaggatttggggtgaatgaaaattattccttgctttcatcactacctttatagctctcatcactacctttatagctcatcactgtgcctttttttctttcctaagaaagacatcacatccctctcctctcctcctctgtgctcctgtccctccctccccctagcaaggtccaggcaaagctggagatgaggctgagatccagagtttcctagaacgcaacttaggatggctaggaaagggaagcctg

SEQ ID NO: 7608 - DNA, 1103 bp, Homo sapiens
agaatcatagcatgtttctgtttaaagagaaattgagaccaaagaggttaagtggcttgcgtaaaaccacacagtgattaataccggtgccctaattagagctctcacgtgttttcactaccctggatcagatcacagttataatccagtcttcctaatccttcctctcccactgacagggttagggctacaaggaggagagggagtggaggttggaagggataacactgaacattctctcttgtcctctctggcccacaggcaacaaaatgaagtttctccacaagaagaattaagcctccttctcagtagcagagtccagtgccttgcagagcctgaagcctggggagaaggcccagcctgggaccctctgggctgctgtggctcctctgcccccacagatcctatcctccaagccagcccacctctgccttcatcatatcccaggatactgtttgtaaataatctgctgtaagctttcttaactgttttttgtaacaagcaaagagaatatggcaaatatttgtatattcccaaggggccgggtgctttcctgtcctgccagagcatggatgaagtttcgctgggtgctcgtgactggccagttttgtgcagctgactgtctcagccaaaccactgatcttccctggaggccttcggcctgcctgcctgcctgaggtccccgctgccagtcccgggccctggagagcagatgctgtcttgttatgtacaggaggaccttttaaaaaaatcaagtttctattttttgctggtagtccgcatacccataccctctgtttttgaaaggcaaaggccaatcagtccccatttgtagcatggcaccagggtcttaggcctagtcctctcattcctcccaccctccgagatggtcagtgtgtcatgggaagcccacccccagctctgccagtgctctctgggcctggctcccagtcagtggtggccacgatgcggtacagggcatccctccttcccatctacgggtgttctcaataaacaatgtacagttgtttgggcccagagcctcatgtgttccttggctttgttatctagttctctctcctgggaatgggctgggactggcc

SEQ ID NO: 7609 - DNA, 1320 bp, Homo sapiens
ttcattttaataccttgttgatttcaccaactgttgctggaagattcaaaactggaagcaaaaacttgcttgatttttttttcttgttaacgtaataatagagacatttttaaaagcacacagctcaaagtcagccaataagtcttttcctatttgtgacttttactaataaaaataaatctgcctgtaaattatcttgaagtcctttacctggaacaagcactctctttttcaccacatagttttaacttgactttcaagataattttcagggtttttgttgttgttgttttttgtttgtttgttttggtgggagaggggagggatgcctgggaagtggttaacaacttttttcaagtcactttactaaacaaacttttgtaaatagaccttaccttctattttcgagtttcatttatattttgcagtgtagccagcctcatcaaagagctgacttactcatttgacttttgcactgactgtattatctgggtatctgctgtgtctgcacttcatggtaaacgggatctaaaatgcctggtggcttttcacaaaaagcagattttcttcatgtactgtgatgtctgatgcaatgcatcctagaacaaactggccatttgctagtttactctaaagactaaacatagtcttggtgtgtgtggtcttactcatcttctagtacctttaaggacaaatcctaaggacttggacacttgcaataaagaaattttattttaaacccaagcctccctggattgataatatatacacatttgtcagcatttccggtcgtggtgagaggcagctgtttgagctccaatgtgtgcagctttgaactagggctggggttgtgggtgcctcttctgaaaggtctaaccattattggataactggcttttttcttcctatgtcctctttggaatgtaacaataaaaataatttttgaaacatccatcagtgtatctatctatgtctcctagttttttcctcctccctcttttgctgtataatgagattgaagatataaagacattttgtaccctgttctgagactactgttttataccaatctaaccgtaaaatattggtgtaaattatgtgtttgcatgtatagacagaatatatgaatttgggggtggatctctgaaaagtatactaatattttgataaattgggagatttcaaattcctgaaggagtacttgttctgagaaattcttggcccaaaaaaatcagaattaaattcataaaagtgaggttttaggagccattaatgggattttggggtttagtaaaattttaagcacctacaaatatataa

SEQ ID NO: 7610 - DNA, 1180 bp, Homo sapiens
atctcttatgtcagtgccagcacatgctgagtgttatgtgaggttagtgcttattattattcctggtggtggtagctgtgggaggagagaagctctgggagacaccagtggtggggctgactaggcagggcgagggaggcaggggaggaggaggcttggaggctcatgacagggctgatttgggtcaggtttgtttggtgtcctggagctgaaagacctctttgccagtccctgtttgggaaaggggggtgtggggggctgtcagcttctccagcttcagacttagttcatggtttcccccttggccttgcactaacgctctctcttccttttcctttgcccctctgacctgcctggactgctcccgctctgccagagatcacctcctacaccactggattgccctgctggctgactgccccatcactgcacacatgtatgaggatgtggcactgatcaaagaccatacacttgtcaattccttgattcgtgtgctgcagacattgcaggagttcaacatcacgctggagacgtcccttgtcaagggcatcgacatctgacctcccagcaccagccagcagcaggactgagaaagactcaccctgcagctctgaccttttttcccaaagggacttaagcgattgtgcaggagtaggagacaaaatgtacactcactgtaaaaagaaaactagaggatttttggaataaataatctattttagagtttatttgctgatttgctttttacacactttcatgtgaaagagtgatagggagagggagcgaggctggtgccgcttattttgaagctggtgccctccctcgccgtggccacatgctggaagcctgaggcctccctggactgagcctgtggcactgcgtgcgggacagttatgtttccttgccccgtcgcattaatgaggcccttccacatcatttttaaactaatgtttttctatattaacattattatggatatttggctttcataggccacacacaggtgtgctgcgcgggaagccccatgctccaatcaaagggatttttagtagtgcctctaagcaagcaccgatgagtcagtcccacgtattttcttttttgtcagtattgtttgggaaggagacatgccgggatgtgtcatcgtgccaaataccacatttcctgttggcacagtttcaca

SEQ ID NO: 7611 - DNA, 1174 bp, Homo sapiens
atgaaatcactggccaggagtcataaagattgctgtgttcttatcctttccttaactacatatttttttttttttgagacggagtctcgctctgttgcccaggctggagtgcagtggcgcgatctcagcttgctgcaagctacgcttccttggttgacgccattctcctgcttcagcctcctgagtagctgggaccacaggcgcccgccaccacacctggctaatttttttgtatttttaatagagacggggtttcaccgtgttagccaggatggtctcgatctcctgaccttgtgatccgcccaactaggcctcccagagtgctgggattacaggtgtgagctaccacacctggcctttcttaactaaatttttaaagcatgcactcccttgtaacctgacctacatgggtataaatatattctgtgtccttggggctaattcatcctgtccttcccagcccaacagatgtactgtgcaggctgtcagaaccctctccggttgtatgtaatcctgctcactgtggttatttaatcctgttgactgcttccttgtagaccaagaggatgctggtggaaaagatgggccgagaagctgtggagctagggcatggggaggtgaacatcacaggggtggaagagaacaccctgattgccagcctttgtgatctcctggaaaggatctggagtcatggactacaagtgaaacaggtaatgtatgtcttgcctctcattgctgagcaaattgtcttcctgttttcagttactagctttcccacactctttttgtccagctgactggctttgaagaatggtgcacagtgccctggagtgagatttgaaataaacaattaaataaatgtgatccaaactattttccttaaagataggctttataaatctgtgtgtttgtcagacttttaaaaagaggcatctttcttcctgggggtagagctgaaggccaacctgataggtcctgtttggcagctggccctagtctagagatagaccagaaagagagaagttggagctcaggaagtaccagtcatacactaaaggttcttcactaatcatatattcacagtggaaaaaaagtctgtcattaacatttcttttgtatgcagatggtttaactaaacatttgagagaaggcctcaggaagttgagtaagtttg

SEQ ID NO: 7612 - DNA, 1215 bp, Homo sapiens
gttttctagtctggcaggtggggacaggcattattcccagccctgtgtgagcattttgtattgtttctcctaatcctttccggtgattctttctccagccttgagtagtttctttacttgcgtgaactgacccattaccctgctgaatgccctgcagatcccctggattctctctcttctctggtactgttcatatgaactctagccaccttggtctccttaactcagggagtccaccagtctctgcctagaactcccctccctgtgccacagcctggaagctttctctaagcagttagctgggatagttctaggggttacctcatttgttacctgtttctcagggtcctgcccttcattgcctgatgtccagtattctgaagtttatcattttatattattttgcatgggttttttcctattaggcaggaaaatcagtcccttttactctatcttggctggaaatggaagagtagctagattcttaaagaatgtttgacttgatttatttgtgtgtgtatttatgtgtgtgtgtgtgtgtgtgtgtgtgtgtattctcatccagagaaagcaattgagctgcgtctggcaaaaattgaccatactgcaattcacccacatttacttgacatgaagattggacaagggaaatatgagccgggcttcttccctaagctgcagtctgatgtactttccactgggccagccagcaacaagtgagtcaaccccagggattcactaatccaactccctagctgtaatagggtcatctagtatctgggctagggctgttacccctagaagaccttgtacttttctaaagcagatatggagaagacccagactatctaggtggtttgcttatttgaacaagaaagtatgtgacagaatatctttcagttctgcctccactatgcagattgggatagctccatatgtctaggacctgcaaaaagctgcagatgggttaaaatcatctcatgcctggatcccattcaacagcaagctagcattgtatttaataaatggcagttgaaataatcagaacctgaactgaaaagtaggtaagttagcagaattactcattagttacttttgaagatgactgtatcaaagcccagatagagttaagtgaatatagttttagatctatatgtcaagtgtttgtagatgtttcaagagagacatgttccatgaggaggtgtctctctcatg

SEQ ID NO: 7613 - DNA, 1246 bp, Homo sapiens
cgcccactcttctcgcacctcctcagccctccctaaaggagtctcaatcccgggggagtggcagttgcgggcgaccaagcagtcaccggctgcgctgcggcgacctcccgggaagctgcggccggcggggtccgaagagcatcacgtcatcctttcccccaggagcccgccccctcccagacggcgcctgcgcaggcgcggtaggaggagggtcacggtgggggctgtccacgcgctctccgcccttctccaggctcgctcgggccgcggcgctctcggctagctgcagcggcggcggcgcggaggggaaggcatccaggatgcggtgcggggcggcccggtgcccccccgccccgtcacggcagccgcggcggccgaggggaccgggccagggccgggggcggcggcccgagccgcggtagcggcggcggcgggaggggcggcctgagggcggacgggcgggcgcccgggttgcgggggctcggtgccgctccgcactgcccggccggtctcggccccggcgccatgagtggcggcggcggcggagggggctcggcgcccagtcgcttcgccgactactttgtcatctgcggactggacacggagaccgggctggagccggacgagctgtcgggtgagtgcgcgccgagcccggggcgctttcccgcgcccgctgtcgtcggggaccccagaagaaaccttccttcagccccgctttgtcccgggagccgggcgagtgtcggccgggaggaccagggcgggcgcgggcgaagggggctttggactggaggggggaaacggatgaggggctctgagccatgaggggtccaaacctacggcccgctgcgcagtggccacgtcttcggcgaccagaaagagggagggttgtgtgttctcagtttggtgtaggttgagtgacttcgtttaaaataaaggaaagcttgtcctctggcacccattagggagggaaggcgtcccacgtcctagtgaaagtaagttccacccagacttaaaaaaaaggaaaacaaaaacttggtgagtttatctggccacttcccaagaagcttgtgatactagttcctcaaaaccgttataccccagccctgggctgggccccctgagtcagattgcagctctgcgcgtctggatgggatatgaagtaataaagtgaacttgggcggcaccaagaagagtaggaactcccttagccttggaaagggcttgtatcccggggccatgccttttt

SEQ ID NO: 7614 - DNA, 1268 bp, Homo sapiens
gataattttttttttttttgagacggagtcttgctgttgcccaggctggagtggagtgcgtggtgtgatctcggctcactgcaaactccgcctcctgggttcaagcgattctcctggcccagcctcctgagtagctgggattacaggtgtgtgccaccgtgcccagctaatttttgtgtttttagtagagacggggtttcaccatgttggccgggctggtcttgaactcctgacctcaggctatatgcccacttccacctcccaaagtgctgggattacaggcatgagccactgtgcccagcctggtattgataatttatattcagataatttgttatggctctttaatatcccacaaggggctctaaaaagcaaacattcaagagtatgtagtttttagacattaagttaattattttaaacagtgacagcaaaacacaagtgattaaatatagtttatttgttccaatgactaaattttacctcatttattaatctggtcattaaggaatatatttaataatattatgtaattattctttttatgcatgatacacctagaaaaatgccttttgtttctattgatggctttgttgtttggagctacttttgattacttattgcagtttcccaatttagtctttactttatctaactcacaaagtaaaattaactgatcacatggcaactactgtatttaaatagttctggaaaaatgaaagtgctttttgctgcttggtaaatgggtaatgcccttgattccttgactgtaggacatagctgatctaaagtactctgtcagttttaccttcacccatgactgttattagttgtcaaagttgaaaagtactttagctgtgagaaatccttgtatgtttttattataagaggtataatcatcctcaaagcctgtttttattacatgatgtggactgattattttttctatcacagtgttaacagatggattttattgtaaatacaaagaaaacatattgattattgtagtattcttatgtcacctggccttttgcgtgagattatttattatttctagcaaggctttcttcctttcttattgcccagagactgactgatacatcttttgttatttttacacataaattaaacatagcctttttggacaaattcactaaatattaatgtataaaatgtaattgagtaaatttttatcagaattttaaaaataaaagagcttagactcagtagaactcagtagaagcttcactatttactccagcgtgtgt

SEQ ID NO: 7615 - DNA, 1100 bp, Homo sapiens
ttgcagtgagccgagatcacgccactgcactctcgccttgggggcgacagtaagactgtctcaaaaaaaaaaaaaaaattagcggggtgtggtcatgtgcacctgtatgtagtctcagctacccgggaggctgaggcaggagaatcgcttgaacctggggaggcggaggttgcagtgagccaagattgcgtcactgcactccagcctgggcgacagagtgagactctgtctcaaaaattaaagaaaaaagaatgctagttgggataaatgggaagtgcagtgctatacaggctaatgaaaacatccaaaaagttttagaatttaagtcatcaaattccttaaagttcaatataagggagtgatgagaaataagactggaaccagttatgaagagccttttgtgcaagccaagcaatggaaatgtattggagcctctttgatctgtaattttaaagtatatttatttgcagaagtttaaaatggactttttttctttgtaggcacacaagtctctgaattttgtctcaacactgctccagattactatgtcggaacagctggatttacctgtgagacaggcaggcaagtttcctaaattatattgagtgtatgtaatctattgtttaaaaggttcataatcgaatagcagaagtgtcttgggatggccctttggcaattttttccccccaggtaatttgtttaccttcagtgtttacagctaacatcaggtaccttgatatctggtggcagagtttaaaggaataatttgacatttagttgaattaaaatagaagcttcaaatagaaattgatggggtttattaaaaggttctatgtatttttagagtccttccctgatgggtgattataagactcaaacatgtttgtttatatagtcatctcttaccacctttttgcttttatcgttttaacagtttaaaaagtattatactatttttagttcctgttcaacatattgagccacttccctcagtatcaaatagtctgaaaatgtggcatactacttttctgaatattatgttagtctgtaaaaaataatgtagtgtacatttttaattttttttattttttgtaggcagt

SEQ ID NO: 7616 - DNA, 1121 bp, Homo sapiens
ttcatataaaacttgtgggccgggcacagtggcctcagcccccggagtagctgggattacaggtgtgcacgaccaggcccagctaatttttgtgtttttagtagagatggggtttcaccatgttggccaggatggtcttgatcccttgaccttgtgatcttcccgcctgggcctcccaaagtgttgggattacaggtgtgagccaccgcacccagcctaattgatgttctcaaatgaaacttgtttattgatgataggaatgaaaaataaaacacctgtatttgtaacatttgctggttttcgtttgctcagtgacttattctgaatcatatatattctgtgtacatctaaaatcactgggttattttgaaattagattttgtctaaacagctattttcctttctatgggttagcaaaatcttacctagttaggattttttccttactgtttttttttggcttccagggtacagcttactacatgcattcatcacatcatcaaacatgattatccaagccgctggactgccattgtggacaaaattggcttttatcttcagtccgataacagtgcttgttggctaggaattcttctttgcctttatcagcttgtgaaaaattatgagtaagtgtttctttcaactcctatagagctttgagaagtaggaaaagttgggaaaatttaagccaatttgaacatgtaaaattatatttagcatagataataaaattagtgaattatatggtaatttcaatttattattttctttttgacatagcattctaactccgcagttgcttttctttattctactaagaaactccttgcacccttttttcttaatcaccgtctctttacctattcaaaaactaagttgtctctaaagacggcctcctcaatgtgtgctgataaaagtccttcaggtaagtttttctaaaatgtgaaggtgatcagaatacattgaggattaaagctctttattacttgtggcttttttttctgtgaatttttatcttaatttaggctcttgattaacttcctctgattctttaagaagaattcattggaatttcatgtgatcttctttaatcagtgtgttttgggggattcacactcacc

SEQ ID NO: 7617 - DNA, 1133 bp, Homo sapiens
atgtttggctttaagcttgtagaattattttaaaaagcatgtcttttataaccaactagtgaagcagtgaggatgcctctttgatttaaatagggttaatacttttccaagtctaaccttctactatgaaaggccaacatcaggccaggtgcagtggcgcacgcctgtaatcccagcactttgggaggcggaggcgggtggatcacgaggtcaggagatggagaccatcctggctaaccccgtctctactaaaaatacaaaaataaaattagctgggcgttgtggcggccacctgtagtcccagctacttgggaggctgaggcgggagaattgtgtgaactcgggaggcggagcttgcagtgagctgagatggcaatagagcaagactccatctcaaaaaaaaaaaggccagcattagtgaagcattcacatttttgtcaatctattctcatctcatgctgttcctcctatattgtattatctctatcattaaataagtgtctttttaaaggaaacacttcaagttgaagaagatgatcgacctgagttaccatggtggaaatgcaagaagtgggccttacatattttagcaagactttttgaaaggtaatctcatccatatatggtgatttaaattaatttattaaggttttgctttaaagtgctagcataaagcattataaagaaacaatgggcattttgatgttcttttagatatggaagccctggcaatgtttccaaggagtataatgaatttgctgaagtatttctgaaggcatttgctgttggtgtccagcaagtaagtctgtttttagtttttctcagtggaaacatggcatctttaagttaatttatatattgcttattcccagtttctttgacatctaaagagtgcctgtttggaccctgtaccaggtctcaaacatttttggtctcaggatctctttatgttcaaattacttaggataccattgggttctcatttatgtgagttatacctagtaatatttatcatattagaaattagagtaaacagttcattaaaatataataacaggcctattatatgttaagacaataatttttttttctcttgttgcccaggttggagtgcagtggcgtaatctcggctc

SEQ ID NO: 7618 - DNA, 1402 bp, Homo sapiens
tgagagcaagggtatgttttaaagctgcattatttatatacttttgtcttgtaatgaatgactctgtggacttttatattgaaacttttaaatgttcactttgaagcctgtgtcttattttaggtttctgtttaatgtaaatctttacatggctgctgtaatgtgtgcataggtttcatctgtgtctggtagcagtgtctgtctgtgtttttcattcagatcttgctatccacacaaacatcatgcggccaaagagtaacttgggatcatagtactggtctagtgttgtctctggacacatctaccactggccagcctccaaattcccacacacagaactcagggaatagagattagcttgggggaatttaaggtaaggtatctacagtaactcactgtgtttttacaaaaggcttgctgggtacttcactatttttgtgaagtgaagttcaaaagtgatcagaaccttcaaacagccttagagctaacaagaagatgtctgattgatgatagagaaatgcctgtgaaagtggaagctgccattgcccttcaagtattgatcagcaatcaagaaaaaggtaaaggatttttgtatgtcaagaaaagtgaatgttggccaggtgcggtaggtcacacctgtaatcttagcacttcggtaggcttaggtgggaagagcgcttgaagccaggtgttcaagaccagcctgggcaacatctctacaaaaaaaatttttaaaaattaactggacatagtggcatgtacctgtagtgccagctacttgggagtctgaggcagcaggatcactagagcccgacggttcgaggctgcagtgtgctacgattgccactaccctccagcctgggcaacagatcaaaaccctgcctcttataaaatatatatatatatattaattgtaaaaagccataatcctagaaacttggcatacttcctttttatgtgaaagtacttttttaaaaaactcatcgatatttgttatatcaggttttaagaagttttaggggttttacgcaagttttttactctttctcttacagctaaagaatatatcacaccattcatcagacctgtaatgcaggctcttcttcacattataagagaaacagaaaatgatgaccttaccaatgtaattcagaaaatgatctgtgaatatagtgaagaagttactcctattgcagtagaaatgacacaacatttggtatgttgtttgaacctaccatatttgcaagcattttaatgtagctctcagtatgttccaggttgtgtcaccagtggcttgccttaccttatagcagtcaacctttttggcacctgggatcggtttcatggaagataatttttccacagatggtccgggggagatggctttgggatgaaactgttc

SEQ ID NO: 7619 - DNA, 1402 bp, Homo sapiens; identical to SEQ ID NO: 7618

SEQ ID NO: 7620 - DNA, 1503 bp, Homo sapiens
agagtctcgctctgtcgctcaggctggagtgcagtggcgcgatctcagctcactgcctctgcctcccaggttcacgccattctccttcctcagcctcccaagtagctgggactacaggcacccgccaccacgcctggctaattttttgtatttttagtagagacggggtttcactgtgttagccaggatggtcttgatctcctgacctcgtgatccgcctgcctcagcctcccaaagtgctgggattacaggcgtgagccaccactcccggcccgtcgtgagcttttaatagctccatgaagactactagactttctctaaaattagatttcccagtgcagtgcctcagcagtaaatattggtcatctaatgctacaatagggttaattgaggcaacaaagaagttaatatttttagaatgtttgcatgctattaattatagtcttagaatatcttgctatctttttttgtagtgcattcccttattcgtggaagcagccttagaaagactgacaagagaggttaagacaagtgaacttcgaactatgtgtctgcaagttgcaattgcagctttgtattataatccacacctactactcaataccttagaaaatcttcgcttccctaataatgttgaaccagttacaaatcattttattacacagtggcttaatgatgttgactgtttcttggggtaagtgatgtattgcaattttactacatttgctttgggaggaactctgcttatttaagaaaagaaaacagttttttttttttttttttttttttttttttttaggcttcatgacagaaagatgtgtgttctcggactctgtgctcttattgatatggaacagataccccaagttttaaatcaggtttctggacagattttgccggcttttatccttttatttaacggattgaaaagagcatatgcctgccatgcagaacatgagaatgacagtgatgatgatgatgaagctgaagatgatgatgaaaccggtaagggattttcaatggaagaagacaaaacttatctacttagaaatattaccgcactgggccgggcgcagtggctcaggcctgtaatcccagcactttgggaggctgaggcaggtggatcacacggtcaggagttcgagaccagcctggccagtatggtgaaaccccacctctactaaaaatacaaaaattagctgggtgtagtggtgggcacttgtagtcccagctacttgggaggctgaggcaggagaatcgcttgaacccatgaggcggaggttgcagtgagccaagattgcatcactgcactccagcctgggtaacagaacgagactccatctcagattaaaaaaaaatatatatatatatcactagcccttctcccaaataaatgtgggatcatacccaaatgctttcattcacagaaaagacttcctttcttctcactagagtgatgtaatcaggaacttcagctgtattaccaacatgtagaacagttca

SEQ ID NO: 7621 - DNA, 1045 bp, Homo sapiens
tataagactgtacactatcagtgtataaattgataaaatattaagagaaattattataagggtttcaacataagatagctattgctatttttgtcttttatcatttactaacttagccagccttttaaaaaaaatcttacaaaaggtttggtgggtgtaacggtagtgtgttcatactgcgcagttctttttcagatgtctagtattaagaacacattaaatcaaggttggttttcttggactcctatggaaattttcatttctattcattattgaacatgtatttaaacaccaattcctggagctctctcttgtcacttgtgacttgtaatttactgacagtgattgagatgattgtcaatttgttgagtaacaaaatatgtcattgttataaaagtacttatattatgacttggcagaggaactggggagtgatgaagatgatattgatgaagatgggcaagaatatttggagattctggctaagcaggctggtgaagatggagatgatgaagattgggaagaagatgatgctgaagagactgctctggaaggctattccacaatcattgatgatgaagataaccctgttgatgagtatcagatatttaaagctatctttcaaagtaagtcaacttgttacatgtggatccatttcattgaacaaatctgttgtagtttctgcctgccctttaaaggaagagtttggaggatatcaaacccagactagaaaaggctggttaggcaaagtaaccaaaattatttctaaggttgccatagtttctgagtattctttattcatcctgttattttacatttagattgtaattttggaagattataggaaaataatgtagttcaaaaaagtatacagtgacagtgcctctttgctacttctgattcccaatctcccagctttcctcagaagtaaccactcttacgtgtatacctgtttgttgtatgttattatttgtgtgtatccttttttcctgcccaaacctatacttaacgtgttaagagtatattagcatttatggcatatgat

SEQ ID NO: 7622 - DNA, 2079 bp, Homo sapiens
tattctctacataatgcatgctcccttgcccttatacattggagaaatcatggattttggaacttcctggccactaatgatggttaagctactggcttgtttaatgttttgtcagtttctcaccaagttagtagatgattgaatgccctactaaaattttatttgttttctagaatccaaaatgattgagaagcatggaggatacaaattcagtgctccagttgtgccaagttctttcaattttggaggcccagcaccagggatgaattgagttatctctttctttcctgctgtgtgcttgtagtgaagagcttgtgttcctcctagtagtggttccagaactggttcatgttatctattctaaactaataatcaatagatggacaaaagaaacaacaaccccaggagatgggacctgatcatgcaacctggcactggaaaagaaatcagcgggattttgggggtggggggggatgggaggtaccttagagggagtattttctttattttttgaagaaagtaagatcctgactctgaagcttcaaagtgacactgtggaaatctgaaacgaggggatgtcatgaaggcagcttttctttttctgaggaaaaaataggcatgggctacaggactatttaaaatgtctcatttacagtataaaactcaaaggtagatgtaatttttacacctatgagtatttgtccaatttctgtctcttcctcaccattgggtatctattctttatatgtaaataagataaggtcatctgatagccttattcagtcttcatcattttcatcattgttcctatgtagattattggacatttattgtagcactacataactgattataaaaatctgtaaatgaattagcactttcatattgaaacaagcctgctagcctatgtataaaatagcaaaatgtttgctgtttataaaaagatgtaatggggtggggggcaggggtaatttcaagttattaatttaaaaatgaactagcaattttgtacctggtgactttgtggtgcactcacctctgatagtgacttgaattcggtatgtaaaaaggggttagtggtatttcattgctgctaaaaatgacaactccctctgtgtcctgtttttcttaaagctgtcagtgtacaagtgggtatttgaataccagaccttactgtaaaaaataaaaaaggtggtatctagagcatgtaaattggatataaagttctgctcttaaagagttgatctaagagtatggctaaacatctatatatgcaatctattaaaagaacttaattcggctattatgtcttgatttgattgcagttttttcctaattataacaaatttttcctcattggcctgtttttaatcctgtgcctagaaggagtacaaaatgcacactttacaaaattgatatttaacacttacccactcccctttccccatctcttctaccgctcttgttgatcgtggtatctgatcttgactagataggctgaaggcacatggttccctccaaaaaccactattgataccactacaaaaacaagccagcaaaaagatactgtagagaggttggcttgcttccctctcttcctaactgcatgttgaaaaataagccgttattgatcttaaacatcggtcagatgagtcatacattgggttattttttatatacatgtatacacaaaatatttcaaattgaaagcaacatcttaatggattcaaaactattacaagctgttgtctaaaacaggtgagaaaaaaatttataactgtaaaaacaaatgcacatattgatatttaaaatgcgtaattaagaaaacccattgttgttgtgtttttcttgtataccaataattaagccactactgttggcactgtttggttttctattttaacactgaaggagtgaaagtatttcctatatttatgaatttactactaaaatcttggcaaaaaaagaaaaaaattgtctaacgtgtgtgggtgaaaactgttaatcaagtgtttctactcccccccgaaaatcccctgaaagttggacaccaactgtataccctaggttgcttaaagg

SEQ ID NO: 7623 - DNA, 1122 bp, Homo sapiens
tgataaaaattttgaatgaaaatagaataagtagaaaaatataaagtgtaattgtctgatcccattgctctttgtaaatatgtgtatatatatgtttgctttatcacgtatatgtgtatttgtaacttgtcagtgtgtttctacgtgttttgtgtttgcatatgaatgcctagaggtagagggatttcttttgagagttgaattgggctgttgataaagaagaggcatttactcttatctatgtgtttgcatttttcccccaagagtgtgtattactttgtaatttaaaaaataaacatcctcaaatttagcagtttattctctgaataggtcccaaacttaaatgtggtattagacactttgattaagtcctatttttcacctaagtcatctttgaggtgtaatcttgttttattttgaccatgtttacattcctttaaaaaattgttttaattttacagaattatacccatctaccaaaagcagatatttttgcgcttgccctcacagtggtatgtgctgctggtgctgaacctcttccgagaaatggagatcaatggcatgaaatcagacagggtagattacctcggataccacaagtgctttcccaagaatttacagagttgctaaaagtgagcattttatatatgaagccctttattgacatggttctatattttattaaatgcatgtctttaccttcattttacttttctttttaaggttatgattcatccagatccagagagaagaccttcagcaatggcactggtaaagcattcagtattgctgtccgcttctagaaagagtgcagaacaattacgaatagaattgaatgccgaaaagttcaaaaattcacttttacaaaagtaagtgagggttttatgttttctttttgctttttcattcactttaattctcaaattttaatgagagatgatttaagctttctgtcaacaaaggatgtagtggttttttgtgttttttgttttttgagacagggtctcactgtcatcaggctggagtgcactggtgctatcatgactcattgcaacctccacctcctgggctcaagctatcctcccgtgtcagcctcctgagtagctgagccacagatgcatg

SEQ ID NO: 7624 - DNA, 2256 bp, Homo sapiens
ttcctggttgcccttttggaatgtgatcctgttagtagaggttttctagcttctactaagatatttctttccctaaccatcatacacttggcatgtttcattcccatctcctttcccctcaccttaaaggagactacccctttgccccatattgtcaacctaattttctctcgtactctctctagtgaatgatgtgctaccaagtatatgccaggctgtgagaggattatactgagtagtagaaagaagctaatttgaaataaaaattatttgtataattaagaaagcagattagatgcacatggtcaacaggaagttgactgtatgtctgctagttagattcaaaacatcataaagatgatagcatgtcaatatattagcctagccattatgttagcctttgttaggtgggcagcttttctgctttttcccttcctctgtggtgacaacggaggaaatatccaacagaaatacgtctaacagggaaattgggatcatagtttatatgcatctgatttgaaaggagtattgaggaaggttttcatatatgatctatctttggattaaaaagaacatttatgaaatcaagccttctaacactagttataattgagaagcaacagtaactccgtggacagcaatcaagcttaaaattgtaaataaatatggggataattcagttgttgcaaaaaaagggcagaattcagtagaataaagtccttttctcttacaggtattaaatgaggacagagaacctcaggtgttcttatgctagtgcttgctgagtgcatactaagaaagcaattccaaatagatgtatacatctagagagagtggtattagagattcagtgtatgtatttatttacatgagaggaaactggaatataatcccataaattatcaccttttatgactggaaaatatttgccaatgaagaaatggtctgtaggtatttgtcttaagatttttggctgtttaataaaaatgtaactttaacggtttcttatagttgcctttataaagtgtattgtctaaaatatttttgtatcatgtgcctttgaaatttgacagctgatttgggtgttggatttctgcccagccatttatcagtattatcattttattcagtagctggcaggtgtattagaccaacgagacttaggtaaggaatggaacctttcctgtggtttgactgcacattacaccagaagactccagtatccctcattccagaatgaggaaaaagtattctacaaagaacctaatcacctctgtgaaatctatgggatggaaacagtgtggccttaggagtcaaatagtctctgcatggtggggaggatcatgatggaatatgtgaatttctacttctagaagttgtgaaataggtcctgcacttttgcagaatgtccttctttaaacctggcttattccacagctgtagctgataacatgacctggggcttagctgctctagccctgggttcttggagacctcacactgcctggcccctggccatccacctaaggactgcctgctttctggtcacatgtggaccttgatacgactaagcggttacatatgtggttgtgcaaaagctttctgtttaatgcatagtgttaccgatttacatcttggttttcagtggcactatgtctaggaggcaatatccttttaaacagtgctttggctaagatagatacttgtgaatcaaagatagcacagaaatgaactaagtatatcccatttggaattatattttgatactatttaaaatggtttcacctgttaaagggccaacagaactcttggttttacttttgtaattactgtacagaaaatttcaagagtgtttgagtgcttgtcatcaggtgttttccttaataagtagggatatgatcatttacaggaattatatatgaaaaaagtttttgaaatgtatttttgtgatgtgctatgttgaggggaaaccaaatatttatgattttaaaacattcgtatgaaaacattgtacaatgtaatatgctcaactttctcaattttttgctaatttttctaagatacattaaaaatgttttatatttttttttaagtaaaatggacccagtaagaaaattaaaaataccagaacatacactttaaactgtctgatttaataaaacagtggggggtaaagttgggtgtatctatgtgtattttcatataatgagatggactttggtttagggacatttcctgaaaacactgggtttggag

SEQ ID NO: 7625 - DNA, 1201 bp, Homo sapiens
tgtgacaagggctgtgttgaccacagtcacactgtggcatgactggatacccaaactacacttctacacatgaaaagtaagaactgtctttagattttctttactttgataacttgtgattgtttagcttaagacccaagaaatgctgtttgctcatggtaaacagaaacagcatcttcgctacaaccactgacaccagctggcgtcataggtagctagatcattgcatttgttttgaaatgttaatatgttaaatactaaactaatatttcaaaaatgtgtatatatgatttctatatccttgtttttcagatagcctgcttataatttaatataaattaactgatgcattcataagatttcaataatgaaatggttcccttttaaaaaataaaaatactttgtagattaaaaataaatcagaatttcaaatttaaaattgtccacacactaggaaatagaactgtgttaatatataagaaatctggggataattaagaatgaaggacttttctatcatttccattttataaattgccacctgtgaaaatggtttttgcacattatttgtatttttctttgtatatgaaataattttttgtactttgtaaaatatggagcccattgtaccttcagctatttgagactatacacagtgcttcttttgtaactggattactttaactttcgtgaaggcattacattgcctcacattcactaaccaccttgaattaaatttatttcttaagaaaaagcatccctcatttactgtgaactaaagttcattctgtagtgcacagcattcaggagggtaacactcaggattcatacatgggactaaaggttcaagaataaaacaaagcatgacccactttgttccttcattctcctaatgtcatcactgccctttgctcaagaagtaactagggatactggacatgttagcatgagcttctgggttccagacacacttctgcagagtttaggtaagagacttgaggccaagattctcatatgtgctgccactcctaccactgtctctaataagctgtttgaaattgcttaagtcccttacctattctgggtccattccaccacccagagtatatggtaatttgtgaaaattttaggcatgagacattgaagtctgtttgagcagcagatttttctgcttcagggaacttttttttttttttttttt

SEQ ID NO: 7626 - DNA, 1229 bp, Homo sapiens
atagttcaacagaggccttttaaagaattctacataatatttttattttctaagtttattcaacagaagtctgcaatatcagtgaatggggctcttttcaaaaaagactacagatcagtggatgagttagctattttcaccatctagggattttcttctcaatccctgaagaattcagaagttgaaactaagttccatatttgaaatatgttggccaggcacaatggctcacgcccataatcccagcactttgggaggctgaggaaggaggatcgcttgagcccaaaaatttgaaaccagcctgtacaacaaagtgagaccctgtctctacaaaaataaaaataaaattaaaaaagaaaataaatatatcttacccttcaactaatatgtttctgaatcttagaaaattactatgatattagtattcaatttcttatattctctgtctccctcttctctcatttcctttccccttttcttcccctctgttccttcccccaatcattctcttctctattctatgtctctgaagctatcctggccttttagtcgtacctcaagctgtacaggacagtagtttaccaagagtagctcgctgctatcgacacaatcgcctgcctgttgtatgttggaagaactcaagaagtggtactctgctcctccgatctggaggattccatgggaagggagtcgttggtcttttcaaatctcagaactcccctcaggccggtaagcatctctctataacacaattaccacccgttcacataaggacagtgctaaaaataaaggaagtaaaatctgggaatggtgccttttcatcaagtcttgtctcacacacaaacttttccactttgctacatgcaacatgtacagcttaaacaagaactatacttgatagtgtgaggctccacattgaatttgacatcttaatatgtctggtctgtacttggattttaatagaaattaatataataaagtctttggtcctaggcaattttcattccagcaaaccagagtattcacagatggaaactaggttataccaatcttttttctttctcctgggaagcatccaaatacatttaacagcttcagaggtaagatgagcttctgtgccatgtgatatgagatatccatcctcactcttacaagtcatacgcacacacaagacagcaaactaatgactgcaaatgctgcttcaggatctttcaagcaaagaggttttt

SEQ ID NO: 7627 - DNA, 1407 bp, Homo sapiens
ttcaagtctgctgtggctaatagtggtcaagattccgaactaggactttcctctgtgaagaggatgcctctgaagaaattttaaactggtgattttggttgcactgctcactttaagagttaacatgctcacttgttagtatttctgagtaacaagatggtgacttctccttggggatctgggagctgagcacttgtctatacttgttcctaattttccaagtatttctcttgaaactgccagtgcctgaactgttggggccaggattttccctggtcagatgccaagtaacatgtggttttctgccatacttttctccattggcccaggtaggctaattggtagttgttcatttcagcctctggatggctggctgccttaaacacaatcaatttcaaagctccatttcataaaggggctactttgaaggagttaagatggaagacttccttcttgacaaattgtgtttttagtgaatttcttaaaccgttttatttagccctccttccctctttctagttggaagccaaatgtactcatgaaaacagccactcctattctgagtcttggtttcttcacctagaaagtgagggtttggactagatgagtggctttcagggtgttctgtgaatctcctcatgaatactttagggtaggggagggaagggagtgagtgatgctcaggggctgtcaaagtgactgcgttcatcagttttacactggggctgctacataatattttcatttgaacgaagaacttcaaaaagcacaggactagatgatctctgttccttttggctctaatatgctacaactgtaggccaattatcactttaccaattaagagttaggccagataagtgaaatttaacttaagggcacacagctaataagtaataggcctaaactggatttccttattccaaatcctgtcttttccccactattccattagaccccacaaatgttagttgtgtgtgtgtgtgtgtgtgtttttaatcactgtaaccggatgcatttttttaaggcaaaatttctcccttatctactatgatgacttcagaagatacaatggtcccaggggccaagtagaaagcatttttaaagattaatctgaattaagctttatcagtgtactctttatctgtgttactagtgcctggtatgtagtaggtgctcaataaatgcatattgaataactaagtgaatttcttttggcaactttttaaggacatgtgctcttagtacttaagaggctgctcaaggaccttcctatctatttctgtggtcaaattcagactacaggaggtctttttgaatcattatagttagaagaagaatccagtttctgcctgtgaacttatttgactttagattgtctcatcttgtgactttataatgcctgtc

SEQ ID NO: 7628 - DNA, 1897 bp, Homo sapiens
gtgatcgacacaggaattgccctatttgtcgcctacagatgactggagcaaatgaatcttgggtggtatcagatgcacccactgaagatgatatggctaactatattcttaacatggctgatgaggcaggccagccccacaggccatgaccttgaagtgaaagtcttctgttgctattgtgggctcaaatatttggtcatgggggaagaatgtagggttgtggcactggcacagacacaggaaaatccattttccccactcttttatttttgctattctgatcatttgtcccccttttaaaaataaacttcccatgtcttccatttgtggtactaaaatttgctactgttttagaccatattttcctattatttatctgttcaaatttgtattattacaactaatagctcttgaattctttgctaaaggtaacagcaacacttccagaggcttctaaaacactactgttttgcagggcaggagtattctggaatctttttacttagatataaaataaacctcgaatattaaaaagttgtagccatctgagagaggaaagtttaagtgactgaaaatgtagaatacttcaacgtgcatgttactacttaaaactagtctttctgctggaatctaaggagtatatatatatatgcccccttgtggttaattattgctcctttaataatttttacttgaaatgatccacaattatttcataactttagcagtgtgttttggaactactgtacttaaaggtttgtttgtttgtttttgccatactgtataatttgggtgaggtctacaaaattgggtgtgactttcctttgcaaatggatttctcctggggaattttcttggctgttctggaaatgctttcccacagctgggtaactgttctaaatggctttgataatgctcacacatcttggagtttcagaaggaaattattctgcatcacaaatactaaattttatatttctaaattactataggtcatttaatattggtttatggtgcttttatttccttaacttgaaaacatctttctgagatttcagagtcctcaaatttcttagattaagagacaagaggccagtgcagtggttcacacctgtaatcccagcactttgggaggccgaggtgggtggatcatttgaggttaggagtttgagaccagcctggccaacatggcgaaatcctctctctactaaaatacaaaaattagctgggcatggtggcaggtgcctgtaatctcagctactcgggaggctgaggcagaattgcttgaacccaggaggtggaggttgcagtgagccgagatcacaccactgcactccagcctgggagacagaacgagactcctaatcaaaaaaaaaacacaagaaaatagagtgaggcttttttaccgtatatacataaaatacttatgaaaattagaagataatttggcattcctactgtttcactgtacttccattgaaatactctttccattaaaatattctgaaacaatatagtaataatggaattgtgatcttcagttgcacctcaaccattttttttgcttatgaactaaaatttctaacattaacatttcggcatgtaataaaacaagggcctatctcctttaaaatttaacattccatgtaacttttctgacttatcattcataagttgcaaatattactattttcctaaaccagggtacacaatttaagttgccacttattgatgacagaatttctggatagtaggattttaataggcgagcaaataaaattcaaatcaatttcaaggaaaaacatctggccaggggtagcttgatttcgcccccaaaaatactgaagactaatccattgacattcataatgggacagctaagtaccaaatagctaac

SEQ ID NO: 7629 - DNA, 1218 bp, Homo sapiens
gtgttgtcccaaatctggataatataccactgttcgttaacttaatatacaaattgttggtagggatatccttgtttcatattctaaaactgtgtagtaccacctaaaactttttggatggatttctgtttatatcatgaactattttaatttacaaatcttaatttataggtgaatcagtggctaacctggttagaaactgctgaagaagaagaatcagaggaagaagctgactaaagaaccagccaaagccttaaattgtgcaaaacatactgttgctatgatgtaactgcatttgacctaaccactgcgaaaattcattccgctgtaatgttttcacaatatttaaagcagaagcacgtcagttaggatttccttctgcataaggtttttttgtagtgtaatgtcttaatcatagtctaccatcaaatattttaggagtatctttaatgtttagatagtatattagcagcatgcaataattacatcataagttctcaagcagaggcagtctattgcaaggaccttctttgctgccagttatcataggctgttttaagttagaaaactgaatagcaacactgaatactgtagaaatgcactttgctcagtaatacttgagttgttgcaatatttgattatccatttggttgttacagaaaaattcttaactgtaattgatggttgttgccgtaatagtatattgcctgtatttctacctctagtaatgggctttatgtgctagattttaatatccttgagcctgggcaagtgcacaagtctttttaaaagaaacatggtttacttgcacaaaactgatcagttttgagagatcgttaatgcccttgaagtggtttttgtgggtgtgaaacaaatggtgagaatttgaattggtccctcctattatagtattgaaattaagtctacttaatttatcaagtcatgttcatgccctgattttatatacttgtatctatcaataaacattgtgatacttgatgtagtgatgtgtggctgtaaatggcatccatagtctgggagaattgtcagctttgtttttgaggtataggagacccaccttagtttgacttaaggacttcccaatttttgtttttctgctgtacaagcctgggttccagaaggaatttttagactcttcaagatgagacacaagatttaaggtgtttatttcctttgagttactgaaactaaccaata

SEQ ID NO: 7630 - DNA, 1336 bp, Homo sapiens
actttctgaaattggacaacccaataaacaagatgtttgtgtgtatgtgtatgtccataccgtctatcttagtgtagttttatggctagttacaaagacatttgagcctaatgttcattttattcagtctccaaaacaatagagtccttcagaaactatatcatcacacatgttataacataactgtgtattgtgttgtattgatgcaatataatgatgatgatgaatgagcatgtcactaaaattaatatataataaaactctgacttactatgtaggtgtttgttgaaagctccgagactttggattaccagatggcctttgcagactctcatttatggaaactcctggatcggcatgcaaatacaatcagattatttgttttgctacctgaacaatccccagtatcttattccaaaaggacagcataccagaaagctggaggcgattctggtaatgtggatgatgactgtgaaagagtcaaaggacctgtaggaagcctaaagtctgtggaagctattctagaagaaagcactgaaaaactcaaaagcttgtcactgcagcaacagcaggatggagataatggggacagcagcaaaagtactgagacaagtgactttgaaaacatcgaatcacctctcaatgagagggactcttcagcatcagtggataatagagaacttgaacagcatattcagacttctgatccagaaaattttcagtctgaagaacgatcagactcagatgtgaataatgacaggagtacaagttcagtggacagtgatattcttagctccagtcatagcagtgatactttgtgcaatgcagacaatgctcagatccctttggctaatggacttgactctcacagtatcacaagtagtagaagaacgaaagcaaatgaagggaaaaaagaaacatgggatacagcagaagaagactctggaactgatagtgaatatgatgagagtggcaagagtaggggagaaatgcagtacatgtatttcaaagctgaaccttatgctgcagatgaaggttctggggaaggacataaatgtatgtacttcaaaagaaaaacggtccttgaaacagcatcagtttttctctcagtttatttaaattttcagttaagtgttaggtacttagttctaagatcatttgtaactttctggattataagattattgacgcagttgtaatgaacactgttcttagacctgtgcagtaaattagatggtaattatatcagaactctgagataagaagtaaaaaaaaatagtattcaatgttaggaaggaattatgatataattactaagtaaaaaattagggaatat

SEQ ID NO: 7631 - DNA, 1318 bp, Homo sapiens
atagtcaaatgtactgtaaagtgaaaagggatgtgcaaaaaaataaaaaaaaacaacaaaaaaagctaaccttctattagaaaaggggacaggggaatgagtaaacttcttttattgcggacaaatgtgcacatagccgctagtaaaactagcctcaaacaggatgctcatagcttaataataaaagctgtgcaaaggccatgaatgaatgaattttctgtttatttcactgatgcacacattacctcattgacaattcagaagtaaatccaacgtgtgttgactcttggaaagcagcaaaaacaggagctgaagaaaagaaattcttggaaccagccgtaacccagtaaggaattgtgaagttgtgtttttattttgtttcattttttgcagagtattaagaacattattctggaacatcagaacgtttcccttagaccgatcccagcaggtggcagctcagattgctgcagtgttgtaattataactgattgtacttaagttatggatgtagagaatatgtttcattcatttattcagcatgtaaataaaattgatcctgttgagttatcataattgcagttcaactatctgccatgattattcttttcacgtatcattcattctgtacatttgtgtacattgagaagtatagcaatctatgtaaatgtaatcctcagtgaggttcctcagtgctaggtcccataggattgtcgttgcccttgttaatgaggtttctctgttcagcggcttcaatttttttctctttgtacatctagttttgaagatttacttcaagtttgaatcttctagaatgcttgtaagtccagttttaatttttagagtcaatttgtagttacatgtagtttaacttttgggaaacgtcttaacattgttctgaataaacttgctaatgaggtcaggtcatggtacagactgatgcagtcaacatgatttcattgcagagtttattagtatcagcaagtttttgctttgctaaataaaagtactcaatgaacacaattctacataaattttgacataccatctaatttataaaaatcaataaaaaaggttttggtaaaactttttcatgccagatgctgtttacaacaatgaacatgccaataaaacatttgttcattctgttgtgttattttagtcattaaacttctgtggatgaagaatctgggttaagaatagatttgtcatctttaaatatgacattttgtaatgtgtattggatatctcatttctatgataaaggtatatttacagtaaagttctcataagagaaatgaaaagctgtgttaatatc

SEQ ID NO: 7632 - DNA, 1194 bp, Homo sapiens
tttggcagttgcattagtaactttgaaaggtatatgactgagcgtagcatacaggttaacctgcagaaacagtacttaggtaattgtagggcgaggattataaatgaaatttgcaaaatcacttagcagcaactgaagacaattatcaaccacgtggagaaaatcaaaccgagcagggctgtgtgaaacatggttgtaatatgcgactgcgaacactgaactctacgccactccacaaatgatgttttcaggtgtcatggactgttgccaccatgtattcatccagagttcttaaagtttaaagttgcacatgattgtataagcatgctttctttgagttttaaattatgtataaacataagttgcatttagaaatcaagcataaatcacttcaactgctcttctgtagttcttggatttcttttcccttttgactttgaataaatgtaaaatcctttcagccagaaaaagtaaaatagaaacaacctgtattaaaaatcttccatagaagcaaatttgccacccaactgaagcacacctctttcagcatcaaaatattttagaaatcttaactatttttggatgggaatttgtcttaaagagtgtaaatgcttcacggccttctgaaaggacaaatggaatatgtatgactctttttttaggggagccttctttaatcaaatgcagttctgggccataagacagtaagatcctcaaggaccataatattagagctactatattgaagtcagctgcgtggcaagtgccagattaggcagtctacctatattcattcatttaatcttcactgaactccatgagcattttcttcatttcacagatgaacaaatggaggtgcaaagagattgacagagtagaagtcagacaaaaacagcatctagtacagtatgtccaggttatagtgattattttaagatcaaatagggagctgttttctattcaatgtcagaaaccatcaggaccaccctacattctggttactcaacagatatctactgagagcctcctcagaatcaggtgctgtggtacgctttggggtgccaagctgacccagatagggtccctaccttgaaggcatcccagtctaatgagggagacacagccagagcaagcaatgacaaaacaaagacagtcaacccgatgtgggaacagaggtgttacggaagcctcagt

SEQ ID NO: 7633 - DNA, 1210 bp, Homo sapiens
tggagaaacagaatgggctgggtgggcagagactgggtggttggagctcagggcctggggcagggagttgtggggagggagggtgggaaggtgaaggggaggtggtggcaggtcatgggggtccactgtgtgccatactgtggaatataaacctctccatcagtgcagagccacacagcaaaggttttaagtggataagtatgtatggggagtgggacgtgatctggtttgaataatgtatactcaggactcttgccatacagtaatttttttcaacccgctagacactgttgctgtggggaagtggagagtggtttcatccatatggcagcatcatggctgtgtagccctaaagccataggcacctcccaccccacccacccacagtggcatccacagttttagtctctaatagcactttgtctcctgagaagaaaagcaaagttgtttttcctttcttcttctctcatccccaaagcgttctccttctcacccaaaccatgatctcagatcttaggagttacaggtcagacatgtcacggagcctgtttgagatcagttgtctacgttggtgatgaaattataacaccctaaaagaagactttggagtaggaacttgccagggtcatcagacatggttgggttgagagaggaaatgcgattatacaaaaaacgtagaatacaaagtagtgcttattctgtgatcatggctactgtttcaggggacaggactagaagggaacccggacaaagaaaaacccttggcctgtgcaggctgtggggttgtgagtgctgtttccccaaattaaaatatctttattattgtcatgattttgttgtgccattgaggtacattaacttaaataaatcaaagcgaacaattttaagatgacgagtaagtctggagaaaaacctaggaccccagaaagaaggcatattgtacatcccagtctgctgtaacttccggagctgctgctgatgacaaagggctttaaggcaagggaagtgtttgcagcactttgggggctctatgcctgtctgcatgcttgtttagtttttgccatggcctgttcaccagcctgtctgccctgaaactgggaaaggtggatccagctgctgtccaggccttcaagaagcagagccccattcaattgtccacttctctgttgctgcccagagccagatcctgtgtgggatacttggcttttca

SEQ ID NO: 7634 - DNA, 1630 bp, Homo sapiens
cttgtctgccttccatgatgagattttttttctccttcccctttctttaagagaggctgacagatctaggtgtcaatcaattggaaaccagtctctgattttttttcattagttattttctatcattagtttcactgtgtaaattagatatcaactgcacttctttaaaaaaaaatacatctccctattacctccttgaaagatttacttctgtaggcctttttcaataggctcatgactgcagacaaggaaaaaaaaagtaaaaacaaaaacagtatgtgcctgaaaatgacaaaaaaaaaatttgtaacatttaaaaaagaaacctgaatagcctttaattctttaataatacacttaaattttatgtaaatcggttttcgccacgtgtgtttgttcacattctaaatgacttaatgggattctcacggtctgtgtctttgtgtcacgtgtataaaatgggcttgtgatgtaagcgtttcatctggtcagtggttcctttgatattgtactgctgctgggagtgggctgtggaacctgccttcgggtaactgggttcctcttgggtagattggagagatgggggtgggcgtgggcaaattctcacacatgttttcttaacctatttgcagaaactttcaaaaggcatttgattaaacctcttggcagtacagtattcttgtatttgttaacgtctgtgtttaggtactggtacctttttgttttaaaatgttctaagtgttggctttaaagtgaatttatctttagtatgatagttatatgaaaattataggatttgtgtgcagagaatttttttataaagtgctttgtaaaaaaaaaaaaatgtattctagcttttgcggtacatatgtgtgataactttaatacccatgacagttaagtgcaattatttcatcactctaaaaatgctatttttgtgtcagttcctgcaggtgttttcatgtctttgcaaagtgacacattttgatgccttcttgataaagtggtagacattttgtagctttctagaaactttgtattcatacggtatcaatgaaaaataaagaaaatgaaagtgtgggtcaccttttttatctgcagaagtgtatgttgttaggaatgaaatgtgctttatgtattgtgagtgatgatatgaaagacagagtaaaggaggtcacagctttcatctttttgaaggtgtccaccaagcttgataattggaactttaggtgttacatctaacagcgtttcttaaacaatacccacaagtcaatcaatccacttgcctatctcactctttagtgcatcattaaaattgacataagttttgcagaatggcttgtctgtcgatcccagacttaccctgagaagccaggtcccatgggctttagcacaccagcccaaccattgagtgttttttgttgctgttatcccaacttgttgggcacatgccaggaatgagggatagagcagaggatggggtacagagataaatgcagcatggctgtttcctacacagtacttaaattctcaggagtgggattgcacattgagctataactcctcccgacccctgtcctcagcatcaccatggggttcatgattcaggtgtatgcagcacaggtgccta

SEQ ID NO: 7635 - DNA, 1152 bp, Homo sapiens
ccagagatctctaaacagaaccaataggagactgtgtgtgtgtgtacatgtagttgtcccttggtatacacagtgggttggttccaagactcccctcataaaccaaaatcctcatgagttttggggaattgtttctaaatgcaattctactgtaaaaatacacaggagatagcctgaaagagttctcaatggccaaagctggaacaacttgaacaacaaaataatgatggtattctattataaaccaaagaataaaaaatatacacaagagcccgtattgatataaataaatgataaatatataggtaagtgcaggaaaagcagaaaattttctgtacagaagaattttaaacgtatttgtagatatttgttcctccaggaggtagtgcttaatttcccccaccttaagtgtggattgaactgagtgacttccttctaaagaagagaatatgggagaaaaaaaaatagtaactttccagtgaaaaaaactggcagatattactcgaaacaagtagataaggttaacatcatcagtgataattcatgttgatagcatgtactccctgatatgatgtgatgttatgaaaaaggcacttcacctttgtggtaattttccccaaaactcataactctaatataatcatgagaaaaacatcagaaaaaacaaatctgaaagatattctacaaaatatctgcccagagaactcctcaaaactgtcaaagccatgaaaaacaaggagagattgagaaaccatcaaagattagaagagattaaggaaacatatcgactaaatgcaatgtaggattttgaataggatcctcaaacagaaaaaggacattagtgaaacaactgacaaaatctgaataaagtccatagttacttgtattgcagcaatgttaatttcttagttttaacaactgcaccatgattgtataagatgtggacattaggggaagctgggtgaaaggtatatggaaactttatagactatctttacaactttttagtaaatctaaaattatttcaaaagtaatataaaaatgtttgagcaagttcagaaaagcaaattctggcagtgactagtataagaaaagtattattttgtaggtcaggaatatttccgcaggcctctgcatgagttgtctgaaaaa

SEQ ID NO: 7636 - DNA, 2014 bp, Homo sapiens
aaggtatcacttattttttatgcatgtgattttagctttagaaagaaatgcgttatagaaacaagtaatagcaagaaaattgatgtatattttaatgatacattaaaattcccttttaatcataatagttaactctacttactgttttaacatacatttgatttaacaaattgttcagcataacacttctaattaagtttatcaagttgtactgtattagataatcagcagtgtatctggagtatgtttaaagagaacagttcgcaatacaaaaagttacatggagctttacatcttaactttctttgtcaatttaaatgcaatgtataaaaagtttattttgctattgtgaaaaactaaatgtaaaggaaatcacctactttcatgcaggtgtataatcttgaaaaggaaaaatgcttccatgttgaagccagattttctgtagtaaaacttttaaatattattttaaaagaaatatgtatataaatatctctatattctttggaatgatactaaagtctctggtctaggaccataccttatataaaggtataagagaccatgacaatgtctgaaaatggaatagataatgatgccttttatttaaagtggcccacataatatacattgagtactccatctctccaaatgtatttccataatgtgttgaaaacatgctaacatttgtatgatttttatacttctgccgaatagacttagaatcagatgaattgtctgtgtgtcttgcaaaagagttggggacaacttgggcaggcctatgaagtgcatagggagtgtatgtcttctgaatggttttattgttcttgtaatctagcttaaagaaatgttaactgggagggtgctgaggccactcactgcattaattttgtgtgtttagagttctgttgtcaaaagaaaactaatgaataaattagtttgtcattctagaatttaaagttctaagattagtataaagagtatatagattgttaatccccaccagctagactttgaacttaagtcagacttaaagatttgagaaattatttgtgtcatttactagacgtgatttttagttctgtttgattatatttcctacacaaacttcttatttaacaggatagcctactaaattaaatgtttcttatttcacttaactcatttgattaaactgtattctaaaacatttggggtttttccccctattcagttttaatcttggaatatgcatttgtaaattgtgatgtcattgagactatatttatatttgacttggcaacattaacatgtcctaagacttagtgcagagaagcttggcagtacgttctttgacttaaggatggcataaaataatcatttttgaacctgtgtaataaagcttgaaagcagggaaaagaatttccttttcccccttttttgtgttgtctataggaattaacttgggattgttttgtgggtttttgtttgttttaaatgtaaattgagaatcttttataagaaataaaagcattattgggtgcctttgtttgtaaaccaaaaagtaataaatgaatccctatatttccattatagtatttattgtatttttatgttctgaaaattacccatggaacaatatgcttaggattacaggaagcagtccttacttacacttcttgtctgttttaggtgtacttgttaattcttatgtcctaattttatttaattctgagttccttacacagcattttagggaaagaatacaggcaggatgacactttgtgttaaagtgttatttttatgtattacctggaatgaggcaggtttttttctgttttctaaaaagagtaaccaagatacctccagggtgtcattgggttccagctgctctcctccacattgaatgatatcttgttaatttataggcacatttgtggtaatttatatgtctatagagtaagtataagagataattcattagtaataggaattaactgaccccttttggatgggggagagcatcaggctggggtca

SEQ ID NO: 7637 - DNA, 1113 bp, Homo sapiens
cttagatatttcagtgtacttgattttttaatttaactctttttcacagccacgctaagggtaaaaaggaataatttccttctgtcttccttttcaagtatttctgggtaagggattcaaaaaactaaaactgtttttgtttgtaatataaaatatggaattgatctttccagggtcagagatgattaatgtttttgctatatacttttatacattattttcttatcaaactagttaacaagtatttttatatgtttgtaagcagatatgctttcatagcataccttgtgtatatgtaaagataagtatttaattctcactgttcacttttaactgacaaagaaaaacaagtggaaactacagaaactgtggtagaacttttacttgctggtctggtcttggttgtacccatctttggccagtcacataactactcaagaaaccttcccaatagagtacaacaggatgagactctgaaatcactttcagtattccctgctagatattgattgttatttcaagtattaagtgtaagcttttaatggataattagtataactgtggatggcatctgattttgtttttaattctgtggattgtgtttaagcaattcaatagtatgttcctgattttgagatgctaagtggtattgcacagttgtcactttatcaagtgtgtacaacagtcccatgaagtttatagagcatacccttgtatagcttcaggtgctagaattaaaattgatctgttatcacaagatgatgtttgattactcattgtgttaattaagtggtttcttaagggaacaagtgttagtgaaacttactttagtagctctgttccttttctccagtgccttagggtttgaatctagaagtcagcattggtcattcagcaggtggaggggatgtgaaacagtttgatgttctttgacttgttgaatatttacttaagtccgtgtttcttaaactttttctatgaagtgctcctgatatagaaacccaactgtagaggaaggtgaatacctacacagataccccatgaagatgaaactgaaaacagctaaagccacacacacatttatttgaagaccagtaaaaataatataattgt

SEQ ID NO: 7638 - DNA, 1188 bp, Homo sapiens
aattttgagccatttatttattgattggggagtataatgcaacacaatgaaaataatgcaaatttaaaagatataaataatattcaaatgatgtgaaaatacttcaggtaagatgatttgttctcttttagaataatgcaggtcttagagaaccttttcagcttttaagaatataagtttttaagataataatgagatttctgcggaaatcaaaattaaccttatagttcacaattatgaaatatatgcaaactaagttgtttcctttttccctctaaatattctgggacaatgaggaacaactagtgattgacagatcataatttgataaataatggctaatattctattacaatttcctagtttaaaattttatgtttttaaaaatatcatatatatatttttttcgtgtatacatatatgtaatctaatactacggagacacttagcagtattttcattaagtatttgctctttgcatatttctcactttattctgtcattagttctcccactgttcaggatcattcctatcaagtacaagcatgctttagaacctaccatgttaaaaaaaaaagtattattcccacatttttttctgatgattgcttcatttcattcttgcctttacagcacagtttttcaaaagagttttctctagtcactttgtctacttccttaccttcctaaattcatcttaacttttactaaagctgaacaaatatttatgaaatatgtgtaaagtacagagactaaagaaacagacaccatcaacccaccattactggtgtttttgaacattaccattaacattgaagttccctgtatgtcactcctggatctggttcacttctttttcttttagagataatcaccatcctgaatttctttacagtttaccataagtatttctaataagcatatcgcaatgtgtatttcatgttaaatgagtgaaggtatactgtatgtatctgtctgtgacttgtttttcttgttcaacattatgtttctgagatccatccatatacgatgtagctgtatgtacttcattcattttcactcctatactccattgtatgaatacatcaaaatttttctattttattgttgatgaacatttgggttgtatctagttttttgctaccctaagctgcacagctatgtgcattcttcctgtctccttctgtc

SEQ ID NO: 7639 - DNA, 1192 bp, Homo sapiens
aaaacaatgaaaacaatgtatttataatggcaatatagttttgttcttaaatttcaaaatttaggcttttaaggaaaagaaacacctatttcttttgaaaaattatcctggtaataaatgccaatataaggatatggttttttttcctcttaccctttgatacctgtaactactaaaatgaaaataatagactttggatttgtgtagtaatttggaaatataatacttttattcataaaagtaatataagaagattaataagtcttacacccaggagttatgtttttagtttttgaagataacattctagaaagagaaattagaagggcagataagactatatttaagaataaccattatagaaaatagtactgacttttttaaatgtttaatcctaagtgttctcattgtaatatatattttacagtatttataaaagataaaataaagttgttgtttccctgtatgtacagattgaacaggaagtatcactggacctgattttagtagaagagtatgactcattaatagaaaagatgagcaactggaattttccaatttttgaacttgtagaaaagatgggagagaaatcaggaaggattctcagtcaggtttgctttcaaatatctactttttaactgtaaattaatttttcttaaatctttataaaaagcaaaatctaatatgtaatggtttaagcactagttcaacaatgacattgttcattatttttttcagaaaaaaataaatatatacataaaacaattatatataagatgtagatcatactattatatatatgacaagtagtttatttgaccatattaatgggatttaatttatgccaaagaaataataaagatttacattttcttgaatgtggaggttgaaaaggatatgaaaatatcatctagttctaaccattgcaatttaagcttcatttttttcacctgcactccctatactttacccaaggccggatgattcatttcatgctagaaccatgggaaagtactttgattttaccacccagactcagggttatacctgatgggtccgcataacagcatcagattaactgccccaaaatattactctcattaattactttcatatcttatttatgaaatgcaaaaacgtaaggataaattttgtgaaatatataagttcatttaattgaagttcttaggga

SEQ ID NO: 7640 - DNA, 1128 bp, Homo sapiens
agtaaaagaaaagtcatattgaagaagcccagagggttgtgcccaggggcagaaatcattgcctagtgttcaccggctgactctcaactgaccattcccatgtggacaggccttaatactgtgagaggatccttgctctgctggcagtttcccactcctatgcactttcacaggaactagaaaactattcttaaaccaaaaataccatccgtgttgacccatgttgcagagcccttacttaaatccttcactggtgtatgaatactttgtcataatgctgctttgctgggtagtgagctcttatttttcactgggggtcagctataactaaaaactcaagtgacatatttcagttaccaaagtggccaggaactttttgcttttatgaaaatagattcatattgtatttcccagtgtgtcttttatgtctttgaatgttttggagaaaagtctatgcctgtctaaaaatgaatccagtgttgcctttctgagggatttctgctcaatgcaatacactgttcagtgctattctcccagctaggtttatccatgaaggactgagtgacctttgttgtatttaacaaaatccaggtgcatcaatttctgatgctttttactattgtgtattatctactatgtgtgttttatttctgctgagagtattcaggtttgccatggacatcagaagtttgaattccagtcttatcttatgttccatggctgaattttaaagctgtttaggtttaacaatgaagggatttattctttagtcaaaattgttgtttttactctagctcaggattcgtatttttaaagatttagttaatatgaacacagcacagatttgttagaagaaaaaaaatttgctgtaataccaaaactaacctcatcaaagatacagaaaaaaagaaatatagtgagccctaaaggacacatacattgaataaataattggaacatgtggttatctttagatccacatcttagctgtcatttgttcactctaaaactgatgttcatctttctgttaatttccctctgcctaaagactacatgacagaaatgacctatcactacttattatttctgaagcctaactgcaagactgatttctgagaacaagtaaag

SEQ ID NO: 7641 - DNA, 1317 bp, Homo sapiens
accctgagatcatcagaccaagaaatacagatcctgtttatttagaacactgctgtttgacatttataattttgattattctagcctttgagtttgaaagataatgacactatcattttagagtatacattactatgttgtgtacctctgaattaagtgtacagacttgagttcaagaactgtatttgccctttaccagctatatgaccatgaacaggttacttaactctctccaagcctcagtttctccatctgtaaattgagggctacaatagtacctacctccaagcattactataaagagcaagtgaggtaatagatgttaagtctgacaattaaccagtaactaaattctagctgttattttcttcctcctaggtcacaataaagctgaactccttttaatgtgtaatgaaagcaatttgtaggaaaggctccatggaagacatacatataggcatccttcttgatactgaaaactatcttctttgtttgaaaggaactattgctaaatgcagaacaagctcattgcagttacctattgtgcatctttttaaatacttgattatgtaaccataaatctgacagcatgtctcattggcttatctggtagcaaatctaggccccgtcagccaccctattgacattggtggctctgctaaacctcagggggacatgaaatcactgcctcttgggcatctggggacacatggtaatgctgtgccttgacagaagtatttgtttaaagaaatgtcaatgctgtcatttgtgaactctatcaaaattaaaaatgtattttctatacccttcaatggaatctctgctgctatttatgctatttttcccaggagagtttcaggggcctgtaagcactctgttgaccaaccaatctgactcacttagcacaaagacaacatgcctgggatggatccctagtgtcttgtaccctcagtttctagtgaagcatcccctattggaattagggccttgtgcatgtcaaagagaacaattcatatttattttcagagggtgccctggtctccagcctcagaagttacccatgtactcctccttcatgcaggtttgcctttacccatccctgcccttcctccatataagaagctcttcatgcaccccttagcctgctttagatggctcagagcctaaaatggggatcacagactggccaacctagaaaggtcatcaatgccattcaacccaacttttttattctgtgaggttcagagaaatgtcttgctcaaggtccagcaataggtttaacagagacattcacatacttcacaaatacttattgag

SEQ ID NO: 7642 - DNA, 1222 bp, Homo sapiens
ctgtgccttatgttacaagaagggcatgtttcatacgtgggatgtacctgcaaactgagatctagaataagaaaataatggagcgggcttgaatctgactcacagccttgagcagagacacagaagctgacctgcatccaccaacttgtaatacaacctgagaaatgaatatttatttttgtaagtcactaagattttgaggttgttatgtaccataaaaccatttcttttaccaatttttgtgttttggagctttgctgccgtcacaatgactcccgaagtcccagtggcttgaaacgacagacatttatttttcagtgatgggtttgcaggttggctgtggctctacttgtctctgtttgtttctctgtatgtcatttcagtctgtgattcaaattgaaggagcagctcctatctgggacatgctgttctccaaacagaggccaagaatacaacactatgcaggtgcattaatagttttcgtacagatatggcatttgttacatcttctcatattctgttagccaggttatatgtctaagcctggtgatgaggcaaagaaatgtatttcatctattgggaggcaaaagaagtcacatggcaaagggtgggaaaagataatttggaacataatacaacctaccacatgtgttaggcttctaagacatgttagattccttccctcttcagcacttatcttcccatttcaggattactgagcaagtataaaatatgaatacatctgggagaggtaaattagattaacttaatttcacccagggtagcaattaaatactgttcccagagcaggttccagctgagggttgcaacaaaaaagagtaaagaaatagttaaatattagaaagtggaaatgcaatttcatgaagctgtcagtttccaggattctaaaatgaagtgtctgtggcagtgacccttttcttttgactaattgcctaggttgatttttttttccctcttcagtgctctaggaatttttatgagcctctttaaagtaactgagatgccagtcaggatacttgcaatgaacagctgatatctggctgttgctcctgagtgaaaagtcctttttggccgctggagcttcttctttggattgggatctactgtattagggcatgaaagtttgtttaaaaagtgtttctatctattatataatctgccatagttccttctccctacatttatgcatgtaggtgtgggt

SEQ ID NO: 7643 - DNA, 1194 bp, Homo sapiens
gtgcctggtgccaaaaaggttggaaactgctgctttaaacttttaagttgctctgataaacttgataagcaaagaaaggcataaagaagagtcagtacatgaccattttatttagccatttgctgaacagaagtgcctagcttttttcactgtttttgttcaaagatagataattctgtttgttagagagtttttattaggtgactagaaaaaaatctttcaggataacatctacttattataagtaagctaaaacatttaatacccaaagtgcttagtaataaatatttatgctatctcaacatcaggcattttattttctattaggtaaccacctatggcataaattctcaaaagtcatagtaaaattagtcacaattagataaatcagccctgagtataatagcatctgtattatgggtttttgtgtaaattattaatttgactgaaacataactaaagtatcctggacatgcaggggaagaagacaagaaaattaatgaagaactggagtctcaatatcagcaaagtatggacagtaaattatcaggaagatatcggcgacattgtggacttggcttcagtgaggtagtaattaacttattttcattgggaagataattagttttcaatttggtaccatttattgctgttagattaccctagcaatcaagaatcccatgtagaaagctttctgtatgtagttatcttaaaaataattttgtatatgccctactggtcttgtagataatcaggagagatgtttctaaggattttgtgtggggttgttttttcctttttttttgagatgcagtctcactgtcaccaggctggagtgcagtggtgtgatgtcttccacctcgcgggttcaagtgattcttctgcctcagcctcctgagtagctgggattacaggcgcctgccatcacgcccagccaatttttgtagagatggggtttcaccatgtaaccaggctggcctcaaactcctgacctcaggtgatcccacccaccttgggctcccaaagtgctggtattacaggtgtgagccaccatacccggccttttatttttcttttggagacagtctctctctgttgccccaggctggggtgcagtggctccatctcagctcactgcaacttccacctcccgggttcaagcaattctgcctcagcctcccgagtagctgggat

SEQ ID NO: 7644 - DNA, 1206 bp, Homo sapiens
atagctcgctacagccttgaactcctaggctcaagcaatcctcccacctcagcctcccgagtagctagaactacaggcatgcaccaccatgcctggctaatttttttcttttttctttttttttttttagtttctctctctctctctcccttttttttttttttttttttttttttttttttttttttaagagacagggtctcactatgttgcccaggctggtctcaaactttgggcctcaagcaatccccctgcctctcagcctcttgagtagctggaatcccagccacaggtatgagccactgggcccagccagacagagctctttcttaaaattctactcaagtcttaaagctgttgttctaatggctacaaagtagagtgtttctaagaccgacagaacttacggtctttctcagattttgtatgggctaatgtttatttttaaaagagcctgttgattgatgttttaggtagaagaccatgatggagaaggtgatgtggctggagatgatgatgatgacgatgatgattcacctgatcctgaaagtccagatgattctgaaagcgattcagagtcagagaaagaagaatctgctgaagaactccaagctgctgagcaccctgatgaagtggaggatcccaaaaacaaaaaagatgcaaaaagcaattataaaatgatgtttgttaaatccagtggttcataactcccaaacgcttagtctttgtattaaaagtaagccttattgttacaatgcacagtggaggactgcttatagagcacagacctttgtattataatttttaaaaaggcccttttaaataattacaaagagtgtttgctttcaaatgccatgggttacacttttatgggcatgactataaccatttttgtaaagagtaagagttgtataaaataagaaataaatacagtactcaacttcctttcatattagcatcatcaaccctctaattcaccttatgggggaaatgcttctttttgtttgtgatagctattttatcatttccttcatatttttctcttataaaaatgtatttgatactgtgatatgttcacgaaaagtattctttaattattctttgttatagtagagctgttcattatggatatttctgctgccagtcacaatctaaattaattttggcaaaagattgggtacttagtttcctgttactgagttagct

SEQ ID NO: 7645 - DNA, 2257 bp, Homo sapiens
gcagccagcagggtggctgtcctctgcgtgcccagcccagctgttctgtgtctctcttgcctgcctcctcttcctcagagacctaagagtgccttggagcgcctgtactcaggggatcaccagcgaggcaagatgagtgcagaggagcagctggagcgcatgaagcgacaccagaaggccctggtccgagagcgcaagaggacactgggccaaggggagaggacgggcctgccctcatctcgctacctcagccggccgctccctggagatcttggctcagtatgttaggaggggccaggcagcggggcagggacagggagccgagtgcccctcagagtcccccaaacacaagcacatcacacctcccagtgagagagctgtccattgacctacatggttcagagaacaccccacggggctgtttgtccacgacccaggctggacgaatgcctggtcagagggtgacctgaaccagagctggagtgaggatcaaacaggcccaggagcctgaggaaatacccagtcagtcctcccagccgcgatggagaggggcctttgcaggcgttcggaatctcggctgaattcaggacctgggaatacagggttcagagaggagaggaggaagatggtgacatgatttggttagaagcacaagcaaactgatcagcctcccagacctgccagcagatgctgtgtgagggtgatggagcacggggtcacacccctgccccaagggccactggtctccctgggcttgcagtgcagaggcctcagggtgtctgggattgctggggaggcctgtgctgccccctggtggcgcttcctggcgctgcgccctgtccacagtcaccttaggtccctttggaaacattccatttgacttttccctgttgtttgaaatcccatgtttccctaaacctctagcctgattgttctttccctaattcattgcacaagctcctttgcttttagtgttaccgctcattgcctctctaatcctgcctgattgtgtttacagaagcttctgatttgcattgaacatgctctaactggcctgtgctacttattaccgggcttgtaatagcggttcttgtctccatagcctgttgagtgttcccagatgtgactcacctttctgctgccctcttcatgcaggcctactgactcataattcacttgtcccaaaagccaccccacaagcctgagccaacctgctgcctgacgccacagtcattggcagaggtctgggcattattaatttataaaaatccatgctttacacctggacagtagacagggacttcagagattgcacgtttgaatacattctcccaagactgaggttgttcggttttaattcctgtagtccaatcacacaatttcttatggaaaaccttttgtgtttctggtatttaataacttgaagggatagcaaaatatactgtgtattcagagggcctctctgcagctgctagctcagacaccaaaggggtaaggcccaggacattcatatctttaaaagctgcaaacctggtaacctttaaacttttaaaacaaatgtcatatggggtaacactgaccttttataatttgatgtctcaaatgtagagattatctaaaaatcgtaacttgaataccttgtaatttttctcttaaaaaagaagacttgtgtaagtctctgcatcaacgccaataaacatgttgcttaataataatggattggcgtggttcttccccaggataccttatagagtctagtgaacttttcctgtttgtggaaacaatcaggctgggtttaaatgaggacttgtctctatttggagcatttgtgagcgtgtaaggaaatgagtgttttctttgtgaatcattaaattgattttttcatctttggaacttcagttgcctaatcctttccaacaatagttggaaaccatcacctaagagtgattacattgatttggagtcattgagagcttgtgcatgaatgggtgaaatgtgcgaatatggctctgggtttggggttctggagggacttgaggcatcaaagacaatcaggaccatttggggctttgaggtggatggatgggagagagaagatggcctgggatagataagcatctgctttggttttgctcaggggaagagaggctttgagcctgctctgttctcaacaacctgctcagcggtcaaaggcctgtgaggatgcaggtcctgggtcaacaggaagtcaccacggagctggacagtcatggttgga

SEQ ID NO: 7646 - DNA, 1211 bp, Homo sapiens
gctgtgagttatttatatgccaagaagcacagtggaggccttttcaccttctcatgactttaagaaatacaggaaaacagcattctctacaatccataatccctgagtgttggcaacaaaaaaatgaaagatattctaatgtaggcgtctgtgcaatggtgatgggttatggatggtcaatgagaaccttggctgccagtcctgggaactgatctcagccttccctgggaccctctggatgaggggatcctcattcacctaactgagcaaacatcccaaacatgctctgtttgcccatttattcattccattcattaatgtactcattgattccatttggttcacttcagctactgatcacctaatgttatatgccaggccgtgtgcatggctgtaattatagagctgtgactaagaccttccttccttcctgttcagtcagggttcagtagcagtagtgagaagttattctcgcttttctaaacagaaatggatttaatacagtgaactaggtgtttacatcatgattggaagggtgcaggagtaggctctaggctgacctttggcaatgataactaaaacaagactgtgaaaatggcccataagtaattgttttcattttccttttaattcaactcttttgagctccccttgccctttgctcccaacttctctgtcccagatcttaggctctctccttatgggaagagctgtttcaaagcatttatggattgtaaagtgtgaataagggtgttgttaataataactgtcacttgctgactgtttattgtgtgcccagctgtctgctaagtcctttacctgtgttatttcaatcctcacatctgttgggtagttaatattatctctacattgcagagaaggaacctgaagctaataaaagttaaatgacttgcctaggataattcagctaataagtaacatttgaattcagggagtgtctctgtccagaggtacttgcagtttaaaagacaagctgggccaaagaagatacacaaatgaccaataagcaaatgaaaagatgctcagcatcattagccatcaaggaaatgcaaaacaaaaccgtaatgaaatactactttacacaccctaggatgtttatattaaaaaggacagatactttagaagtgctggtgagggcgtagagaagtgggaacactgatgcactgctggtagaagtgtaaaatggtgga

SEQ ID NO: 7647 - DNA, 1248 bp, Homo sapiens
tggtttggagtgcacctgagtgttgcagaaggggagctgattggagggaggcaaagcaggggtgatggagtaggggctgttctctcctggacttagggtgctgtgaggcccaggactctctgacaggaggtgacttgtgcctacactgtgccttgtgaggggtgggccccaagaatggagggcctcatggcattaagcagagctgtttcctcccctcaccttcccctgtgtggcagagacacagcatgaccagcatcgcctagagctccccagccaaaggtcaatttgaatcacctagatttttgcttattttgctataagagaacagaagccaacttggggaaatcctgtgttgactgagtggtagggagtgtggattagctggggtctgccctaatggaatggtttctgcgctatcctagaggttgctggagaaattatattttaatgggaatgttcttttctaaactttaactagcaaagccacagaagcgtttgccagttaataatgtacttgatgagttgttgagctgaaatttaacagccagtttaaaaaataaggtagagaatttaaaaacaaaggacattgagagcatgtgtgtcttagaatgctttctgcatttctgttggaatcagtgattttgtgctgactgggagagtttcaagggccccgtatcttcggtggcctttccaggaggccctaaggcttggctccttgttcctgaaaagtaatttaatgtgtagcccatttgtagatgaaccatttcgccacttcatgaagccacaaggctggggcagctcttcttgctgtgagatagcccagtgaaggtggtggcagtagaaacggtggcctgaattcaggcaggctccaggtggacgacagcaataaaaccttcatggccagagcaggggtggggctgactgaaggaataaagcagggagtggagtttctgctctgatatctgagatgacaaagtcctgcagagtttgctctggaaaagagaaaaggttaaaaaaaaaaaaatccgaatggaaaatttaaggaaacggaacccaaggctccacttggattctgagtggtgtgtgttactgcagattggtaccttttgttagaggccctggatctcagttacgccccttctgcttaagctcccagttttacttgtgcaccctggctagtgactccagatgcccctgagccttgcttgctcttcccagtaccctagtgggcttctggttcacagtgtg

SEQ ID NO: 7648 - DNA, 1296 bp, Homo sapiens
tatccatgggttctctgacatggaacccatggatatggagagctgactgtgtatttgaaaaaatatacatgtccttaatttatgtttatctcatcagttttaatggctgcatacgatttcattatacagttgaattacgatttacttagccagtaatcgataaaattttttggagttgtcttccaaaagggagtatctttattgtggtagctgatcacaaaataaatacatgcttatgttgaatttttaaaaaagctagtctcaaaaggttgtatagtatattatttcattgataaaaaattcttgaaatgacaaaattatagtaatggagaacagatcagcggaagacttagaagagggtacatttctttgaagtggtggaactgtcctgtgtcctgattgtggtggggcacacatgaatgtatgcatgtgatgaaatctcatagaactgtacatatatacatagtatatataaaaacctggcttctttccgcgccgatagcgctcacgcaagcatggttaacgtccctaaaacccgccggactttctgtaagaagtgtggcaagcaccaaccccataaagtgacacagtacaagaagggcaaggattctctgtacgcccagggaaagcggcgttatgacaggaagcagagtggctatggtgggcaaactaagccgattttccggaaaaaggctaaaactacaaagaagattgtgctaaggcttgagtgcgttgagcccaactgcagatctaagagaatgctggctattaaaagatgcaagcattttgaactgggaggagataagaagagaaagggccaagtgatccagttctaagtgtcatcttttattatgaagacaataaaatcttgagtttatgttcaaaaaaaaaaaaaaaaaaaacctgtgaaatctctgtgaggtctgtagtttagttaatagtattaccatgtcagtttttctgtttttgacaattgcactattgtaatataacatgttatcactgagggaagctggctgatcggtacacaagaattctctgaacaagaagattagcatggcccctgcgcaaggatgacacgcaaatttgtgaagcgttccatattttgcgcagtctgtcaagatcatttcagtatctgctaattagcactaaggaactagtgtgaatctaagcaaaaacgggtggcacccaatgacgaaattgtggttttcattaccaaaaaaaaaaaaaaagaattctctgaacaattttttttttttttggagacagggtctccctttgtcacccaggctggag

SEQ ID NO: 7649 - DNA, 1119 bp, Homo sapiens
tgacctcagatgatccactgcctcggcctcccaaagtgctgggattacaggcgtgagccacaccacctgatcccacctcttaaaagggggaggggggtgcaaaatatctgtactcctggagcttgtagtctaattggaggtatgacacatcaaaagaaaatatgtcatagattgtaagtagtcagagctcattagaggtttaaaagaaataacgtgtaaagtttttagaagaatatctgaccagagttctcagtaaatgttagctgtggaatctcattaatccctttggtcatctgtattccagcaagctcactgtgatgatggttttccaacattcgcagtttccaccagaaaggttttccttagtgttgggtaaaccttccttggatgtctgagtgagctttatgtgcattctcacgttggtttctgtgatgtataaaagtatacccccatcttacagataggaaactatgccctgatttctgagccttgacatcatcacattctccagtttgtgtttcgtgttgaaagttaaaacgtgattcccttttcaggtgtaatcctgagagattcacatggtgttgcacaagtacgttttgtgacaggcaataaaattttaagaattcttaagtctaagggacttgctcctgatcttcctgaagatctctaccatttaattaagaaagcagttgctgttcgaaagcatcttgagaggaacagaaaggtaagctaataaataaaacctggtgctaagtaggactgcttgtactaaattttttcggtaaaatgtaatgcatctggtttgaattatccaaggcttagtacacaaaccagtgtagtgctgctttgaagttcaaattctatccaaagagattttcattatagaaagtgcatggtagctctacattctcttattaatgtttgataatgttaggtcattttgggtggttttcttgaattgcaccaaattttatttttaggataaggatgctaaattccgtctgattctaatagagagccggattcaccgtttggctcgatattataagaccaagcgagtcctccctcccaattggaaatagtaagtatcaactcttttgtcgttgttatcaagaatag

SEQ ID NO: 7650 - DNA, 1903 bp, Homo sapiens
ctttatataattggattcagaatcataagggacaggactgaaattattctacagtaaccagtaagaataagattcggccgggcacggtggctcctgcctgtaatcccaacactttgggaggccaaggtgggcggatcacctgaggtcaggagtttgagaccagcctggccaacatggtgaaaccccgtctctacacaaaaattagccaggcgtggtagcgggcatctgtaatcccagctacttggggggctgaggcaggagaatcgcttgaacccaggaggcggaggttgcagtgagccgagatcacgccactgcactcccgcctgggtgacaagagcaaaactccatcttaaaaaaaaagaaaaaaagagtaagattcatttttattagttactcaacttcagacacaattttgttaatttggatatatacatatatataataagaactcatggttagaatagaaatacagatactttaaaaatggtaatagaaattgtaccaatcaggttgctgtgagaaaactgacaaaatatgcaataaagaataccaagagagaaaggacaatcgccaattcagtttcccagaacagaatttttatgaactgcacaaatgtttaatgtaaatggtgatacctacagggaagaaatagaagagttgataatatatcactgggacggggtgggggaaagacttgaaatttttggtgcctaacactaatggtccatatgtagttaaacccatgagtatggtatatgaatgtcttttttaaatgttaaaatgtgttgtctatttaatgttaattaaaatgcagatcaaagcaccaccatttgctttttccacagatcattaacatttccttaaagtatgtaagtacctttgcaaatgcaaatgtactagtaattttcacttaagcttttgagaccgaattccattccaccagttatcacttagccactgtaatttaaaaacaaacaaacaaacaaaaactgtcttggtagaggtcgttaattagactcaacatgtactgcctttttgcagtctattatgacagtgtcttttagcacaaataatagagctaaaaaatgtcctgtcacttccattataagaaatctggattcatatctaagtgtatattataatactgtacagttaagagttcagaacaagtggtaatgttttctcttaatttaactcattttgtgccttctttactcattcaaacacacatacattttacatatagtttatttctttatgaaatgctaatcttcagcccgtaccaaaaagtagagtggagcctctttgcactactactatcaataaattttaaatcagttggatttttaagcattttttaaaagctgacattaaagtaaatctaaaaaaagtttaacaaactggccaagacactaatttttatgtataatcacaatattttatactcacctttattgactaaaaataattatgctacatgttgtcctgcatcagaagaattatttcttcttgccagtgttttgggatttgaagataatggttcactcaaagaacctattattttctctactgaggaacccaatgtagaacttgcactgatatttttattactgcctttatatgaatctataggtatctaaatgttaaggcatgtatgatctttgatcatttcttttttcaaattaaagttgtataaaagtttcaatatcttgccttaaattagttgcctattctttctaggattcaaatattgtgacatttaaaaaagaaaacattcacttttgaaacttagacttcagatcaaaaaggactgaacccccactatcataatccatacattcatttccatgttgtttgactagcagtgcatatatgaatgaatatggtaattaatcttacctat

SEQ ID NO: 7651 - DNA, 1145 bp, Homo sapiens
aaactctgggctcaagcaatcctcccatgtcagcctcccaaaatgctgggattacatctttgcccattttttaactgagttgtttcttttggttgttgagtttttggagttctttatatattctggatattcatctcctgtcagctatctgaagtctcttataaagtttttcctctttttttttttcctctcgaagtcaatttgttgaagagattgtaagtttttatttcaacactgtgctttgctcacattgtgctcagtggtcatagcttatttttcacaaaacaggcttgtctgtttatagccttaaaaaggactgctgtttataggatactcccaaaggagcagaaccttaatgttgctgttgggtgatggatcctagtttcacacacctgagtgtagatcaaatatctagaatttcatatttgcatttgtatgaggttcagaacataggtacatgaattagattcagtgggcatgaaagtaaaaggccattccgctgaaatcatggctattaagaagctatcttgcagtcataaatatgtatttacttggcaattaggaatctttgaattcatcttggtgtcgtggaaagggcactacattaggtgttaggaaagctgagtcctggcattttctctgctgttaccttcctgcctgaggagacaaatcgcatcctctcttcagggcctcagttttctcatctactgaatgtgaggaatggatttgatgatcttcaaggttcttttctgctttgtctgggatctgagttgtcttttcaggttaatcatgaataaggtgtcattccactgatttgactctgaaggagtgtcctggaactttttgtaggaagttatgtgatattggaatttgctttgatggtcttagtctgtcctgaagactggatttgtgattggcttggtggtaatccctgggccagttacaggacctcttgaagcaattgagcttctccataacactcatattaactgagaaagaattgggaatttctcatagcagtgaggttcaaagagcaatctagtcttatcctgatgtgcatcttctctgctttctcttccattctgttgggaagcgagtggcatcgtgttccagtgggggactggtttggcatcatgtggacgacg

SEQ ID NO: 7652 - DNA, 1504 bp, Homo sapiens
ccacctaaagagataaatggaactgtgcaaaaatggaacaggcacctggggaaatggcgatccctatgtcactgggggtaggtgtttggcaggagttggatgaccacttggtggggtgttgttggatggagattggactagatcatgttgggaaactttgagcccttggtaaataaagtcttactggcacacagtcatgctcattcatttatgtatagtctagagctgcttttatgttacaatggcacagctgagtagtgtgacagaaactgtggcctgtaaaacatttactaactgtccctttacagaaaacatttactaactcttggactagatgaccttagaagtgcctcccagccctgagagttgttgtcatatggtattgtgatatggtattttaaaagatatatttttttcttttagggataaatgtagaggtattaatgggtggaaatattggggggagtggttgctttaaaccagtcagacccataatgaggaccgtactgcattgtatttggtataaattacataaaattttgtagatggatggttctgagatctaaatccttttctttattttgacagctccataaagagaaggttgtttgtattgctgctggactgaggcatgcagtagctgctacaggtgatcatcttatctttatttttttatttttatttttaatactttttagagatggggtctcactctgttgcccaggctggagtgcagtggctcgatcatagcttgctgtagccttgaactcctgagcccaagctgtctaactgcctcagcctcctgagtagctagaactataggtgcatgccaccatgccctgctaatttttaagattttttgtagagacagggtctcgctatgttgcccaggctggtcttgaatttctggcctcaagcaatcctcccgccttggccttccaaagtactgggattacaagtgtgagccactgtgcccagcctgccctccgccttttaaaataggtctgtaataagaggaaacttaactttaggagaaaaaccatttaggaaatatttcaaagggtcctgctgcattgtggttctgatgaaaaggagagaacataaggcagaagtcatgtaggaaagacattagcaggtagagaggaaggaaatgaagttttctagctctttgtgttctaggtatgatgctaggtgctatttatttgattactttatttaatcctcacaaccaggaagtgatgcgagttacattttacatgtgaagaaactgaggcacagagttaaagtgcttgtgtaagcttatacagggagtaacgtagagcttggatcagagcctgggatggtttggatcctaaggctcatattttttgcagggaactgcacagccttcctaatggattttattgtttattaatttaaaagctttaagtgagcttgtctcctgtactgtgagtgggtgatgggactgacagtctgtgtgtgagggggacagggaggtggcgtg

SEQ ID NO: 7653 - DNA, 1307 bp, Homo sapiens
tgaatcaggttgggtgttttcgttgttgttgctgtaagagttctctgatattctggatattaacctcttatcagatacatgatttgcaaatattttcttccattctgtaggttgccttttcactctgtgcattgtgtcttttaatgcacagaatcagtcaactttttgaatcctctgaaactctgtagtttttaagttttctgtgaagaatgaacaatgacaactaaatttgcttgtttcttttctttgggatttcagggccttgatacaaagcatgcttgaaaaatgcgatcggtttctctggtcccagcaggcctagtgggagaagattcagcaggatgtcatgacattttgagaaaaactaaatcatgctcctgaaccttctgaacgcatttgttattgaaggaaagacaccacccccaaatcctgccatcttattggggctacttttgtcagtgtctgtacccttggcatcggcatctgtgactctttatccatgacctcagtgtttcttaaccaaagttgtactcagcatttcttaaccaaagttgaattttgaaaagagtcagtccttgtttgctggaattagaatgttaatgtcctagtattattccgaactacagtattaactgcttgttgctagtggattagacagattcttttcttactgtggcttccatgttgggagcagaagcttttcatcctggtcacatgaagacagatggtattattgactggagttgaattatttttatatcttgtctggcacaatatggaaattactgaaataagacggtgtataatggaattaacacccaaaataagtagaacactgaagatttgaatttgatatttaagtaaaatgggactgggtgcagtggctcaggcctgtaatcccaaccctttggaaggtaaagacgggaggatcacttgaggccaggagttcaagaccagcctgggcaacatagtgagaatgcatctctacaaaaaataaaaaaaattagctaggcatagtacctgaggccaggaggtccaggccgcaatgagatgtgtttgtgccattgcacaccagtctgggtgacagagaaagaccctgtctcaaaaacaaattaaataaaatatcttcatatataaattaagctaattaaaaatatttttccctgtatttatttaatattttctaatctgaacccatatacagctgactaattcattcttagaaatgtgttatctgtaatctttcctaaacagagtagcccacaagaatcatgcactttttaaaattatttctaagaagccataacaaa

SEQ ID NO: 7654 - DNA, 1197 bp, Homo sapiens
ggagggcaatgggatgatcatggcagctttgacctactaggctcaggtgatccttcttcctcagcctcttaagtagctaggactacaggcgtgcaccaatatgcctggctagtttgttaaaagtttttttgtagagatggggttttgctatgttgcccaggctggtcttgaactgctggcctcaggcagtcctcccacctcagcctcccaaagtgttgggataacaggtgtgagttgtcatgcccagccaaaactactttttgaataattaatggacttgatatacatagtgtagaggcttaaaaatattaacaaaattattggttagccatgatcaatatcaagatcctgaaaagccatatatctggagtagcctattattatctaatgatcacctagtatctggttaagtgttttcttcatagtaggtatatcttttttgtgtgtagggagaggataatgggtgatttttattttctcctttttcatagtggatatcttgacctacgtggcttggaagataagtggttttcccaaaaaccgtgttattggaagcggttgcaatctggattcagcccgattccgttacctaatgggggaaaggctgggagttcacccattaagctgtcatgggtgggtccttggggaacatggagattccagtggtaagcataagttattttctttttgtttttgaaaagattatataaaaagtcgatgggcattatattattcaattagagcctaatcaaatatccattcagtaggatggaatggtttcccgaaatctagcattttgtataattatatgttaagaattgttaagattgttgccattttatatggcattttatggcgagggggacgggaaatgaaatttctcttcttaccatggatatcttaagactgtagttcttaggatgtcttcagtcatttaatatcacagctgtttatacctgacttgtactgcctggccctgaaaagatgagcaaatccaaatgcacaaaagttatattatcacagttgaaaaatgttatgattaggttctgtatgctaagaaaaccccccttatgttctcatactatctttatatttcaaatatacatgggttaaacatttcaattggctagagaaacaggttagaatacagttaaaattcttagttttacataatgtaagtaaatgaaaatctaatct

SEQ ID NO: 7655 - DNA, 1443 bp, Homo sapiens
agctgagatcgtgccactgcactccagcctgggcgacagagcgagactctgcctcaaaaaaaaattaaaaaaaaaaagctttataattatagagactgtaagtcttgggaaacctgggaatgcatagacaaaatgtgagattttttttttttcatttcatcttcagggtctttacggaataaaggatgatgtcttccttagtgttccttgcattttgggacagaatggaatctcagaccttgtgaaggtgactctgacttctgaggaagaggcccgtttgaagaagagtgcagatacactttgggggatccaaaaggagctgcaattttaaagtcttctgatgtcatatcatttcactgtctaggctacaacaggattctaggtggaggttgtgcatgttgtcctttttatctgatctgtgattaaagcagtaatattttaagatggactgggaaaaacatcaactcctgaagttagaaataagaatggtttgtaaaatccacagctatatcctgatgctggatggtattaatcttgtgtagtcttcaactggttagtgtgaaatagttctgccacctctgacgcaccactgccaatgctgtacgtactgcatttgccccttgagccaggtggatgtttaccgtgtgttatataacttcctggctccttcactgaacatgcctagtccaacattttttcccagtgagtcacatcctgggatccagtgtataaatccaatatcatgtcttgtgcataattcttccaaaggatcttattttgtgaactatatcagtagtgtacattaccatataatgtaaaaagatctacatacaaacaatgcaaccaactatccaagtgttataccaactaaaacccccaataaaccttgaacagtgactactttggttaattcattatattaagatataaagtcataaagctgctagttattatattaatttggaaatattaggctattcttgggcaaccctgcaacgattttttctaacagggatattattgactaatagcagaggatgtaatagtcaactgagttgtattggtaccacttccattgtaagtcccaaagtattatatatttgataataatgctaatcataattggaaagtaacattctatatgtaaatgtaaaatttatttgccaactgaatataggcaatgatagtgtgtcactatagggaacacagatttttgagatcttgtcctctggaagctggtaacaattaaaaacaatcttaaggcagggtgcagtggctcatgcctataatcccagcactttgggaagcccaggtgggctgatcactggaggccaggaattggggaccagcctggccaacacaacaaaaccccatctgttaaaaaaacaaaacaaaaccaaaaaaaacaagtaaccttggtggatgtctactcaagttttctgc

SEQ ID NO: 7656 - DNA, 1192 bp, Homo sapiens
gacccaagagaggactctttttctgtacaatctcttgcttgagtggcatggcttaggaaaagaaagtgtaggtcaaactcctgagccagatcctgcaatgtaatgctttccctgttgagtaagcctttataatatgcagcttaaaagccacatataatgaggtattcattccaaaggttggcaggtcatgagttagggttcttagatcccatctaggttacaaattgtctattttatgcctgggcctaaatcaaagccattctaaactattcaaacttttctcccctcccagcatgtacgtcttctgtcccgtaaacagttccagctgagggcactaatgcaaaaagcaagaaagactgccggtctcagtgacctctactgacttctctgataccagctggaggttgagctcttcttaaagtattcttctcttccttttatcagtaggtgcccagaataagttattgcagtttatcattcaagtgtaaaatattttgaatcaataatatattttctgttttcttttggtaaagactggcttttattaatgcactttctatcctctgtaaactttttgtgctgaatgttgggactgctaaataaaatttgttgcataatttttctctcctttattggactttaggaaagatccatgaaaccttagtaagcccaacttctcatttagcaaaaaaggcataaaatccatcttaagttgaaatttagtattattctacagcatataaagtgaattaacatggggatataccaaatagaaatctaaattttgaaatatttgaaattgaagcatttgagtaacttatctgtgaaaggtccaaggagatgctctcctaccaaccctactaaatttgtttcctttctaggcctcactgaaccataagtgttttcatcaaaaaggagcagagtggcaggtccaaactatatacctgataactttaggattaaagggaaagatagtgtaccattgcctccctgcttttattgtcatttaaagtttcgtcttcatggtgagtgattctgtagccaagtttgtgaccacccaatgaactatatagctgctgtatgtcctgcagagctcatccagaatagaatgttcttgatcaaaatgagagtgctagaaagctcatgaggctacaaggctacaaagaaaagtatattccaatttgggatgtta

SEQ ID NO: 7657 - DNA, 1151 bp, Homo sapiens
gttttaaggtaccagaagcccaggaactatctgatctaccccatctacccctggatttctgcaagatgttcaaaggacattgcatattatagattctccataaatgtttgtcaagctacacaggaaatatagtaagacatgttctctttttttttttcttggcagtcttggattcatgcagaacctggcagatttctttcagtgtggctgctttggcttggtgaagccctgtgtggtagattggacatcacagtacaccatggtctttcacccagccagggagaaggttcttcgctcagtatgaagaaaagcaacccaaaactctcaatctgatttgtttttgtttatgtcgatgccctgtagtttgaaagtgaagtaaagatttagaattcacctaagtccaaaggaaaacacgtggtttttaaagccattaggtaaaaaaagttctcaataaaggcattacaattttttaggtttagaaagatggacttttctgataaatcttggcagacatctaaaaaaaaaaccatatttttcacaagaaaatgcaagttactttttttggaaataatactcactgattatggataaaatggaatattttcagatactatattggctgtttcaaaatagtactattctttaaacttgtaatttttgctaagttatttgtctttgttgtatctataaatatgtaaaaaatatttaaatagatgtacctgttttgctttcacacttaataaaaaatttttttttgtagttgagacttggtttctgacacttaacacttctagagtcttaaattaagatgtacataggacacaaattagttcacaattccaggaatgagttgagattatgattaataccagtaagcaagatttaatttggtttttcatcttacttagaaaatagaacatagaaagtcttaaatattaattacaactttacttagtaccctcaaaatattagactgatatgactgtaattactaatttcccttgttctacaggaaatgctaattcaactttagtatagtatttatacacccctgggcatggcaccttcctgctgaataacctcccttgggttcctgttgctcttggggtaaaagcaaaaattctcattgtgacctacaaagccttgaagca

SEQ ID NO: 7658 - DNA, 1125 bp, Homo sapiens
ggtggctcacgcctgtaatcctagcactttgggaggctgaggtgggcagatcacaaggccaggaattagagaccagcctggccaacatggtgaagcctcatctctactaaaaatacaaaaattagccaagcgtggtggcatgcacctgtaatcccagctacttgggaggctgaagcaggagaatttcttgaacccgggaggcggaggttgcagtgagccgagatcacgccactgcactccaggctgggtgacagaacgagactctgtcttgggaaaaaataaataaaaataaaataagataaattctttcactgagaacataatagaggcatgaacctagagtcagtaggaggatgccacggaagggatgaataactcgattaacattcacatttgtattcagagaggcattgcaggatgtcaaagggattgtaaaataggttagtctgggctcaaatcctggctctgccacttatttgtgaccttggacaggttactttacctttctgctcttcagttttctcctctgaaaagtggacacaataataacctctgccacatagaatgaagattgaatgagttaacgtgtgtaaaatgtttatgtcagtgcctggcatgtagtaggcactgtatgttagttggatttattaagctccttctctgcataaggcactctttcaaaagtgctcttgtaggtacttggcatacgtcattaaacaaaacatacccaaatccctactcttgtggagcctacagaaccgggacctgaacccatgtctgcttcttttccttttaatgtttattttccttcctctctccctcttaataattttctttaatgatcttttaaatttcaagttggctattgtcattacaaaggtgatggggtctacttcctgagccttctttgtgcttataaaattgaaaatactcttgctttactggatcgttggtctctgacaactggagagtcacggggaaggagactagcatggatttaaggattggatccttgggctgtgttgtgaaatagaaggtcactgtgggtgcacctttgcagtggaagacagagcttctaggtgggtgggtggtggacaggtgctacagctctcatctcttcaggaa

SEQ ID NO: 7659 - DNA, 1091 bp, Homo sapiens
ttaggagcaaataaaccgtgctttcatgttttttaaatggtgctttccttacccgagaggtattttgcctgttccaatcaaaccaccccattcaggtccatcagcctctgattaatatccgtgagagtgagtgacggagtgagagtgtgagcgagtggatgtggctgtcagtgcagaacagcatgtgtctctttccttctgatatatgaatgaatcaggtttttttttttttttttctgcaaacactgtgtatagtgagacttgttctactttggagaacaggttaccttttgaaaatgaggttgagtttcttcctttctgatgcattgatttttgaagatttttttttcccccttcccctcttggtcagaatcaatcctttggtgaaagtaagaaccgcaggagttgagttttggtttggtcctgctcagttttggtttttagttgtccatcctcacagtcctacacactcgcctcctcctgctagggctgggggtatctgtgtcctttaaaatggatgaggacctggtcctcgacatgtgggtgagccatggaccttgccttcccttctcgtccttgagggtttagaacacacaccaacacctccagcgtccccgccccagcttccggtggggtgatgcggtcaccctgcaaaagacttgcactttcctcagaaccaacatgacgcagctcaataagggtgagggtcactccctcccagaagccccgtctggacgagccttgcctgacctcttcggtgctgaccttcccaaagtgatgccttactggttttgtactaactgtgttcattttacataagtgtcgtgcctgcctggggtttgttttttttgtcattgttttccccattgaaacaaacagggctaaaaagtcatctgttcattaggagaactcaagttgctgtgacttttctcatccaaaagactcatttgtgtggatgcgtgaccatgggaaaaagaaaaaaaaaaagatccattttttaggttcttttcggtctccagctgacaacccaactggacaatgatctgtctggtgcaggagaaggcaaaagtttctacaagtctacatgacct

SEQ ID NO: 7660 - DNA, 1233 bp, Homo sapiens
atctgggtgtgagtgtgtcttgttctgtttttctttttaataaaacttttaaaccatatatttagcctgtgaccaggggggccaaaccctaagatttctggtaaacctgaagggtggccctcctcagacaatttatctcccagcaatgaccctactacactcgcgtactgtgaatttgggaggaggtaaagttgacttctcctcgtgggcagttttccaatcaccttgtgagtagacacctgccaatattgtttgaaacctttttttaatatgacatcctctcttgtcattctcttctcccctttcccacagacttccctcctgggtccaggttcagaaccaagacttctgtacctagtgctgcctgattggtgaacattgacttcaagtagcatagcccttgtgtgactcacaactccgtgtccttcctaaagtttcgggaagcagggttgtctaatatgcacatttcttattttggtcatatttttactttagtgtcactcaccttttacaaagtgactttgtactcatttagggctctatcggaaatgcttccattttgccttttctacagttaggccaattttgaaatatataaattctatgcaacatttatgttgagttaccaatggaagccaaaagttctcttcccaaactgccaagaatgatacaggccataattgaaatgggaataccttttaagtttcattaggggtggggtgggagtgggacaggaacaagacttgcctagatctttgttgtatcttggggacttttactttgttgtttgatgcttaaacttcaaaattctctgtattcaaatttgattgtggcgaatctacttcaaaaaggaaaaataatccaactttgtggatattaaatggaaggtttgctgttttgatctagttgtttccagtggagcagttttatgaaatatgttctataagatgtacattttttcattgtaacatagaaattgtaaataattgattaaagtgctgcattttgatgaattttttctagccatttttaaagagaaaactaggaattgagtattttgtgtacggtatgtttccatcctccctccccttcctcctcccctcctctctctctcttcctacctatttaattttcatttgtcatgaggtttttggatttgccaatgatctgctggacatcatgccccatgtcatagagaataaagctgatgattgtaccagtcttaaattattc

SEQ ID NO: 7661 - DNA, 1100 bp, Homo sapiens
atgcaagtacgttgggaatactacaagatcacttttgaaataaggcacttggggagtatgccagctgtaaaattacattttatgctttatttctaaaagcagtttgagctgtgccagttcaaagcctctgaaagcagagttgacacttagaggagaaaagaatctcaagtagagaaattgtatgacttgagagaaacagactctatcaaagggaactctcttaaaagccttttgataaaatcagtgatattatttgacaaataaattcactttgacatttaaaggataattggttttaggtataaaatgggactcagaagtactaattccctttaaaagtgctggattcccttcctttcagatacaagtgtgtttgttttttcttaattggaagtaaaactagaaaccagcagagttaaaaaaaaaaaaaaagtgtatatgtaacatgaaatcagtatttagacttcttaggggactattccatgaagctattgcttgatttttcaggttattcacatctgctgaagaaacattttcacactgtaagtctgagcatcagtttaatattgacagcatggttcataaacatggtgagtagtttttagaataaaggcaatttaatttgtgaaatttgggcaggcatggcagctcacacctgtaatcccagcactttgggaggctgaggtgggtggatcactttaggtcgggagttcaagaccagcctggccaacatgctgaaaccccacctgtactaaaatacaaaagttatctgggtgtggtgacgcacacctgtaatagcagctgctcagaagactgaggcaggtgaattgcttaaacctgggaggcagaggtggcagtgagctgagatggtatcactgcactccagcctgggcaacagagtgagactcttctcaaaaaaaaaaaaaatctgtgaaatataagttcagattttatagtttttcagacccttttctgtacgagtttaatatggcgaatcacacagcaacatcttgtggaaatggagtttttttgacaagcggtccttgagaaaagatgaataagtcactcttctagacaagattcactgtatttaagcttat

SEQ ID NO: 7662 - DNA, 1188 bp, Homo sapiens
taaaatagtgtagatgataaatatttattattattattattacttttaagaccgagtctcactgtattgcccaggttggagtacagtggtgcgatcacagctcactgcaacctccgcttccgaggttcaagcaattcttctgcctcagcctcccaggtagctgggactaaaggctcgcatcaccagacctggctaactttttgtatttttttttttttagtagagataaggtttcaccaaattggccaggctggtcttgaactgttggcctcaagtgatctgcctgcctcggccttccaaagtgctgggattacaggcaagagccactgtgcaaagccaagatgattaatattcaattaaaagtactttcactaatctttctcaattggccacatagtagaaacttagggcgtatttattcctaacatatttatacttgttttattgttataagatggcctgataataatgtccatttatttctttagatgtagaagatctttatgaaccggtgtcagtacccttctcataccccaatggactcagtgaaaatacatctgttgttgaaaaattgaaacatatggaagccagggcactgtctgctgaagccgcattggccagagcacgtgaggatctgcaaaaaatgaagtaatttatcaatcttgcaaaattaattgttttagatctccagaataatacaacctaatggcaaagtagaatatagtagaacatttcatatactggaaagtacaatgtagatattttatcttcatactgttaaagatatgtagcatttttgtacactatggatatagttaattaatataaaatcttatagttttacctattctgatatgttctgacaaatgttgtcctcatgaatgtttttgttctttattgccttcctttcagttttcctgtttgcattgatttctccattttactttttctatcctagttttttaaagtggaaggattaatctttttgaggtttggggaaaatacagggttgaagtttttagttttaaagaatcaaaatgtaggccgggtgcggtggctcacacctgtaatctcagcactttgggaggccgaggcaggaggatcatgaggtcaggagtttgagaccagcctggccaacatggtgaaaccctgtctctactaaaaatacaaaaattagccgggttgtgg

SEQ ID NO: 7663 - DNA, 1255 bp, Homo sapiens
caaaaagaaagtcactagacaggaaattatttgggaagtggttttctagactagagtttctcaaccttagtgctattgacattttgggccaggccattctttcttgtaagaagctgtcctgtgcattgaaggatgtttaccaacataccttggctctacacagtagatgccagtagcatctcgttcatcccccacccccagttgcaacaatcaaaaattactcagacattgccacgtgttccccagcaggcaaaatcaagtggagaaccactgctctagatggatattgcatcattccagggagttatagggcttgttaataatgtctatccaaacattttttaatgaggaagaaagagtagtctggaaagtagaatcatagataaagaaaatgcagtatattttaccacaataaactttctgggttcactttataagctggcctgattttccaataacttactgcaaaaaaaagtttcagattttgcagaatattattacatctgtggcagaaaaaaaaatattctgtaattaaaagagtagcaccgatgtttaaattgacctgcttatgagagtattgcacatttctaaactctttttttcccctttttttatgcagggctattttcttctgtttgagtctatgttagattctgtcctttatgcaaagaacaaatacttggcaaaaggaggctcgggtgagtataaaattctggttttaataatctaattttagtctagcagaaccagatgaacctttggatttcaaataaactatgcatggctgaggaagttcccgatagggttgaaagatgtttgcattacaagaagctttaagacatttgtttactatattgttgaaagtagaatattatataagacatgggggactccaaggtaatggtattctcaagaatgcttttattaaaaggtccttttaataaatatctaaagactaggttttggaagctttttgatattcaaactcaaatctaacaaactcctttttatttttaatcctcatgtcatttagttcccttttttcccaatggcatatttcattctaagttggaaattattcacgacttcactaaatctgtaaacccgacttctctgtgattttctgagaacatttcaagtagtgactggtttctaatgagttttaaaagtgccacataaccaatccacatataaagggatcctaataaatttggaaggctttcttttcatgtctctggaaaacatttaatcatat

SEQ ID NO: 7664 - DNA, 1203 bp, Homo sapiens
atttgtcccacatgttccatgcttttcagagttaaaaattattagttccattcaagttcagttagtcaatgctttaataaagtatactgactatgtaataaagctagccatatttgagactgaagactaaaaattttaatttggctaaaatttattgagaacctactatataacattgtattgggtaaggggcatagaagtgagttatacatatgccttgctcttaaataaattgcagtataaggcaaactgtaatatactatcgtaactaacataacagaatgtataataaacacatttgctcatcaaatattgtattgtattgtatcctatgggccaggttactgctctgggcactgagagtatagtggtgaacaagacaggcatacaggaataaataagaaaacagttgaattggtctgtgaaggggtatcataagtatctggaaatcaactgataaagttatatttagaaatattctaattaaccacgtggtttttatgataatctgtggctgagtactacattgttttataattctatttggcagaattattactagtattttgattctctcttggtatctaaattgcagtgaacctcagggttaaatattgagtttggtttggacctaatccatattaaccctaccagatcaataaaatgtcacatttttaacaaaagtagcagagtacacaaattagctttaccatgatttttcaaaaaatcagtgtcctgttttttacactttctaagcttaatgtaatgccagctttaaaaagtgattaagtccagctagttccaatagtgaaagaaaatggaatggtatttaaatttaaccaaaaaactcaaaattatgtatttatctgagtatgttaatttctttaagagatcttttgtaggctgggtgcagtggctcacacctctaatcctagcactttgggaagccgaagtgggtgagtcgcaaggtcaggagttcgagaccagcctgaccaacatggtgaaaccccatctctactaaaaatataaaaattagccgggtgtggtggcgcacgcctgtagtcccatctactcagccttgcctgaccaacacggtgaaaccccgtctctactaaaaatataaaagccaggtgtggtggcgcacgcctgtggtcccatctactcaggaggctgaggcaggagaatcgcttgaacccaggaggc

SEQ ID NO: 7665 - DNA, 1531 bp, Homo sapiens
tgtagcagaataacaaaaacatgtcaggtttgcaacactgtcatagagtttcagccacactttaaattatttgcaaaaacaaatagtataaatagtatagcataaagtttttaaactatttcactccttcgagagaaactaacttgtggtgaaagaccagataggtgagatacccaaggtcaagccctgtccaatgcagggttagcaaactgcagccccggggccaaacccacctgccccctgttttgggaaataaaattttattgaacacagccacacttaattcatttttatactatctgtagctgcttttgtactatcatggcagagttgagtaactgtgacagactgtgtggcccacaaggctgaaaatacttaaccagctgtccctttacagagaaagttttccaactcctggccctgtaaggcttgtagtgatagcaaggtacatatttgctcttacagctgagagtgaggtgatgataatagagaagtcaattctgagtcaaacaaatttaggtaagatttattatctgaggccgggcacagtagctcacgcctgtagtcccagcagtttgggaggccgaggcgggtggatcgcctgaggtcagtagttcgagaccagcctgaacaacatggtaaaaccctgtctctactaaaaatacaaaattagctgggtgtggtggcgcatgcctgtaatcccagctactcaggaggctgaggcaggagaatggcttgaacccgggaggcggaggttgcagtgagctgagatcatgccactacactccagcctgggcaacaagagcaaaactctgtctaaaaaaataaataaataatctgtatagaaaacctactcagatgaagtaataaatttgtttttagttgcagccaagaaagaacagctaccttttggagcagagatgactaatgccatatataaagtatttcttcatataactcattaatggtcatggcagagaagatataaatgcacaacagaacacatagattttaagaactattttttttaatgtggagctaagcaactggatatattactccatttatgaacacaggattgattaaacctaaattgctaaaaaagatacagcatttacatacatgaaactgatgttttgagttgtaacaattagtgccttgtataaagggaattagtaaaactgaaaccttgtagctgattgtcaactccattttaaaagttttaattagaccagaagaaatctgcaaacagaacttttgtttgcttgtggttttgttttgaaatagggtctcactctgtcacccaggctggagtacagtggcgctatctcggcccactgcatccttgacctcccagggctcagttgatcctcccacctcagcctccctaatagctgggactacaggcacatgccaccacacctgggtaatttttctattttttatagagatggggcttcaccgcgttgcccaggctggcctccaactccaaagctcaagggatctgcccacctcagcctcccaaagtgct

SEQ ID NO: 7666 - DNA, 1799 bp, Homo sapiens
cagtttatttctcaaaccagtcattttcaaagaacaggtgcctaaattataaattggtgaaaaatgcaatgtccaagcaatgtatgatctgtttgaaacaaatatatgacttgaaaaggatcttaggtgtagtagagcaatataatgttagttttttctgatccataagaagcaaatttatacctatttgtgtattaagcacaagataaagaacagctgttaatattttttaaaaatctattttaaaatgtgattttctataactgaagaaaatatcttgctaattttacctaatgtttcatccttaatctcaggacaacttactgcagggccaaaaaagggactgtcccagctagaactgtgagagtatacataggcattactttattatgttttcacttgccatccttgacataagagaactataaattttgtttaagcaatttataaatctaaaacctgaagatgtttttaaaacaatattaacagctgttaggttaaaaaaatagctggacatttgttttcagtcattatacattgctttggtccaatcagtaattttttcttaagtgttttgtgattacactactagaaaaaaagtaaaaggctaattgctgtgtgggtttagtcgatttggctaaactactaactaatgtgggggtttaatagtatctgagggatttggtggcttcatgtaatgttctcattaatgaatacttcctaatatcgttggctctactaatattttccaatttgctgggatgtcacctagcaatagcttggattatatagaaagtaaactgtggtcaatacttgcatttaattagacgaaacggggagtaattatgacacgaagtacttatgtttatttcttagtgagctggattatcttgaacctgtgctattaaatggaaatttccatacatcttccccatactattttttataaaagagcctattcaatagctcagaggttgaactctggttaaacaagataatatgttattaataaaaatagaagaagaaagaataaagcttagtcctgtgtctttaaaaattaaaaattttacttgattcccatctatgggctttagacctattactgggtggagtcttaaagttataattgttcaatatgttttttgaacagtgtgctaaatcaatagcaaacccactgccatattagttattctgaatatactaaaaaaatccagctagattgcagtttaataattaaactgtacatactgtgcatataatgaatttttatcttatgtaaattatttttagaacacaagttgggaaatgtggcttctgttcatttcgtttaattaaagctacctcctaaactatagtggctgccagtagcagactgttaaattgtggtttatatactttttgcattgtaaatagtctttgttgtacattgtcagtgtaataaaaacagaatctttgtatatcaaaatcatgtagtttgtataaaatgtgggaaggatttatttacagtgtgttgtaattttgtaaggccaactatttacaagttttaaaaattgctatcatgtatatttacacatctgataaatattaaatcataacttggtaagaaactcctaattaaaaggttttttccaaaattcaggttattgaaaacttttcattttattcatttaaaaactagaataacagatatataaaagtgttaatctttgtgctatatggtatgaaatacaatattgtactcagtgttttgaattattaaagtttctagaaagcaatctattttgccttaatttaaaact

SEQ ID NO: 7667 - DNA, 1182 bp, Homo sapiens
aattgatacctgggtcctattccataacaactaaatcaaaatcacccttttttttttttttgtaaagctttccaggtggttctaaaggacacctagggtcaataacccattataaaatgatctgattacactggacactcttaggaagtatcaaaatagaacagttcaatttgcagctacttaatgattaattacatttcttaggttttttttttgttttttttttggtttgtttgttttttgttttaaaagagacaggatcttgctttgtctcccaggctggaacacagtggtgtgatcatagctcactgcagcctgaaactccttggcttccacctcagcctcccaaagcattaggattataggcgtgagccactgcacctggccaagtaatttcttttaggaataaaaggtacttggcattccttatttgggaagtaattacagtcttatctttttttttcttttttcttttttttaataaaatctaccagtaatttaaatgtgagctttttatgtctgtcatcattctgccccctttgcctttaaaacttacaaaaatacgtgtttgttatttgagaaagcatgtttaaaaattgcagatgagaaatattgtcgttaataattatgtactgtcttaatgtgggcacttcatttgttagtataatactagataatagcagcctagttctttaggatttgacgattcaaattttttttttgttttttgtttttgtttttttttgagacagagtcttgctctgttgcccaggctggcgtgcagtggtgtgatctcggctcacttcagcctccgccacctcaaggcagttcaagcaattctcctgcctcagcctcccgagtagctaggactacaggcgtgtgccacctctcccggctaatttttttgtatttttagtagagacggggtttcaccgtgttagccaggatgatctcgatctcctgacctcgtgattcgcccgcctcggcctcccaaagtgctggaattactggcgtgagccaccatgcccagcctcaaatatgtttttaaaaaatatcattgtcctcctcctcttaagatttttttaagttattttgctcaagtacttaagtagtctggctcaagtactttgtttacaattaaaatggatattatagcatttaatagaagaaatggttatggct

SEQ ID NO: 7668 - DNA, 1229 bp, Homo sapiens
ttactctattttttttaacctgtgaaatttctttacagttttccaagaaattaagcataacagtctcatctacggcagttcattacactgtcaatgttaacatcattgctgcattttgtactttgaacacacacataatatatataaccagtggtaaatcatgactcagtacagtgcaagttttttcacttttacttaaacataatatataatggatattcatttatactgatttatgaaagtaagtttttaaacactgaaacaatcattgctaaaatacatattcttaatatttgagcattgaggcaagaggatgtaattgatagcattacttattacatccctatttatgttcaaccgtacatcaaattataaatgcaaaacaggttcagatttcatcttttgtgatttcttttaaatactattcatttttatttaaatgcacagtatttcccctatattttagtccttccattcctagagacaaaccagttatttggtggtgggaagtagctgaagcaaagaaggaaaagtaatacctttaacctcactagcttcaagagtagacattcttactagctcaatttaaataattgattttaaataggaagaaaagaggatatatttaagatacatagaaattatgatgtgaagtattcatgagaatctgtagattccatcaaaataagtaggaactcatactaaaattgttggatttaaagaggcaacttttgtttatgattcaaatatgggaatttgagaaatatttcatttgtccactggatgtcactattttactaaaaggcagctattagtgtgggactgtgactgaggtcttaaagactgaaagagttggggttcattttctgttacaacttacaggaacatttgtactttaagaaaaatttaagtgacaaatgttagaagatgatggattgaaaaatataagtaatttggcatattgaccctatataaaaaagtgggcattttgtaacattccttcaggaagaatagaattgtatgcttttttctgcatgtttgtgatcactgtgagtctcagatgattattccagttttcaatgatttttcaaaataaaagtcaatcagcattgttatttatcattaaggtattgaacactggattgcatggttgaatgtgtctttaatccactacaaaatgtgcttgttattgataggatcatgttgttaaattgtaaattttcaaaatt

SEQ ID NO: 7669 - DNA, 3623 bp, Homo sapiens
cgtctacaaaaaaaaatgtaaacaaaagtactaaaaaaatggtgagagaattattttataacttcagatcagaaaaagattactagctataatttttaaaatttaaaagcctaaaacaattaattttgattacatttaaaattctatatggcaaaaataccataattaaagataaaaggcaaagaacaaattgggaaaaatatttttcaacatatataaccaagggctaatttctctaacacctaaaaagttcttataaatcaataaaaagaaaaccaacatctcaatggaaaaagaacaaagctcataaagagttcacagaaaaaggatatacaaatggctttaaacatgtgaaagaatgttcaacttcactcacaataagaaaaaatacaaattatgagttgcttcagcatcctggtgttgctgtgccgtgggtcctgtgcggtcacttagccaagatgcctgaggaaacccagacccaagaccaaccgatggaggaggaggaggttgagacattcgcctttcaggcagaaattgcccagttgatgtcattgatcatcaatactttctactcgaacaaagagatctttctgagagagctcatttcaaattcatcagatgcattggacaaaatctggtatgaaagcttgacagatcccagtaaattagactctgggaaagagctgcatattaaccttataccaaacaaacaagatcaaactctcactattgtggatactggaattggaatgaccaaggctgacttgatcaataaccttggtactatcgccaagtctgggaccaaagcgttcatggaagctttgcaggctggtgcagatatctctatgattggccagttcggtgttagtttttattctgcttatttggttgctgagaaagtaactgtgatcaccaaacataatgatgatgagcagtacgcctgggagtcctcagcagggggatcattcacagtgaggacagacacaggtgaacgtatgggtcgtggaacaaaggttatcctacacctgaaagaagaccaaactgagtacttggaggaacaaagaataaaggagattgtgaagaaacattctcagcttattggatatcccattactctttttgtggagaaggaatgtgataaagaagtcagcgacgatgagactgaagaaaaggaagacaaagaagaagaaaaagaaaaagaagagaaagagtccaaagacaaacctgaaattgaagatgttggttctgatgaggaagaagaaaagaaggatggtgacaagaagaagaagaagactaaggaaaagtacatcgaccaagaagaactcaacaaaacaaagcccatctggaccagaaatcccgacgatattactaatgaggagtacggagaattctgcaagaacttgaccaatgactgggaagatcacttggcagtgaagcatttttcagttgaaggacagttggaattcagagcccttctatttgtcccatgacgtgctccttttgacctgtttgaaaacagaaagaaaaagaacaacatcaaattgtatgtacgcagagatttcatcatggataactgtgaggagctaatccctgaatatctgaacttcattagaggggtggtagactcggaggatctccctctaaacatttcccgtgagatgttgcaacaaagtaaaattttgaaagttatcaggaaaaatttggtcaaaaaatgcttagaactctttacagaactggcggaagataaagagaactgcaagaaattctatgagcagttctctaaaaacataaagcttggaatacaagaagactctcaaaatcggaagaagctttcagagctgttaaggtactacacgtctgcctctggtgatgagatggtttctctcaaggactactgcaccagaatgaaggaaaaacagaaacatatctattatatcacaggtgagaccaaggaccaggtagctaactcagcctttgtggaacgtcttgggaaacatggcttagaagtgatctatatgattgagcccattgatgagtactgtgtccaacagctgaaggaatttgaggggaagactttagtgccagtcaccaaagaaggcctggaacttccagaggatgaagaaaagaaaaagaaataggaagagaaaaaacaatgtttgagaacctctgcaaaaccatgaaagacatattggagaaaaaagttgaaaaggtggttgtgtcaaaccgattggtgacgtctccatgctgtattgtcacaagcacatatggctggacagaaaacatggagagaatcatgaaagctcaagccctaagagacaactcaacaatgggttatatggcagccaagaaacacctggagataaatcctgatgattccattattgagaccttaaggcaaaaggcagaggctgataagaatgacaagtctgtgaaggatctgctcatcttgctttacgaaactgcactcctgtcttctggcttcagtctggaagatccccagacacatgctaacaggacctacaggatgatcaaacttggtctgggtattgatgaagatgatcctgctgctgatgataccagtgctgctgtaactgaagaaatgccgcccctcgaaggagatgacgacacatcatgcatggaagaagtagactaacctctggctaagggatgacttaactgttcaatactctacaattcctccgataatatatattcaaggatgtttttctttatttttgttaatattaaaaagtctgtacggcatgacaacaactactttaaggggaagataagatttctgtctactaagtgatgctgtgataccttaggcactaaagcagagctagtaatgctttttgagtttcacgtcggtttattttcacagattggggtaacgtgcgttgtaagatgtatgtaacatgatgttaactttgtggtctaaagtgtttagctgtcaagccggattcctaagtagaccaaatcttgttatcgaagtgttcctgagctataccttgatgtttagaaaagtatttgttacatcttgtaggatctactttttgaacttttcatcccctatagttgacaattctgcatgtactagtcctctagaaataggttaaactgaagcaacttgatggaaggatctctccacagggcttgttttccaaagaaaagtattgtttggaggagcaaagttataagcctacctaagcatatcataaagctgtttaaaaataactcagacccggtcttgtggatggaaatgtagtgctcgagtcacattcttcttatagttgtaacaaatacagatgagttaaaagaaaaaaaaagaaaaaatacaaattatggctacactgaagaaaacattgttcacctaccattttggcaaagctccaaaaatttgatatgggactcacacacttcatatatatataccttaaagtgtctgtatttttgctgtgttgccccattcttttcaagatggtaaaggcatgcaccttggagtcaaacagacatgagtttaaattctgattgtgctgctcccagcttgtcattttgggtaaatgatatcatttctttaagcctcagttttcctcatctgcagaatggataagacagttttg

SEQ ID NO: 7670 - DNA, 1160 bp, Homo sapiens
tatattatagtgttgtatttaaattggcttactcgttattcttttgatagaatgacatatgcttttttctctacccagagatttaagaaatttttaagaaaatatgaaagacctggtttgacataggaatttttctaacttatgaatatattgtatcccttcacaaagatatacaataaattgtgtttatcagcagtaataaaattacattaaaccagctctggtgtttgaaacccaagatgtatagtttccatatccatgtctttatacaacactaagcactcaataaatatatatcggttaaatcatgtaataatagaatgtgctcccttccattgatcatagactttagaaagacttcaatctaacagaagtgttttctctatctcctgggtttactcacagtaaacaaatccgagctatgctgggccagttcagccaggcagaagccttattaatgaaagctggagtgcagccaggaacttttgatggagttcttatggatcttgggtgttcctccatgcaacttgatactcctgaaagaggtttttcccttcggaaagatggccctttggacatgagaatggatggtggcaggtgagtattcataaagcatttcatctcacaacaagaaatcaatttgtcaaaaacactctgaatttaatttttttaagactacagaatttccattacatgcctacacctaacactaccaatacataataaatcagtttgtttcatactcattatacacatcagtatttctctggatttgggatttttaaagaaaaacaatgattgcctttacacaaaatagtgaagaggataactttcatactgattatcttttttacttacacaatatgggttttagagtgttaaccaatgtcagtaaatatcatgatactgcaacaacgatttcatttttttgcatgcccaactatgcctcttgtgagaagcaaaaagaactacatatatttaatgcatcctcttttagcatacagaaaaaaaaaaaaggcaagatcctagaagtcagtaagtgtgttttgtcctgtcttatgcagtcactttgtttgaaccttctccagagaaactgtaatttatgatatgatatcaaacacagtactataataagatatcttttacacctcctcttcctg

SEQ ID NO: 7671 - DNA, 1167 bp, Homo sapiens
aatcttagaagttattccatttctctgggcctcagtttccgttactccaaaatgagggtgctggactacagcagggaagattaataggtttcatcttacagatcagctctgatccgttgataatggccatcaccagagcacagtgctgagaattctgagagcacctctaggtttatcaggacagaggggcacgatccattagcagtgtctgccatcagcactggttgggggaaagcacatcaaccttggaaggataaacttgaagattccttccagcctccttggatcattgattctgttgtagttgtatgtgcattttggattgtgcaggtgtttgatcttttgctggaccagcatcacacaagccttgataatataacagccttgtgcctgtgtgtgggtttctttttttttttttttgtactgcaggaagattgttgatcgaatcgacaatgatggggatggctttgtcactactgaggagctgaaaacctggatcaaacgggtgcagaaaagatacatctttgataatgtcgccaaagtctggaaggattatgatagggacaaggatgataaaatttcctgggaagaatacaaacaagccacctatggttactacctaggtaagaggtgctgcaggagcgatgacacagtgggggcccagatcacaagctttttgtagactctctcttctcttatcatatccactcccttcagggagatgtcacagcctcctaagtagaacctgcttgtataacaccctcctctgtaaactcagaatgtactgagttgcttacactgaatgaagttacaggtgggagggaagggctgtgagggctaataaaaaaaatcccttagattgagaccccatctcaacttcgtctcagatgcacacacggagaagaaagcagaaaggaagtgtgtctgtggtatattttcaaaatgctgcctaattctggatagcaaggattgagtgggccggagcagtcagggaaggcttcctggtgtgggtggtttggaaactggagccttggagaatggatttatatttggagaaggtgggtcaactggaggggcaaagatgcagcaatgcatgcagtaatgggaagggtttagatccaagacaaacaagatcgggagaaggaaggagaaatgagattacagagg

SEQ ID NO: 7672 - DNA, 2082 bp, Homo sapiens
ttctggctttaatgcctagtacttcggtatctattgataaacatccaaataaacaaatcaatacatttagaaaaatgtcctgcctattccccactttgctgattgcccccaaattctcaggttatgccaacagtcagtttaggcagcgaggctgtaagaggaaagtggcattcttgagggcctattttgggaagaccaacactgcttgtgggcacaaatggattctagcttctgaattactcggggacttccctgacacgttagcacggtttttatagcaagaggctgttccgatttggagttttgcaatgcagtcatggtagatgaaggaggtgcccagtagcttctggattactaaatatagtattttaaatgttgtacatcagtgaaatgacatgaacatcatacagaactagtacagttaccagagcttccatgacagtgctctttgatctcttctataggatgagaagctaactaaagaggaaatattggagaactggaacatgtttgtcggaagccaagctaccaattacggggaagatctcacaaaaaatcatgatgagctttgatagacactcaccagaatatggcagactgtcataggcattctgttattgtcttggattgttgctacaattgtctaatttacagcagttgtgatcccacaaaaagcaagtttatacctcagattggggtataaaaattgtttttcgctcagtatttactggaaaatggacatcactagtctttcagtaagatttctctcaaaacacgtgaaaaccttggtaaattgcaattctttctggggatatattggtacaacatgacttaaaacttttttttttctattaaaacttaaaggggaacaaaacttgaaaaagccctgttcttcagaaggtgagtgggttgagggaggcagtaatatgaagtgactgctgtgtattttaactaccagattttttatatttgccactgttaaatagttggaaaggggaaattctgattaagcgaaagtggtatcatcctaggtaagcttatttcagaacaagtctaatatttcagattctttcttttcgactttatactctgagttattacttactgtaagtggtgtatatgaaacctccatgcattttccagtatggatctgctaatatgcacagtaaatccatgtctttgtttgtttttctattaaaaagcaatcaagaaagataatgtgaaaaagaaaggaatttagaggtagggaaaagatgaatgtcagacatttgaagaactatagtaaaatgataaacactaaatatacttgagaaaactttcttaatatgccaatgaggtaggcctgatctttgaaatagtgaataggaatacaatgcatttcctcagtgatcactgattagaatgagttggtgggatccttgggaagccaaacggagcggagttctggatcatgtcccatccagtccagtgaatccacgacccgcagacctgtccccccgcaacagcttataccatggaatgaggacaaggtgatactctgagctgtggactgaactggcagacacaacctgtacagattgaaatttcaccttgtaaggaggaagtgaatgaaataaaggatccccctaaggattttctactgtgtcctgtggtgtttgacttcacagatgctatttgtgacattattcatatagcataaaacagtggggttggatcccatgaataacattataaaggttctggggttttttttcatccaattactagaatgttcagaatagactcatatttactaatttaataaatgtatgtacttaatgcctttacttttctaggtcattttaactataaaatcttcctgaaaaaggttgcacctggaaaatctggacttcttccctgggcctatgaggcgctgtaggaggaggcctatgggatctggcccctaccagcagtagcatcatctccttaccactgtccctttcataccgcctatagtctggccccagagactttctagtcctcagacacaccaaggtcattcccaggttgggccctttgcacttgctgccccctcacattcag

SEQ ID NO: 7673 - DNA, 3559 bp, Homo sapiens
ttctcaactgattaacaaatgattacccttttgccaaggtaatgtctgtaacttttctagtagctgtggttatgtgtgtacttgagagcaatactattgttcatttctttcaaaaaaatgaaatctgccaagtcagattgatttcttctccccagcaaccacacccccaccaaaccctttgggttatattatcaaaaagatttttgctgtatgctggaagtccagcagggtgcagactacatgagagaaattctgaaggtgatccatgggggctgtagtgtgtctaaggagccactggacctcatggaggaaaacctgtggctcttgtgggattgccaagatggatgaggtgagggaggggtcttcaacattatttgaaatagttgttgaatacagtatttccgttttagtttttcagaaagaggacagaatttgagattgtgctttgtcattcgtagtcagttttataatagagcaatcctcaacaggctgctgagcttcgtgcttatctgaaatctaaaggagctgagatttcagaagagaactcggaaggtggacttcatgttgatttagctcaaattattgaagcctgtgatgtgtgtctgaaggaggatgataaaggtttgtttttaatttttttctaatatttcctaataaaatcttttaaatttttcttgtgaattatagagtcgtccctcattatctgaggcaaggaggatttggaaccctcagatacagaaggctgactgtatttatatgttttgaatttcagactacaggacttttaaatagataggtagtggttgtatgtattttgggggcacaggtgatattttgatacatgtatgcaatgtgtaattatcaaatcagggtaattggaatatcacacatcttttctttatgttggaaacattcaacagttctcttctagctctttcaactatacaatacattgttaaccagagtctaagcactgttgttttcaatcttaccttcacacatgctttcagtttgtgtaatctattatacctataaagtaaacctattttgagaaaacctttattttatacataggtgtatttcttaagtgttattacactaaatgcttatagtcttagaataaaatgaaaaaaatgaagctctttcctgttcataagtttcagattaacatcaaatgggatacagtttcaagtaatctaatagccatttaattattaggccagtttcctgtttattgagatagaatgggaaattttcagaattgttgagttcggaaatctctagttaaggtttagagatcaaacttggatgctgatttcggcagcacatatacaaaaaaattagattaaatttgggatatgattaatatctgtaatacttaaaaataactaattcaagcagagagctgacagctttaatttctgatttcctatatgtatacacaaagttttccttaattaagaaagtatcctagtcctaaatcataccagtaacttccaaatgattgaatatcatgacagtgaaaattgaaactttatatacatgtaaatcagtctctgttttactagttagaaaccacatcataggccaggcatagtggctcacgcctgtaatcccagcactttgggaggccgaggcaggtggatcacatggtcaagagttcaagaccagcctggccaatatggtgaaaccccgtctctactaaaaatacaaaaattagccgggcgtggtggcgggtgcctgtagtcccagctacttgggaggctgagacgggagaatcgcttgaacctgggaggcggaggttgcagtgagccgagatcgcaccactgcaccccagcctgggcaagagagcaagacttcatctgaaaaaaaaaaaaaaaaaaaaaaagaaaccacatcttaggtatcaatttccttcctctttaataaaatatacaagttgctttctgaatgcgaaagtgtcttacatttgatggtcttcattgtattaaaacactggaaatgcatatttaactagacgcattgagtattgtagtatcactgttgattgtgttatccatacttgtgtagatgttgaaagtgtgatgaacagtgtggtatccctactcttgatcctggaaccagacaagcaagaagctttgattgaaagcctatgtgaaaagctggtcaaatttcgcgaaggtgaacgcccgtctctgagactgcagttgtaagttaagatctgaaagaaactcagtttttctaggtgcttttttcatgttactaacttttaatggtgcagagcaggaattctggaacttgactctcagctgtggctcatattagctgtgaccttgggcaagtggcttgacctttctgtgccctagtttcctcctttgtaatatgaagttgttaacggtacctgccacaggtttgtggtgagagctaacctcaacttaaaactggttgctgatttcaaacattgtttatttgtttgttaaccaaccaggttaagcaaccttttccacgggatggataagaatactcctgtaagatacacagtgtattgcagccttattaaagtggcagcatcttgtggggccatccagtacatcccaactgagctggatcaagtgagttactgtgtggaatagttgttctgcttataagaaatgtactttttttttttttgagacggagtttcactgttgttgcccaggctggagtgcaatggcgcaatctcagctcaccgcaacctccgcctccagggttcaagcagttctccttcctctgcctcctgagcagctgggattacaggcatgcgccaccacgcccggctaatgttgtatttttagtagagacggggtttctctatgttggtcaggctggtctcgaactcccgacttcagttgatcctcctgccttggcctcccaaagtgctggggattataggcgtgagccaccacgcccagccagaaatgtacttttatatgttatactttatatgtgttactcagttttctccttttgtcaatctcttgtaggttagaaaatggatttctgactggaatctcaccactgaaaaaaagcacacccttttaagactactttatgaggcacttgtggattgtaagaagaggtattcaaaagtaatgaactaacatatcacttaacagacagtataagtaggtggggatgttttttaaagagaagtagggccagtaattttgctttactctgttctccacagagttgctataaatctatttctataaatttgacctaaagttaaagataactataaagattaaaagtagttttccctcatctttgaactttttaaaaagtgaaatttggctttttttctaaaaaaagaaaggtggggcctttccaacatgggcttcaacctactgctgtagcatgagcttggtgaatgtggtgaagcatctcatcatttttggatggtgcagtggcagactacaaaaaactttgtgttaatgtaaatattccatctctccacccatgtccttcctcttgcttatcacactctagacccagcgagcctatgtcaggtataaaa

SEQ ID NO: 7674 - DNA, 7300 bp, Homo sapiens
gtgcccggctacctccctttctttcatcttctcacttactcatcattatagacttagataatacaagtttcttttttattacatatatattgttcctagccccacttaggaatataagtctgatatttaaaaacacatgaacatttttcaaatgcaagtataaatatattttggactgttgtgcatctggactatgccattagccatcatctttcagtgtggataatttagagctcagtgtatttactgattatttcattttaaaagtgagccatgtgaaagcagatggtttggtaatttgatgaaacagaatgatatttctgccttgaacaaaatgtaggagtcagtatctttaaaataatatttacaatatcttagaatatcttacaataaatctgaattctgtattgatggtatcttttttgtctcttatctgtatagcttttaaccatttttgtgagtgctaaattggcatcatatgtcaagttttatcagaataataaagacttcattgattcacttggtaagttttggggtttattctttgaggcacagaggtgggaacatgatacactaacagttatgtactatgtgttccagcaagtatggctgtggccttatttgtagattatcctaaaaggagtcgtgtatgatagaacagcacaaaaataggtagacagtttaaaatattacttagaatgaattgagaatcagaaaccaagaaggtgtaggaggtggcatttgtgatagaaagagaatgaaactgggagtatgaaaacaactcggggcccagcgcggtggcttagaggtataatcccagcactttggaggccgaggcgggcggatcacgaggtcaggaggtcgagaccatcttggctgactaacatggtgaaaccctgtctctactaaaaatacaaaaaattagccgggcgcggtggcgggtgcccgtagtcccagctacttgagaggctgaggcaggagaatagcttgaacccgggagatggaggcggaggttgcagtgagccaagactgtgccactgcactccagcctcggcaacagagcaagagtctgtctcaaaaaaaaaaaaaaaaaaaagaaagaaaagaaaacaacttagcacttgtaatcccagcactttgggaggatgaggtgggtggatcacttgaggtcaggagttcaagaccagcctggccaacatggcaaaaccccatttctactaaaaatacaaaaattagtgggcatggtggcacatacctgtagtgccaactactcaggagccttaggcaagagaaccacttgaacccgggaggcagaggttgcagtgagttcagatcacactgctgcactccagcctggatgacagagtgaggctccatctcaaaaaacaaaaaaaaaagagagagaaaatgacttggaacctttttgtctcatttaagagcttgctgaactttaggcccttccagctcttctgtaccatgattctttgaggtaaagttatatcaacaatcgggtgtttggagaagattgaagaaatagttccattggtacatttgtttttaaaatttagagatggaggagtgagcagaaaagcaactgaaagaattaccattactttgatcataatggtaactttcagaaatgttttaagagctgataaaatttgatgattaaaggtactttattaagctaaacattattcttaaaataatattgtttctttgtagaagactttattccttagatatatggtgatttgtatttttggtccctttttttaagccatagccacagaatggtaacaaatagttttttcccccctactatactattttatgcttggatacccccgccattaacaaattacaaaagtatatagtattgccagttagatctgaaagatggaattagaaatggaaatgtaattttacatgatagtaagacttttctaactacgtttgttgaaaacagcatagtctttattatttttatctttgaattttcttgtctagcgtatcagttcagtaaatgtttgtcaaattgaatcaaatcttattcatccttattgagcaaaccctacatatgttcaatattttaatttccttctggagcatgtttttaacatactaaaatacaaagagaaaactcagaaaatctgcagttgaacaggttttaaatgttgtaaactaccagtttctttacactggagtcaactgtgaaactaaggtgctttgttctcctactaggcaataatcaaaacacattagagattgattatattttccatattaagactgaatttttttttgtttttgagactagtcttcctggttcttgacgatacagatgaatgtatggtctattttgatagtcttcaatttggtaatcattaatgcttgtcacctgtaaattgtgtgcctccattggaattggggaagattgacttattctgaacataataaggcatttgaaatacaccaagataaagtagatgtaagtgtgtttgtgtagaaagctttgccaggtgcactagacccagaaaaccacattctgtcccagttaatttgttttgtggcatgaagctatgtgatggaatgttaatgtcagcaacctctttatttacgcaccaaggaaaaaggagtagtaattaacactttgacactcccccattgatgtgtaattgactgtttcaaaggagcactggttcataagctattgcatgcattaaaactgggttttctatattgcagcattttaagacaggggtcagtgacaatgcagaaattgctcaatgatgcactttttttattactgcattaaggttttgacatattagtaatgaataaatgtttccataaaattagattttttataactttaaaattgaaatatgacacagtacactgtgacttcctctttgatggtagtattttagttttatgaaacaaagcacagcttcctacaaagtctttaactcatacttcactgccttagtagtttgatttttcagaacaagagtcctaagggttttaagtttggttctttgttactttaaacatcaatttaaagtgtttttagatgcaagttttcacatgtaaaatagataacggttttatggaattcagcctagaaataatcttcattcctctgataagttttttcatttatggtaagattgtaactgcagaaaagataagcagtaaaatagatttaatttcaggagtatttaaaataatagaaatttcagaagtttctatcactttatattgaaagagagttgtctgtccatgccaatagaactgagaatgttaaggaatttttgaaaaaaatctttaatacttattcattgataagaaaaaattcgttaacattgctaatttattgtgccagctagaattcaaattccttcatttgccttacgtttcttgaacatctatgcaaatcagtattctattagaaatttgtttatatgcttttcagaaaacatctttatattaatgtgtatattttttattttaattctataattaaacatttattacagctgaaagcctagtgacaactatctagattccacaagttgcaatcagtttgtcagaacattttcctttattaacactgacaacttaggccaacagtagcattatcttgtgtcaactgaattgccctaacatgtccacatgtaatctggtgttatccagttgctaccttttgcttcagaaagttaatcggcatctaatttgcattgttaattagggttaatgtgcactaattgatttcttggcgcctgtagatttccattaaacccagttagcaatacttccttgtatacctcattcatttgagttatggtgatcatgtttttgttgaatctgtgccaaataggaagcctgtatcataattacagctaattaacagatgatcatgtcctatgttaatgggcttccctaatcttccactaatatatgaatgttataaatttaaaatttatttatggagtgtttagagagtgaactttttaaacaatacagacttgaagctctgaatttattacagggcacttgattgatcatttgctgattttacatagttcaaaagttcagagaaaaggaacatgtaaatctagattagttttagaaacttagttttataattaataagttagcatcaaaacaagtatatatgatattatgttagaattctgctcctacttaggactaggttatatatttaggattcctaatttttaaaatttctagccctttattttagaaatgaacctattctaggcctagcactgctattttttgactataagtccccatttaatctctttgctcctcagttttgtttttaaagtgaaaggatcaggactgggtaattccttaagttttcttctaggcctaacacattgttgttatttgaataattacaacagcatgtttcattagaaattataatgcaaaatttgaattatttgtgcaattttctacttttgtcttataaagaacaagtatcacttttaatggtattctttaattatatctagtactaactgtattggcctataaatgttaaatgacacacacactttgacagttttggtttgtaagtagttttgatttttaaatagtgacctgaagcaaaatggaatgttttcataactgaaaatgtttgtgaaagtattttaaaacttcaggtttaccagtaatagtaacacagaaaaaactaataagtagataagaaatcctctgtgtttaaatgaagagctattagtgtgaaaaataagcttaggtaatttaactaaatagaaattgttcttatgaaatgtactttgtagattttatctcctaaaatgtataactatttaaaaatgtaaaatgtgcaaaacttttagggtctaaaaataatcattttatggccgattcttaactttgaatctatcacctatggtactatagaaaaattgtttttaatactctgtggagtcagtttatagtttgcaaatataagaagctttgtcaaaattgttctatataagtgctcaaacaataatttccacaattacaaaagtaaaaataatttccacagcttaacatgagatgtaattgtgcaggtctttaattagtatgaacactcatcaggcttcactattctgttttctaggcctgttacatgaacagaatatggcaaaaatgagactacttacttttatgggaatggcagtagaaaataaggaaatttcttttgacacaatgcagcaagaacttcagattggagctgatgatgttgaagcatttgttattgacggtaaggcagacagaacattttcatttatttctagaatttctcatctactacatggatcatagtaagatttttatctggaaactgagccttacacaacaaagatttgtttatagcagatgtgtatttagtagattagtggatatatttgttgtagggtgaaaatttagtagaaatataaactgctatattctatcccttgaaatcacgtagaacaaagacgtttaggcaatacaccactgtggttaagagcacagattttagtattagatgtggatttaagaccaggcccttcctttgtgaaacaggaatgtaggggttcatttgtggttgtaagaattaaatgaattaatacaggtaaagcacagtgcctggcacatagtaagtgatctttcaagtgttaaccattaccagtttttttatgattagcctagaaacaagaacttcttccccaacaattagattataaagcaacttaactgctcaggaattttttctgagctttttaaatttgaaagttgggattatgcaattaagattaataaaaggtacagaactattgaccttttttcccctaatgctctaagttttctatgaagaagtaataacttagtaggaaattagtttattcccctatatgagatggtaggggaagaacacctagcattctttaaaaaaaaaaaaaaaaaaaaaacagcaaaaaactgtatgcagtatttatttaatatagattgtcccagcagccataggacaaatgcatgacctttcttttggttgccccatactgttttgcttattagatttaaacagtgtataatgttggaaaacagtataaagttttattatggcttacttggtcacagttttcataccttagctatttttcttggaaattttccatataacatacgatataaaacatcttttttcagccgtaagaactaaaatggtctactgcaaaattgatcagacccagagaaaagtagttgtcaggtaagatatttaatgctttgcagcattttatagaacgatttagtttgttccgattatttcacttaaatgtttagagaaccaaggtggtgttatcacttgactgtagttaaatagttgctatttatcataattttattaaagttcagactgaatgtgattagcttatttaatgaaagagtcctattttccagcacatttcatttaatggctgagcattggctagaatactaatgacttttatgtctgctttatatagttgctcaggagaattagaaggcttaggatcaatatggtaaagattttttttaaataattatgtaattcttaaattctcttactattctaaattaggtatatttaatcttgcttttaactggattcaaatctgtagtattataaaagaataccagaggctaaaaggttgactaacactgtgtttaatttttcaatttttagtcatagcacacatcggacatttggaaaacagcagtggcaacaactgtatgacacacttaatgcctggaaacaaaatctgaacaaagtgaaaaacagccttttgagtctttctgatacctgagtttttatgcttataatttttgttctttgaaaaaaaagccctaaatcatagtaaaacattataaactaaaaaaatttgcctagtctggacagttattgtctcaaatttatactaaaatcacaaactccagaggatatgaagtaataaattacaaggggtcacaatgtctgtcatacaatacataaattctgttctttaaaaaaggatattgaagaagcaatgagcactttaaagaaaggataatatacagagagaagacagaagtagagtaatacaatttcttcacattagaaaaacttggaaaagcaaagacaaactgtagagctttaaatacaacagtcattttattctagtaaaaactataccagaatttcagttacataatttcactactgaaagcacttatctacattattttaatctgt

SEQ ID NO: 7675 - DNA, 1819 bp, Homo sapiens
ttaagaatgtagcagcatataagctataaatttctggagtatatgcacacaaatttatctgggtgggtatgtaggtatatgtgagtttgtttcctcttccaggagctcaagaaataacatactcctgaaaaatagaatagaaatttctgtgctttatgtttttgccaggctattacattttcttatcatttaggatcacttataaaatgatcattgtttattttgttttataatttttacaggagtgagactgcaaacccacatgtttgatagttcctaccaaattaaaagtttagaaagcataaatcatattacagtgcatatgtgagtgtatgtctctcttttaagatgcatcatcttaaggcagataaaagtaagtccttaatcattacagactgccaaagactttatccttttagattctcagtctctttgttgcttgttgcaaataaatcatctagcaacatttacatttaattaggaaatctaacttgcttttaaaagttacccacgttgcatataaaaatcttgctattccttgtgtcttggctttacataagcacttttgctcatgtgactttgcactttgcacttattttaatcctctttaaagggctacaggcaaattctactttgccataatcacactaaggcatggaagaacaacttgcccagaatctagcaggttggtgacaactgggtttagaatgagtgagcacacttttctagtcccatgtcatgcctataaaattacactgcctcgaattatgaaattcagggatcttgtacataattctaagtttgggacagaaatttacaagcatttctcatatatacatacatttatatatgtacatgttacatatatttagatgtattctcatatacatatgaaaatatttatgatgaatagaattataagatatgtatgtatcttgcactgaatcataatttgaaatatttcatgaattcatttacttctattgactcccaaaattctaactgcaagctagcttcagaacctgtgagaaccccaccccacccaagcagctgcctagatttgtctactgctatcattttgtgtaaagcagttgctctaacttgaatgagtctagaattcatcattaagattgtgatatttatagagcatccaatgtggagatcatgatactttaaatataaaaaggaaaatatgatagaactgttattgacaaatgcttataatgattgaagggaaagtatctcaacattgtatcagtcacatatatttctgttgctttcaccattttctattcctgttgtaagtttggtggtagatttagttttgtttggtttatctgttttgtttgtgttttgtctcctggcaattgattagtgttaatcattaaatctattttgacacaaggttttatatataattagatcagttttccactttattacaattaagaaatgagtaaaatatggatataaaaggagaattggattgaaaagacaaatacacatttacaaggtcatacctttggtaggacagacaattccatatagaatattctcttttgataatgaaaaaaattaaagagagcacaaactttgactatgtcaaagtatttttatttttaattttttgagacaaggtcttgctctgctacccaggctggagtgcagtggtgcaatcacaactcactgtagcctgaacttcggggctcaagcaatcctcccacctcagcctcctaagtagctgggaccacaggtgcacctcggtacacctggctaatttttgtgttttttgtagagacagggtttcaccatgttgccc

SEQ ID NO: 7676 - DNA, 1107 bp, Homo sapiens
tttccagaaggagtctcactttgtcacccaggctggagtgcagtggagtgatcatggctcactgcaacctccgcctcccaggttcaaggatttctcctgcctcagcctcctgagtagctgcattacaggcacctgccagcacgccttgcaaatttttgtatttttagtggagatggggttttgccatgttggccaggctggtctcaaactcctgacctcaggtgatccgcccgcctcagcctcccaaagggctgggattacaggcgtgagccactgtgcctggccccaagttttgcatcttttaatgccctctgaacaaatacatagagaaaactctcagaacaattaaaacctgcagagcaacagtgtcctccatgtcttaggtttcaagtttgcctctaaaattctaatccatatttttctacttctcagataatttatgtgtgtgtactcttcctagacgtacaagagactttttaatgctaaatatttgtcagtgcttaacaaaaactcaatttcacattactcatattgtttttgttttaattgaatgtgaattaaatttttattagttatttgatttggaatgttatgtatgccattaacactattaggggaatctctagcatttctgtatttttaaagaatttgattcttttgtagattctgcctgtgtggtcattttaaaacatgtgtgacatatatcagtaccttcattcttctatattttgtgtctcctccaacctccaactttttttgttttttgaaaaatgtttctctaacacctcaacagtttaaggtaatttagtacacatatatcagtatttttgtgatctgaaaaagcaacccattttctaaattcatatttttcctaaaactttactatgtttttattttaagaggtttcctgttatatacactttttacacatgcaaataaactttataccaagtgagtatttattgcttgtttcatttaagcattcttcctcatataatggcatataatgaaatatgatattatattaattaaatttgaacaacacattgagtgttttcaaaacaatatttatagcatgatgtcaatgtatatctttcacccaatggg

SEQ ID NO: 7677 - DNA, 1132 bp, Homo sapiens
gacctttgccaagcactggaacacttccaccatctctctctgcttatcagcatcccaccaccttcagcaatagaaactttgctaccacttcacctttggtgcttcaggattcaacttttaacactacatcaaatggaattttaagtcatcatgaccctttgctacaaatcaagacttcccagggaactgttccaactgctttggcatttgagcgcctgggcagttctgtattaagtaacagcataccacctcagtcttcaacataccgctcagctcaagagtctgcaccccatcttttacaacctcaatttagtttgttgccttcagcacttgggggatcccagcagactcctcaagcctacagttcaactctctttactagttctactgcttccattgaaagagctcttcttcgagaatgtagtgttattaaacaccatcagcggccttcaggtacccagtcaattcaggcacaactgactggttcacagcactccttacatagttatctatcaaattcaagtgtagttaattttcaggaaacaaccaggcagtcatctttatcctgtagcccaattggagattccactcaggtgagcaacggaggattacaacagaagacctcccaggtctcagtggaacttgctcagtcttactcatctgcgattccatcatcagggtatcctccttctactacaaaaataaaaagctgttctacagaacaaccactgacatcaaccaagacccctaaacctcaaagtataattcctcctgtgcaaacactaagctattccaaacctttacataatcagagttctgtaatatcgggccaagcacaaatttattctacagcgcagctaccaagccttttatcagttagtcagtcccaaaattacggtttagtacagccacataatgtgccatctattgttcattcacaggtttataggtccagcaaggttgagaaattgccacccttgtataaaacattgactttttctgggtcatctcagactgtaactcctgaaaatcagacgcttaattattcatctaatcagcaagaggtattgtcttcagttacaaatgagaattaccctgctcaaacaagagatctgtcttcagtaagtcagtc

SEQ ID NO: 7678 - DNA, 1550 bp, Homo sapiens
cagcacgatcaaataattaatgcttcatctcagattcaaattccaaatcatgctttagggcatggccatcaggcatctcttcctaatacacaggtccttttagattctgcctgtgatttacaaattcttcagcagtcaatactgcaggcaggtttaggtcaagtaaaggcatctttacaagcacagcgtgttcaaagccctcaacaaatagtacatcccttccttcagatggaaggtcatgttattcaaagcaatggtgatcattctcagcagcaactccatcctcaaaattctgaagttatgaaaatggacctctctgagtcttcaaaaccattacaacaacatctaacaacaaagggccattttagtgaaacaaatcaacatgattcaaagaatcagtttgtttctcttggatcgatgtgtttcccagaggcagtgcttcttagtgatgaaagaaatattttatcaaatgtagatgatatcttagcagctacagcagcagcttgtggagttacacctactgatttttccaagtcaacttcaaatgaaaccatgcaggctgttgaagatggtgattctaaatctcattttcagcagtcattagatgtcaggcatgtgacttcagattttaactctatgacagctacagtaggaaagccacagaatataaatgatacttccttaaatggaaatcaggttactgtgaacctttcaccagtacctgcccttcagtcaaaaatgactcttgatcaacagcacattgaaacacctggtcaaaatataccaactaaagtaacttcagcagtggttggaccaagtcatgaagtccaggagcaaagttctggcccattcaagaaacagtctgctaccaatcttgaatctgaagaagacagtgaagctcctgttgatagtacattaaataataacagaaaccaagagtttgtttctagtagtagaagtataagtggagagaatgctacatcagagagtgaatttaccttagggggtgacgacagtggtgtgtcaatgaacccagctaggagtgcacttgcactgttggccatggcccaatctggggatgcagtcagtgtcaagattgaagaagaaaaccaagatttaatgcattttaaccttcaaaagaaaagagctaaaggaaaagggcaagttaaagaggaagacaacagtaatcagaaacagctgaaaagacctgcccaaggcaaacgccagaatccaaggggaacagatatttacttaccgtatactcctccttcctcagaaagctgccatgatggttatcagcatcaagaaaaaatgagacagaagatcaaagaggtggaggaaaaacaaccagaagtcaaaacaggatttattgcttctttcttagattttctgaaatccgggcccaagcagcagttttccactcttgctgtacgaatgcctaacaggactagacggccagggacccagatggttcgtacattttgtcccccaccacttcccaagccttcatctacaacacccacacctttagtgtctgaaactggcggtaa

SEQ ID NO: 7679 - DNA, 1159 bp, Homo sapiens
cactaatgaaatggcagatatggggtggtcaaagataatcagatgtcaagtagtggccttctgcaggccggccgcttccatcatggaactgtcattaccacctctgctgaaggacagtggtgcggcctttaggaacgaagttagtcctctggaaatggacctaaatcccaccacatttttaccctaatgaatgatttttctattttgtaaaccattgggtaacttgagtcatattttcagaaacattttttgacaaatgatgaagcatgcactaagtataatttttttttattgctagagaagtaacacttaaagtaacgattttttttttctgactccggctaaacaccagaatgacagagaagtggcagaaaccatatgtttgtactcacatctggccacaaaaccagaaatactgtacattatgtaaagaggtctggtgtggtgtgacatcctgtataagaatatcatcaatttaaaatataaaatttggaaactattctgctttacagactccttttactcttaacatgttcaggaaactggatgtggaattggtgcaattctctgactgctttttgtgtcaaattatattgtgataaaaaaacaatgacatactattttccctatcgcaaagaaaagtattttcgtttatactgttttttcctttggaaaattttcaattgtacattttatttcactgatagttgtatttttcacaaggaaaatgttgtggttataattacgtttgatatatctctacaacaccttttgttattttcagtaaatcttagttatatgttgaatttctaatgtgaattctatcttgaggtaaccatttttttcatacagatttgcttcagtgttatccagaatatgcattcagtactagaattagtttagctttataaatagggctgtgttagacactgcagtaattttctaattcataaaataaacttcttactaaactagcacttgattaacttgttgaggtaaaaatctaactacatttacattttgaagaataaaactgataattagactatttgcagtgttaaacacagcttccttaactcttagaactggaagttgtagagctctccttttggtgcctttccagcctttatacacactattgtagctttcttaggtttga

SEQ ID NO: 7680 - DNA, 1175 bp, Homo sapiens
ttactgattatgtaagcaaaacatgttatttttacaaattcatatatgtttttgtgcatatattaacattagtatatttattagtctttattttacagaaattgatcataggtgacttacatttttaaacatgtcttagatatctttttacataaataaaaataggtctatctgttcttttcctccctggctttctgaggatagactgccatcatgaacggcacggtaactatccgcgttagaaagttcatgtccaaccgactacttcagaggaaacaaatggtcattgatgtccttcaccctgggaaggcaacagtgcctaagacagaaattcagggaaaactagccaaaatgtacaagaccataccggatgtcatctttgtatttggattcagagctcattttggcggtggcaagacaactggctttggcatgatttatgattccctggattatgcagagaaaaatgaatccaaacattgacttgcaagacatggcctttgtgagaagaaaaagacctcaagaaagcaacgaaaggaacgcaagaacagaatgaagacagtcaggggaagtgcaaaggccagtgctggtgctggcaaaaagccgaaggagtaaaggtgctgcaatcatgttatttgtggctgttgtggatttttcacaagaagattaataaactataaactttaaaaagtaaagatctatcttatttgttttaatgctgcaatgtattccattttatggctgtaccatagtcacttatctaaaccctctaaggtacatatttctttctttctttttttttttttttgagatggagtttcactctgttgcccaggttggagtacagtggtgcaatcttggctcactgcaatctttgcctcctgggttcaagcaattcttgtgcctcagcctcccaagtagctgggattacaggcatacgccaccacacctagctaatttttgtatttctagtagagacagggttttaccatgttggctgggctggtctcgaactcctgacctcaagtgatctgcccgcctcagcctcccagagtgctgggagtacaggcgtgagccactgtgcctggccagttacacttttcatttccacattttaacatttctgaaattacttcttggttattttatttatttattttgagacagggtctcgt

SEQ ID NO: 7681 - DNA, 2101 bp, Homo sapiens
ttcaccgtgttggccaggctggtcttggactcctgacctcaagtgatccaactgcctcagcctctcaaagtgctaggattacagggatctatacttttcttttgagggaaaatgttggcaccgtttctagggcatattggccatttcagcttctcagtaaatatttgttaagtaattaaatgcacttgattctttattcttagccttttaacgcaatactcagaatagctgaagcaccaattaactgaaatggagatattataaagatagttatcttctccaagggaaaaaatcatcttcatggaaattaattacttttttacaaattgtgaatttgacccttaagagttttcttcctgatatttaaaattgaaaaaaaaattgttgacattaatatttcttctttccttttttttcttttcctttttttttttttttttgcaggtatggcctcacaagtcttggtctacccaccatatgtttatcaaactcagtcaagtgccttttgtagtgtgaagaaactcaaagtagagccaagcagttgtgtattccaggaaagaaactatccacggacctatgtgaatggtagaaactttggaaattctcatcctcccactaagggtagtgcttttcagacaaagataccatttaatagacctcgaggacacaacttttcattgcagacaagtgctgttgttttgaaaaacactgcaggtgctacaaaggtcatagcagctcaggcacagcaagctcacgtgcaggcacctcagattggggcgtggcgaaacagattgcatttcctagaaggcccccagcgatgtggattgaagcgcaagagtgaggagttggataatcatagcagcgcaatgcagattgtcgatgaattgtccatacttcctgcaatgttgcaaaccaacatgggaaatccagtgacagttgtgacagctaccacaggatcaaaacagaattgtaccactggagaaggtgactatcagttagtacagcatgaagtcttatgctccatgaaaaatacttacgaagtccttgattttcttggtcgaggcacgtttggccaggtagttaaatgctggaaaagagggacaaatgaaattgtagcaatcaaaattttgaagaatcatccttcttatgcccgtcaaggtcaaatagaagtgagcatattagcaaggctcagtactgaaaatgctgatgaatataactttgtacgagcttatgaatgctttcagcaccgtaaccatacttgtttagtctttgagatgctggaacaaaacttgtatgactttctgaaacaaaataaatttagtcccctgccactaaaagtgattcggcccattcttcaacaagtggccactgcactgaaaaaattgaaaagtcttggtttaattcatgctgatctcaagccagagaatattatgttggtggatcctgttcggcagccttacagggttaaagtaatagactttgggtcggccagtcatgtatcaaagactgtttgttcaacatatctacaatctcggtactacaggtaggtaacaactccatactttttggttgtttattaatgtgaaatttctgctaaatgaaatacttttgtgtgtgtttgtggtagaagagaccacttcagttaaataaggaaatcaagagaggatcaatttaggttcgttttaaagagattaaaaaaaatcaagacataaaatctacccaagcaggatagaaatctccactgcaaagttccatgccaaagacatctggttatttttatttttaatggaagacttgaaggaatgataggtgattaataatgatcaaacagaagtctttaaatgttggaaagtatttacattaatctttgtatatatcattgggcattttagcacttgagagaaatagtttattaaagatataatcaatcatatgtaactgaacatttagaaaaattatatacaggtttgagtagcccttatctgaaacttttggggccagaagtgttttggattccagatttttccggattttggaatatttgcactgccaactagttaagcacccccaaatttgaaaattcgtttcctttgagtgtcat

SEQ ID NO: 7682 - DNA, 1164 bp, Homo sapiens
caggaggctgagtcaggagaatggcatgaacccaggaggtggagcttgcagtgaaccgagtttgcgccactgcactccagcctgggcaacagagcgagactccgtctaaagaagaagaaggaaaaaaaaaaaaaaaaaaaaaaatatatatatatatatatatatatatatatatatatatatatatatatgcaagatttgcaagtaccactgtcctagttttaaaagtcagttattggtagttaatactgtgttctgtggttgactttaaacttattaatgaccctgtcagaaagatgccgggagaagaagagagaagaacccccctaagtcccattggtttacttttcttgacacagataatatatttccaaacaagtgaccttctgtgtgtgtgatgtcctagcccaaaagaggtcattgtggccgccctacctgctgcatagggattgtgatgacaaaattaggagacactgaaattctgaaaatttataatcaagctgtattgtaacagtcgaggattggtaaacaaattataatgccacatcttagtggagataatatgcaaccttatccaatatggaaaaatgattttgttatgttaaaagagaaaaggcagtgcgaagttggatgtgcattgtgatcacaggtctgtccagcaagcaaaccaaagcttttccaagaacatcatctggaaataaaatttaccacagtatgagtcatggttttcttgatgcggtgggatgtgcacgtggtcagggcagagggaggaatggaattcttcttcttttctttctatttttccatcttttctaaattttctgtaatgatcatgtaaacccaggttaaaaagaagtgaaagtgaaattctattacttttaaaatggggaggcagagaggccagttgcggtggctcacgcctgtaatcccagcactttcagacgccaaggcaggtggatctttgaggtcaggagttggagaacagcctaatcaatatggtaaaaccccgtctctactaaaaatacaaaaaatttagccagccatgatggcgggtgcctgtagtcccagctacttgggaggctgaggcaggagaattgcttgaacatgggaggcggaggttgcaggagccgagattgcgccactgcactccagcctgtgcgagga

SEQ ID NO: 7683 - DNA, 1152 bp, Homo sapiens
ggtatattctctatatattctgaatattaactacttaccagatatatgatttgcaaatatttttcatttattctatgaattgctttttcactctgctggtagtgttttttgatgcacagaagtttttaattttgatgaagtctaatttgcctactttttcttttgtttgcctgtgtcatgtccaacaaatcattgccaaatactgtgtgtcatgaagtttttcccctatgttttcccataaaagtcctacggttttagatattacatttagatctttgatccctttggagttacttttggtagatggtgttaagtaaggatccaacttcattcttttgggatcacatgtgaatattcagttttcctaatgtgttaaaaagactgtcctttccccattgaatagccttggcacctctgtcaaaaaacatttgaccatatacaagagggtttatttctgggctctctcttctattccatttgtctagatgtctgcctttatgccagcactacattgttttgattaccatagctttgtagtaagttttgaaatcaggaagtatgggacctccaacttcgttcttccttttcaagattgctttggctactcaaagccccttgagattccatgggaattttagggctaatttttctatttctgtgaaaaacagtcactgggattttgataggaattacattaaatcttcagattcctttgggtagtaacaatcaatataaagtctcccaatccataagcacaggaagtctttccatttatttgtcttctttaatatactaattttttgtaagaaaaattagtaagaaaaattgtaagaaaaattaggtaagaaaagtgaggtcattcttgatgtatacttaagactagctccaaaaataagaggcctacgggttcaaagtcatggcactgatccctgaaattcatgccctgtcccccaatagaagcagtccctacagggaacactttcctgtcactctttaactcttagattcctgtagcctctaacctcatctcttacttacccctcactcatgccatgattcatttagctaagaagacctataggctgatggaacagaaagctgttgtttgcctacccagcatccatcctcccttcttgatagcatcacaatttt

SEQ ID NO: 7684 - DNA, 1205 bp, Homo sapiens
ctgaaagaagatagtagaaatttaaaagttgagagaagactagaaatggaactgattagaaggggaggttcaaactgtcaatgcacagacttttcaaagaagttgtttatattttccaatggcaaactgccctttctggaatgttcagagatgatgtgtcatggaaccttcaaacaagtctcttgttcggatgataataggtagtgtccttttagtatgctggttgatctttcatagtgttagtgttttgttacttaaaaaggaaatcagctataaataaaatgtatttttgtaattcccgtgtgtatatatggtatatttctatcaatggccagttgttgtagtccaaaacctaaatcagtttgcaaaacactgtggacagtgcgagattttattgacaggttaacacaatgcctacgtctatccacataggcattcaatgcacttgaatgaacaaagagccaaagaaactcagcctgttcatgcaaatggtatgagtctgataaaatcagctacattgtcctgctttatcaataataatatttcattagtgcaatgatatcaaccagtactttgtctacttggtaaatgcctggaaatactgtatgtgaaaatgatgtttcaagatcttactgtaattgaagtatacgtaaatgtttcagaagacagtgtctgaaatttggctgtttcaatgacttacagagactgagtctacagtttgcagagctatggctccagagtgctaagagggtggagtcacaaatcactgtggtctttacagagccccaggaaatactgagtgagtcaactgagacgactaaaaagatagcatgctaaatcagatactgtcttaaactagacaccatgggttcaagaatagtattaatagatgagaggaaaaccttaagttggaaagaaatcagtctgttcatgttatcccactcatggggagacagagccactctggtcagattttctgtgagtgagatgtggtcccttccctgaagaatctcctaacctcatagaggtgagagagatgactggacagctgactctaagagatggtcaaaagtgcctcaaggaattgaaataaggttcccagagagccctgaggaggcagcaatgaacaaacaccctgttcatcagaaccctctagatagtcacagaagccacaaaaggaccttggttgaccttggaggaggaag

SEQ ID NO: 7685 - DNA, 1150 bp, Homo sapiens
gaagagatggaagaagaggaggaggaggaagaggaggaagacgaggatgatgattcagcagatatggatgaatcagatgaagatgatgaagaggagagacggaggagagtctttgatgttcccattcgcagacgccgctgctcacgccttttttagcaagccttctgctgatggaagcactaggatgattctaggctgttaaatagatttctcaataatgtaaataactaaattgttctctgcatatagcaggaaaactagcatgaaatattgtttcaggccctgggttctatgtgacactacattaggaattggattgtttgggtttgctttgtgtttttgaggtagaggaagaaatgggaatcttttttttctcttccaggagtcagtggaagaatagttctctagctaaggaatggacatacctttgttttaaaatattttatacttacaaaaatctagaaatggagagggaactgttttgaataaggatttaaaatacctgcacaaggatagagagaaactatgtgactcattctgtgaaaagacttcttgcagttgtgagttatttagaaatgatcaaaatttgtaattaggctaatccatttagtgattcctaatattttgtactcacagagaactaattgactaaacaacttgaacgctagtggtttgtccttagacaatctgtctttgaatttaaagtctttatcgctaagaccttgactttaaatttttcatcactacaaccttgaatttaatttcaggtcttcaacatgatgaccttggatttaatttaaagtcttcaacactatgcgctttatcatattattcacagatgcatttttgaaatgtagtatgtaaaagtatgtaacgtgctgtttattaacaaaagattgttcacaacatctcatgtagtttaaatttgtaaatactgcttctgttttgtttctcctttatacacttgactgtctttgtgataagtgacatgaattttatgttaggattaagtatgttttcctgaaacttggattttttttgtaattatataattgagagttaagaatgaaatccttcaagtgttaaaaactcacattttaaaagcaaattttggttccaattctgtattttgtataattgcttattttcc

SEQ ID NO: 7686 - DNA, 1173 bp, Homo sapiens
tttaaggtagaagtttatattagtaattttagaacttttctctctccaagcactgttttagctgcatttcacaagttttgatgtgttttcatgaacgcgtagttcaaaatagtgtcagatttcccttgtaatttaattttgatctatgacttttctagaaatgtgttaattttcaaacatttgggggagttttcagttatcttttggctatcgattttttaaatttattgtggttagagaatttgctctgtattttcaatcctaaatgttttatggcccaaaattatggtttatcttggtaaatgatccttgtatatttgaaaataatgtacattctgctattttggggaatattactctataaatgataggtcaaatcggttgacagtttttttcaagtcttctgtatacttgctgattttttttttttttggtctttgtcctatcaacaagtgagagatgattgttgaaatctccaaatataattatagttttttgtttctctttttagttctgtcaggtttgcttcatgtattttgaagctgtataattatatgcaaatatgctaaggattattatgtatttttaatgacataattctttcatcattatgaaatctccatctttatcgctgataatattccttgtcctaaagttcaaagagcattgaggtgtgttttggcaggcagttgagttactattgggtcgacttgatcctttggaatcttgtttgtttttaatgtttgttagggtgggtgtaaagttgtctttatttaaggacggtggttgtcaactttcagtctcatgaccccctgaaactctaaaaacttattgaggactccgaagaattcttgcttatgtggattgtattaatgcttaccatatcagaaattaaaactgagaaataagtaaaacaatatttacttattagttccttttcaaatgacaataataaacccatttcatgttcagctctctcttaactatgttctttcttattagttttcgtttccttctaaccacaaataaacatataaaatcttgacctgccttgtggaaaatgttttctctcaaggatgagaaataaaatgagaattctggacttacttcttatcaacattaaaaaagccatgggggttgtatttgttgacctttcctgtttgtatattagtt

SEQ ID NO: 7687 - DNA, 1153 bp, Homo sapiens
atatgcataatgaaaaacttcagatatatatacctaactaaagaaaacaatacaatgaaactctttgtacctgtacccagcttgtatatttatcatctcatggtcaatcgtatttcatataaatccacattcatttccttgctccctttgccctctagattattttcaaacaagccccaaacacattgtttcatcagtaatagttcagtagtaaaataccttctagggaaagagctgttctgaatttttaacaattgcttaaaatagattatgtttaaaactatttgtaagtcaggaatcatccttttgtgtattgaggtcatatctcactcattgagtaaaacatgttttatttaagctggacctgaaatggattgaactaagttttatataactaattttggtgttttacttttatattgttttgcagattcagaaaacaataaagaagacagcacgtcgggagcagcttatgagagaagaagctgaacagaaacgtttaaaaactgtacttgagctacagtatgttttggacaaattgggagatgatgaagtgcggactgacctgaaacaaggtttgaatggagtgccaatattgtccgaagaggagttgtcattgttggatgaattctataagctagtagaccctgaacgggacatgagcttgaggtattagtggtatttgataatagaaacttctgagtatttaagttgacaactgaaaggttattaattagctatttactattaaaaggttgaatgaacagtatgaacatgcctccattcacctgtgggacctgctggaagggaaggaaaaacctgtatgtggaaccacctgtgagtatcactgtgataactttgattttataactaggaatctttaaaaactaattttcttatgtttatagttcacttggaagaaaaaaattagtttttttttttttttggagacagagtctactctgttgcccaggttggagtgtagtagtgtgatctcagctcacagcaacctccgcctcccaggtttaagtgatttctatcacctcatcctcccaagtagctgggattacaggcatgcgccaccacgcctggctattttttgtatttttagtagagacagggtttcgccatgtaggccaggctggtctcgaac

SEQ ID NO: 7688 - DNA, 1215 bp, Homo sapiens
catggtggctcatgcctgttaatcccagccctttgggaagccaaggtgggcatatcgcctgaggtcagaccttcactaggcaacatggtaaaaccttgcctctactgaaaatacaaaaattggctggacgtggtggtacacgcctgtaatctcagctacttgggtggctgaggaacaagaattgcttgaatctgggaggcagaggttgcagtgagctgagataacgccactgcactccagcctgggtttcagagcaagactgtatctcaaaaacaaacaaacaaaaaccccgtaaagtttaatataactacattcttcttgttccctatcattctgtaatacatttctgttcttggtgaaatgtaatctttttatgtgtatatgtgttttagtaacagttattttttaatcacaatattttatagaatgttggatcttcttcaagccaggcatcctcagataagtcttacattataattcatgttctttttcttagataaagttctaaaggaaattgttgagcgtgtttttcagtcaaactactttgacagcacccacaaccaccagaatgggctgtgtgaggaagaagaggcagcctcagcacctgcagttgaagaccaggtacctgaagctggtgagtattaggtggatatcaactttagtttagggtcctggttttatttgattttgctacaaatttaaactatacacttacttagttttcatatatgtacactagattttatttttaaagagactttaagcatgacaaagtttttttttttttttttttttttttttttttttttggagacagagtctcgctctgttgcccaggctggagtgcagtggcgtgatctcggctcactgcaagctccgcctcctgggttcacgccattctcctgcctcagcctcctgagcagctgtgactacaggcgcccgccaccacgcccggctatttttttgaatttttagtaaagacggggtttcactgtgttggccaggatggtctcgatcccttgacctcgtgatccacccgcctcggcctcccaaagtgctgagattacaggcgtgagccactgcgcccggccttgacaaaatgttaagacagattatcaagagtaattcctaccagtattcattatatttgtcttagtagtcatttgtcttactagtcttgatcactattataaactgatagatagttcttttgca

SEQ ID NO: 7689 - DNA, 1953 bp, Homo sapiens
acacactggccagtgtaccataatatgttaccagaagagttattatctatttgttctccctttcaggaaacttattgtaaagggactgttttcatcccataaagacaggactacaattgtcagctttctattacctggatatggaaggaaactatttttactctgcatgttctgtcctaagcgtcatcttgagccttgcacatgatactcagattcctcacccttgcttaggagtaaaacaatatactttacagggtgataataatctccatagttatttgaagtggcttgaaaaaggcaagattgacttttatgacattggataaaatctacaaatcagccctcgagttattcaatgataactgacaaactaaattatttccctagaaaggaagatgaaaggagtggagtgtggtttggcagaacaactgcatttcacagcttttccagttaaattggagcactgaacgttcagatgcataccaaattatgcatgggtcctaatcacacatataaggctggctaccagctttgacacagcactgttcatctggccaaacaactgtggttaaaaacacatgtaaaatgctttttaacagctgatactgtataagacaaagccaagatgcaaaattaggctttgattggcactttttgaaaaatatgcaacaaatatgggatgtaatccggatggccgcttctgtacttaatgtgaaatatttagatacctttttgaacacttaacagtttctttgagacaatgacttttgtaaggattggtactatctatcattccttatgacatgtacattgtctgtcactaatccttggattttgctgtattgtcacctaaattggtacaggtactgatgaaaatctctagtggataatcataacactctcggtcacatgtttttccttcagcttgaaagcttttttttaaaaggaaaagataccaaatgcctgctgctaccacccttttcaattgctatcttttgaaaggcaccagtatgtgttttagattgatttccctgtttcagggaaatcacggacagtagtttcagttctgatggtataagcaaaacaaataaaacgtttataaaagttgtatcttgaaacactggtgttcaacagctagcagcttatgtgattcaccccatgccacgttagtgtcacaaattttatggtttatctccagcaacatttctctagtacttgcacttattatcttttgtctaatttaaccttaactgaattctccgtttctcctggaggcatttatattcagtgataattccttcccttagatgcatagggagagtctctaaatttgatggaaatggacacttgagtagtgacttagccttatgtactctgttggaatttgtgctagcagtttgagcactagttctgtgtgcctaggaagttaatgctgcttattgtctcattctgacttcatggagaattaatcccacctttaagcaaaggctactaagttaatggtattttctgtgcagaaattaaattttattttcagcatttagcccaggaattcttccagtaggtgctcagctatttaaaaacaaaactattctcaaacattcatcattagacaactggagtttttgctggttttgtaacctaccaaaatggataggctgttgaacattccacattcaaaagttttgtagggtggtgggaaatgggggatcttcaatgtttattttaaaataaaataaaataagttcttgacttttctcatgtgtggttgtggtacatcatattggaagggttaacctgttactttggcaaatgagtatttttttgctagcacctccccttgcgtgctttaaatgacatctgcctgggatgtaccacaaccatatgttacctgtatcttaggggaatggataaaatatttgtggtttactgggtaatccctagatgatgtat

SEQ ID NO: 7690 - DNA, 1165 bp, Homo sapiens
cactctgtcacccaagctggagtgcagtggcatgatcacggctcactgtaacttcgaacccctggcctcaagcagttctcctgcctcaacctcctaaggtgctgagattacaggcatgatccactacatctggacagattacattgaaagaggaatcctctcaccactttttccaagagagggcaacatacctgtgttctgaaatttcagttaagttttgatgatataaaggcttttgcctatagcttattcagaagtgagaggagaacttgaggcccctagtctggtatttaccctggttccagtgcgaggcctgatgagggccctctggggtaatacgtacctggtctttgagtgcaaatagcaggctgggtgagagcttacaggttgcatttctgtgctcattgaggtggtctgcactggtaaacttggcttctctggtggttcctgggccatgatgggaactgactgggcacagcccagaggtctttgaactgtcaggtgtgttcagggttctaggtcaccctgagccaaatgagcagcatgggtcgctgcccttgagagggaagatagctgcagtgacacctcccgcttagggctgagtcccagcaggctggcttcccttttcattctggaaatatgatcagcagctacatagctctctatgcagctccagctgcaggccctaggcttttttgattcacttcctggtaccctctttatcacaaaagagaaggagtgagtgataggataaagcaggagaaactgattctagttaagtagtgttataagaaaacaaatggcctatgaccaaaaaaaaccaaaaagttaatagaaaaagagtacataaaaaaataagaagtggtgtttccacttggcagtttcactctgcagaaacaactgctattaacagtttattatgtatcctgctgcctcttttttcatgcacataaatgaattaaatgcgaaggggtcatactacagagtgtaagtggtcccctgttagacatttcgattgattccagcatttccactgttagaaacagtgctcttaggggattcttacagataagtctgtgggcactatatttaggatacgtttccagaagagaagttgctggatgagaggttgtgtgtattcaaatgggtgttgtaccagttgatg

SEQ ID NO: 7691 - DNA, 1218 bp, Homo sapiens
gctgaggcaggcggatcgcctgaggttaggagttcgagaccagcctgcccaacatggtgaaaccctgtctctactaaaaatataaaaactagctgggcgtggtggcaagcgcctgtaatctcagttactcaggaggctgaggcaggaaaatcgcttgaacctgggaggtggaggttgcagtgagccgagatcgcaccattgcactccagcctgggcaacaagagtgaaactccatctcagaaggaaaaaaaaagtctgatgtgcagggaagtggtccagactgaagctgtaaatttgagttatcagcatctattaaaaattggtaccaaaggccttgagactgaaatgagatgaccaagggagtgagaagtccaggtgctgagcagtgctttctggcctgcaagaactgccgccctcttatttagcctggcatcaacctcacttctccacagtgatggtgatgaatggtggaaacttgggtctttcttggagttcacctaatatgtttctgtttccacaggccaaagctgtcttgaaatttatcgagggcatctctgaaaagaccctgaggagtactgttgcactcacagctgctcgaggacggggaaaatctgcagccctgggattggcgattgctggggcggtggcatttgggtaaggggattcagtcccccatctttaggaactctgggctctgtgggggtagtgtgcagggttggggtcagaggactggtatctcacgttcctagttctgagttctgagtgggttcagtgtgtgatttctctaggtcttgatttcctgccaggaaacagcagcactgtttccccaacccaccctaaaggtgcatgtttacttgtgtgtacacacagacacatatataccagggcctttgtaatcactatttacagttgaacaaacatgcagaggcaaagaaatgggagtaagaaactttacaactcagggcatgagaatgtgtatgaccagccttgctgactgagaaaagtacaagtttgacattttaatgattttgattaaaagaagctttctttggcttctgaggagctggttttaggtgtgatgttagtttctgtttttttctactgggtttggaagatacatgcagctgccaatagagtatgttcttccaacttctcggccataataatgaacctagaacttactgtgtttgcctttgtgcattatcttccttggtgctc

SEQ ID NO: 7692 - DNA, 1191 bp, Homo sapiens
caccagcaacctgcaccgcggtccgggcggggcgctggtctttctggacaatgaggcgggcttggtgcacggctaccgggtagcaggcatgtgggacaagtataacgagccgctgttgcagtcagtgtgcgtgttccgcgagcggaccgcgcggcgcgtcctggagctgcaccgcggacaggacgccgcggcccggctgctgcgcctctaccggcgccacgagcctcgcttccccgagctggccgcccttgcagacccccacgctcagctgctacagcgccgcctcgacttcctcgccaagcacattttgcactgtaaggccaagtacggccgccggtctgggacttagtgtcaccgggaggaaaagagagagatctggggctggggtatggatgatggggggaagggcggtcgcctctgccactgtcagggaccagccggccaacgcccacccgcaaaggtgtctaaaaacttcagcttttcacccacctgcccctttctttcaatcccacgctgtttcctttcaaagttctgggaggacgaactcaccgaggcgagaagtgtaacattctctccacccagcttataaaaggattctttactgtgccagcacggggattggatccgaagaaactggctactggggtttggcccccgagtggccgtccctgtgggagatgcaccccattcttgggccccccctcattccctttccgaaaaaggaaaacttgcgtttgagccgttgagctaattctgcaattttctaccaaacagagcgctggtggccccggagcagggctgtgacattggctggtggagcccccttcctgtgttctccctttgttccagcgccgcgatggtgagatcactgttccaagcagggggacggctcgcgataggacaaagagagcaggacctccagactctggggagccctgcagaccttgacaatttgcctgactcattcctgacctcttgtcattttggcctgaaggctacaaattcagggtcagctgtatgcactaagtcaaataatgaatttcttcctccctctcgcaaccgaccaaaattttgacaacgatgatgttcaccagaaggaaaaaaaaaaatcagttttatgcactttattttgttttgattttcattttttattaagaaaaaattttattttacagaatttaccttctctgt

SEQ ID NO: 7693 - DNA, 2124 bp, Homo sapiens
agtatggggagaattgttcccattccatgtgttctgaattcagctcatctcccagcatatagatatatcctcctttaactccgaccagaacccttcttcctgtggcactccccacccatagaccttcagatcatctcccacaccctggatctcactctcctcttagtaacagagacactcctgaggttggacttccttgcttttctctacttccaaatcacaatttcttacaaccaagctttgtgctcccgagtaagcagggatgtactaggggaatgtaaaactgcaaacttaaaaacctgcatcttcttgaagcatcagttttacttaccaaatggtttagagtcataagatgacctatttttatataaaagttatattatagaataaaatgttcatacgcatagactgttaagataaaaaaataggaatcttgcaaggtaattcttatttgcaagtgggttatgtgttcactctcctctacctttatggtattttggtgttcacttacgaagcatacaactagaaccatatccaagcagactctgggttgctgttaacccagggcctagacttctagtgcctctgaggcagaaccaaaggagcctgcactgggggaaatcccttttcctgcctgcctgtctgcctgtgacctgtgtacgtattacaggctttaggaccagctgattgttatgcttgcaggatggttttgaaacagaaacaatacttgtttactgtaggaatcctatttatattatttttcagtcctgtgaatgctgtgaaaagatttattcctttgaggccaggaagctcccaggcatatatgcttctaggttaggattgtcctgactcactaaagatgccaggatattggggctgaggggagtttgaggtgttaaaaaaaaaaaaaaaaaagcatttttctctcaaactgatggccaagaaatggctaggacaattttggtgctttacctatctctgcaaagactggagaatttggcataccattaattacaaccaccaatcatatccaacaaaagtaccctaaaagaaggaccagtggccactctcgaaaaaatttaagtatcagaagattaaaaagattttaggatttggaagcttgtattgtctttccccaataatcattgtttgatctccaaatagtagccttatattagcaatagacagatcattggttctccatatctgatcatatgttactactttgaatcagtatttgggaaattcaagcatttatgcagtggatataaatggaaatataaaaatatttgccaacctgtctcagtaacttatcatatctctgtgatcctcaaggaaagcacttttgcttttacttagaaagcgtttcagatttgctttatagactcctgctgtcttcagtacctgataaaactttaaccagggaagcattaaacacagtgcagcagcttttgcccaggcttctaagttcctgccggcagcatttatcaatgtaagaactaggatgcttcctgcagtggcactaccttcccctagagctggagcatgctgcttggccttaagccccagcatgatgaggcttccctcctgccaggtcagtaaaagttagagagctcagaattgggtcttgcctgggtgcaggtggcagggtttgctgaaacccctaaagagaagtcaccaagggaggcaggtaatgaatgtttccagaatcagtcggatactcatagcaatttctggctatctttcaaatgttgaatttctggatgctgagagggactttgatttgatatcattaaatccaggacagtcccaagaagtgcttggagtctcggctctgacagcccaagaagggaaataacttgtattaaggaacaactatgagccaggccctgagctgtctcttagataataaaacagatggggagtggaagagtcatttgcttcaagttatacagctaggaaatactcaagccaaatcttgaacgcagctccccctaattctgtggacaggcactttgtaccacacaccatggtccacctaaaaacagaaggataaaaagacttcaggttttcccactgtgtgctgaccatcccaatttatgaatcttcttcaaaatgacattt

SEQ ID NO: 7694 - DNA, 1148 bp, Homo sapiens
aaatgttcttccctctgtcttcttggtctttttgaaatacatttaaatagcctttttccttttttgttgattctaaaatcctcacgtttttggagtttgaacttgagcttgtctccaagttctaggggtattctctttcatgacctaggacatagtgcagggtcagtgctaagtgagattctggaagcagagtcttcagaattccaggtatattttagttttgctgctggttcaaacggctcatctcagtctcgttttgcctctacagaaagtacctttttcttcctgaattttgggtggaagagggtatacccaccctctggggccgtcatcaggactaagtggctgatgatcattttccatatgttggttccacactgacttcaaaagggtatgaacagcttgcgtctgggaggctcattaagtttcctgggctctctggaccacctccagtttaatgagttcatacagtggactaaagagcctcaaagattatgaaatagaaatgccctttctctaagcatatttaggggaggacacactgactgttccctttcctgtttaaatatgttatatttgtttgcgagatggaagaggaaagtagaatgaaaagaaattaaaatctctgtagacttgagctatttgcatacataggacaccatgaaaaggacatttagtggattcagaactcaacgtgggtggggaacgaaacagagggtaaaaagactggctttgcaaaataaataacagtgtcacttggaagtggtgatctgagtgaagatatggaaataatgtggtaaagactaaaccagaagtagatataccagaagaagacataatcaaaacaacacagagatcagaactacagagatgtagatgttaatgggagaacaaagtagagttatatggtgacagtcagtcacaactgtggagggaggaaggccaggccacaaggacgatggatttaaatgccattttattaaaattttaattactgtccacttgcattgcctgagattttgggatgaacatatttgtgtctgtgcatgtatgaaaccaaccaacggtcccatagatagtttttttgggtaaacatagaaattgacccttctggtcttaaagcttgaaacttacatttttttaatatg

SEQ ID NO: 7695 - DNA, 1184 bp, Homo sapiens
ttggggatttgggttagatgatctaaccaggaggccatcactggatggtcacccccccaaaaaaattccatttgagcatcaaaacctgctttgcacaatcctatttgatgcccccagttcagcagagtcagtggccaaagaaaactttggacgtgagtaacacccttcagcagtcgcaacgttattttggttttgtgaaggactctgaaaccatctaccctgtataaattctggctttagaaatttgcccaagaatgctcattctgagagctttcctcagcagcatatatcatcagcctcatcctaaaataggcagggagcccctcccatgagtttatccaagttctcagctcctaaaatgcaggctgccaagaccctacacctgccctggctctacagccacttacctggtttctggactgtcaccctcccagctgacctgcccgtagccaaggaatgaggacctaacttgagttggcccaaagtctgacctggctgtatgtccctgtggcccacacccagcctgtcttgctcattcatgcagcctcaacactggcctccaaagttcccttaacacttgcaaagtcctttttacctgtgcatttggacttgaggacactggtttctatcacaggtgagagccatgttcaatacctccagcaagctctcctggctccctgcactgtgcacgctcctcttcccaaggtcccaataccagcacctctagttagagttagggtcagggtcaggcctctcccaacatcccagtagtttctcctctgagacacatgggcaagagacaatttggagtcaagattttccatttggatctattttaaatcttttagaaatgcatttgaaacagtgtgtttgttttttcccttctagttaagggactatttatatgtgtataggaaagctgtctctttttttgtttttcctttaacaaggtccaaagaaagatgcaaaaggagatcacacccttgccccgctgagccccgtgataacaagtcactccagactaacctgtgtgccagacatttgtgcattgttgcactttgaggttattatttatcaagttcttgaaggaagcagaaagagggactcctctctccctccgtgtatagtctctatgtttgtgctagtttttcttttttttctctgtgtccagtcagccacagggc

SEQ ID NO: 7696 - DNA, 1156 bp, Homo sapiens
aggcaaatcagagtgagtaccaataaatctgcccctcccttcttacttgtctccccagccccagctctcagtctgccaagtgatcagagattttggcagaaaccaaagtgaaccattctagtctcaacccatactctgtgtatggtgggttttttccctaattctactttttaacttttttctgattataaacattattatataggcatgttgttaaaaaacagaaatatccaaagcagaaagtgaagtacttaaaataatggtatttcaattgtgaaaaaaattaacaataatcaaaaatagtttgaaaggctgaatgaaagtccatgtttaataaatggtcattacagtaactctgagccagccacagtgctggagcagttaatctgctcaagtcatttagtcctcccttcagccctgtgagctaggctgatgagcaaacagaagctcagaggttagataagtggtagcacctgtattcaagtcaagtccatttatctctaaaacaagagctcttaccactattgctgaagctacacatttcctaaggctcaggccatgatttcttctctgctttatgtcacttctcattctgccctaacatctggagggctgggtgttcaggtagaagcctggatacgctgccactgtgaattagtaccaagtgcaggcagcacagagcaatgggtaaggcacatgactcgctgtgggtctcgggctttgtttatctgtctttctcagagacttgctgcatagaccaatgcattgcatgtgtgcagtcctcagagccgcctgtcgtacaataaatgcttggtaaacacgggcggcatgagcattgagctgagctgttccttccacagtctctctgccacgcctggtcgatctggactggagagtggatatcaaaacctcctcagacagcatcagccgcatggccgtccccacctgcctgctccagatgaaggtacattcactatcatgccattagaaagaagaggcagcacccctatggccgtctaaaacactagtctccaaggtttgggatctctaacccatatatttttttaaattaccatcccctttatcctcctttgtttagttacaacgtgtatgtgtactactgcagtaacatactatggacatattaaaacaataa

SEQ ID NO: 7697 - DNA, 2205 bp, Homo sapiens
aactgtgcatgcgcttgcaccttcagttaccgactgctcagcgctgtgcaaactatatatccctttttgtccacacaatgcaaggagaatatgacagccacctcccttggcccttccagggtacaatacgccttacaattcttgatcagtctgaagcacctgtaaggcaaaaccacgaagagataatggatgccaaaccagagctgcttgctttccagcgacccacaatcccacggaacccaaaaggttttggctatgtaacttttatgcatctggaagccctaagacaaagaactttcattaaggatgacacattattagtgcgctgtgaggtctccacccgctttgacatgggtagccttcggagggagggttttcagccacgaagtactgatgcaggggtatagcttgccctcacttgctcaaaaacaactacctggagaaaacagtgcctttccttgccctgttctcaataacatgcaaacaaacaagccacgggaaatatgtaatatctactagtgagtgttgttagagaggtcacttactatttcttcctgttacaaatgatctgaggcagttttttcctgggaatccacacgttccatgctttttcagaaatgttaggcctgaagtgcctgtggcatgttgcagcagctattttgccagttagtatacctctttgttgtactttcttgggcttttgctctggtgtattttattgtcagaaagtccagactcaagagtactaaacttttaataataatggattttccttaaaacttcagtctttttgtagtattatatgtaatatattaaaagtgaaaatcactaccgccttgtgctagtgccctcgagaagagttattgctctagaaagttgagttctcatttttttaacctgttatagatttcagaggatttgaaccataatccttggaaaacttaagttctcattcaccccagtttttcctccaggttgttactaaggatattcagggatgagtttaaaccctaaatataaccttaattatttagtgtaaacatgtctgttgaataatacttgtttaagtgttccttctgccttgcttacttatttccttgaggttacgaagtagcatcttccccagagtttataatgctgagaaccacgtggataccaactgctcattgttatgctatgtaaccctttttgtctattcagtgcagagtgaatttcacagctctgcatatgtcttcatttgtttaatgcttacaagacaggagatgcacacatacaatcagcaacataaaaattaaaagtgacccaagtagtcagcgcatgtggcatctcattggtggtgacagaagctatgtgagccagaagttttcagctcttttgaataccctctggtttatttcgattaaaaagaacaaaattgatttcctaaaatcagaattttttaaaacttgggagatgattggagatacctaggaggtcaccaaactaggattagaagtcacagtggttgtatcacaacttagcttgagtatgttgctgtagcctaacaactgcaggttctgagaaggatcctgtagaatcctggaagtaaccagattttcctaatagggagatgatttttttgtgtgccatcatgtatttgttaaaggcctatatatagatataaaatatcgtggaatctagttctcagggagacccgcaactagtataagcttataaaggatctaaagatccatccaccatttaaagttgtctggtaatgagagatgacattgtatcccccagagaggccaaatcagagtcgccagccagcgttctagatcagccttaatttcaagagaaagccaaggacctcatctgcaggggagtgtggttttcagccccagcgagtgtcactttgaactttccctttgcttttttctctcttctccctccccacccacccttaggctcctgatctggtgagtttgttatggagtgaaaataaaagtcaagcagagaccttgtttcccgtgccaccattagtaccacaagctcatggctagttaccacattacttcctggcagtttgtgtccctcagctgtgccttccaaccagcgcctgagaatcactgcataccaccctctaggtagggaaacctacactgctgctgttcctgtgattattttacaatgaataaataattgtcaagttccatttaaaaactg

SEQ ID NO: 7698 - DNA, 2233 bp, Homo sapiens
gtgatatttttggatgctttgtctgcaatcttgacttgtttttgcagtatcattattcagacttcaaattgtgaatcttttaaacatcttgataatttgttgttgagagctgttcattctaaaatgtaatgaaattcagtctagttctgctgataaagatcatcagttttgaaaggttactgattttcctcttccctcttagttttttacccaatatatggagaagagtaatggtcaatcttaacattttgttttaattgtttaataaagctgctgggcagtggtgcagcattcctacctagtgtcataaaagcaaaatacttacatagctttcttaaaatataggaatgacattacatttttaggagaaagtaagttgctttgcaccgcctacttaattcttttccatatattgtgatacaaacttttgaatatggaatcttactatttgaatagaaatgtgtatgtataatatacatacatacataagcatatatgtgtgtgtgtgtgtgtatatatatatatatgcatgctgtgaaacttgactacacaacataaatcactttttaaattccaggaacgggtagtctgacacggtgattatccttttgaggctgaatccgttattaacttgttatttaggtttttactcccagtagcaagggattctaagttagttgcacttacatgattattgttatttaaaactaagaataaaggctgcattttcaaagataaattggaattgctgttggtgaaataacaaccaaaatactgaatctgatgtacatacaggtttctacaggaagagatggtataatttacaatttggagatttaataaccagggctacccagaaaaagtgacttgataacatggtaccaataagtaagggatgctctctcggtttgcttttgccactttcaagattttaacttctcaggttattaatcaaaattattgtataagttagccaatagaatttttaggttaaaacaacagatggggggtttgtggagtgtttaatgtcatgggcatttttagtaggatagaccctttgttctgcatttgaatgtttcgtatatttttgtttcacagttaatcttccctccccaagtttgctattcaaatcaactgcctgaatgacatttctagtagtctgatgtatttttctgaggaatagtttgtgattccaatgcaggtgtcttcattaccattacctctacactgcagaagaagcaaaactcctttattagaattactgcacatgtgtatggggaaaatagttctgaaaggctagaatgatacaagtgagcaaaagttggtcagcttggctatggagtggtggcaataatctctaaacattccaaaagaccatgagctgaacctaaactcccttggaatctgaacaaaggaatataaaattgccatttgaaaactgaccagctaatctggacctcagagatagatcagccagtggcccaaagccatttcaagtacagaaattatagagactacagctaaataaatttgaacattaaatataattttaccactttttgtctttataagcatatttgtaaactcagaactgagcagaagtgactttactttctcaagtttgatactgagttgactgttcccttatccctcacccttccccttccctttcctaaggcaatagtgcacaacttaggttatttttgcttccgaatttgaatgaaaaacttaatgccatggatttttttcttttgcaagacacctgtttatcatcttgtttaaatgtaaatgtccccttatgcttttgaaataaatttccttttgtaattttgttttgtgtcttgatgtgttataattatggtaacttcagattcttggatagttattaacatttattgattgcttctactgtgccaataggctgaaaatataaagatggacaagaactgctctctgccttcaaggagttcagtcttttttttttttttttttttttttgagacggagtctcgccctgtctcccaggctggagtgcagtggtacaatctcggctcactgcaagctccgcctcccaggttcatgccattctcctgcctcagtctcctgagtagctgggactacaggcgcccgccaccacgcccagctaattttttgtatttttagtagagacaggatttcaccgtgttagccaggatggtctcaatctcctgaccacgtgatccacccgccttgg

SEQ ID NO: 7699 - DNA, 1871 bp, Homo sapiens
cccgaaccaatggatacctgatccatgctcttatggtaggtagattttttgaatcacaaatcaatactttctggcttggggtttctttcccattgagttacaggatagtatgtaatagattagcacatatacattgtccagccatagtaacaagatatctatatcttgttataattataatggtcgtatacccaagaactttaaaatctacctataaataaaaacaacactataataaaacattaaatcatatgcttcaatttagcccaaattgtaggctataattacatatctctctcattctgtttccctagggctcgataatctcaaacctgccttcttggatttatttgaaaatagtcatgaatatgaacaagtctacacgggctcactatctgaagaaaaccaagaagaactaagcattgataactgcattgtaacttggccagatgctccagcatatgcacgttcactgcaaagcaccctactggttttgaaaatctgaccttgtcatttcaatagttattaacatgactaaatattatcttaattaagaggaaaatagaagttgcttttaggggtttctgacatatattctggatactatccgaggtaattttgaagtttaatataaatgctcatatcaaatgaatatagaactaatattgtcgggaacacctaatagaaaggaatactattatagcaaatcacagaatgatagactcaagcataaaacttggcagttttatctgcttcaaaatgccattgatcattattcctgtattttctctgaaactgattataaaaaccaatgtccagctactcttttgtttttgacacttgaagaaatggagatcgatttgatttgtttataagcagacacactgcaatttacaaagatctctttacggttttataaaattatcttccagtttgtacatttatatggaattgttctttatcaagggtagctaatgacatgaaaataattgtgaaatatggaattatttctgacacatgaagcccactaaactatgctttcttataatgcatatttcttctcagtttaaatgtatgtaaatatcgaagctatatggtatgatttataaagataaatgggccaaagtgtacattgagactggcagccatctatggtaccactgaaaccctgacccagaaaagtggcttgcttggacacccagctgcctttgtttctgcattaaaccaatattgatcacacatatgacacaggctagtcctataaaagtaatgacttcatagaaatggcattataatttttaagttgatactctacaggtagctattgatataattagttttaataaaacatgctgcaaccatggtatacaacaaaaatacatttctttggtgattgaaattaaggccgtatttacaatgacttaatataagactgacttttatcctgcttcataacttgtatggagaactcaccaagaaagaattcaatactgtgaaatatgcagcaagaagattggtctttacctaggctgtgtttcctaagctctgagttttcagcaccagtagatttgtattaaaagaaaaaaaaatggggccttagcttctggcttttaattttgccagctaaggacataaaacaaaaataaacaaacaaaaacaaatagccatctgctatcagcatcattatgtaaaagaaaatatattttagcccctaaaattaggaagaatgtaatctcagaataaaggttgtcatttaagttgaataaatatatagctttatgaaaaacacattgtttgcccttttttcctctcatttcattgtagaaatggtgacaccacaatgacctggacagtattttatctgctttcac

SEQ ID NO: 7700 - DNA, 1350 bp, Homo sapiens
taaacttcagtaaactgaagctcagatccaagtagttttttttctttccatcctttgccttctcttagctggcagagatggggttaagaattgttggcagctaatccaccttggtttgaggccctctcacactgagctggaggaatgactggaatttgagggggaggggaaaagatactctgacctttgcaggcccgtggcctccaagcagcatctcctgttcacgttctcccactgaactaatagtccaagtacccccagttcaccgcttttttccacacctgtcaacctttttaagaacctgggagcagactgtggctacttgagctttttttgttgatgttgaacattatgtattttgctgttatctctcaacctcttgaacatactatcttttctccctgcccccatccttctcattctgctcaaacccctcctccccacctcctctccaaatcccacaggtcagagtgcatcaacaagtttgcttcagtcttcgggaccatgcctctcaaggtggtggaacaccgagctgaccctgtcctgtacaaagatgactttcctgagaagctgaagagcttccccaacattggcagcttatgaaacgtgtcattggtggaggtctgaatgtgaggctgggacagagggagagaacaaggcctcccagcactctgatgtcagagtagtaggttaagggtggaaggttgacctacttggatcttggcatgcacccacctaacccactttctcaagaacaagaacctagaatgaatatccaagcacctcgagctatgcaacctctgttcttgtatttcttatgatctctgatgggttcttctcgaaaatgccaagtggaagactttgtggcatgctccagatttaaatccagctgaggctccctttgttttcagttccatgtaacaatctggaaggaaacttcacggacaggaagactgctggagaagagaagcgtgttagcccatttgaggtctggggaatcatgtaaagggtacccagacctcacttttagttatttacatcaatgagttctttcagggaaccaaacccagaattcggtgcaaaagccaaacatcttggtgggatttgataaatgccttgggacctggagtgctgggcttgtgcacaggaagagcaccagccgctgagtcaggatcctgtcagttccatgagctattcctctttggtttggctttttgatatgattaaaattattttttattcctttttctactgtgtcttaaacaccaattcctgatagtccaaggaaccacctttctcccttgatatatttaactccgtctttggcctgacaacagtcttctgcccatg

SEQ ID NO: 7701 - DNA, 1168 bp, Homo sapiens
tgctgcccacatgcacccctggcctcagcatcccggttcccccagacaagagagggcaagtcagccaggaactgcctcctccctgctctacagctaagaaaacaccattccatgacttcccaccgcgccctcgctcctacctccccacacctctctctgagtccccaggaacacacagaggtgcacatcacattcccttgtccacactgcccgcctctcccacatgccacccccttccctgtccttccccaactccccagctccaagagtggaagaaatccccaagatcatctgggtctccctctccacacccagaactgaggcttggatatcttcttcaacatccttgccaagacttctccaccctcttgcatacctccagggacagagagcttactacctcccaaggcagcctcctgcctttggactgctctgactttagcatcagcttaatacacagaagaggtttctgtttttctgtggctctgtccatggcatcccacttgcccactctccttcctggagtgttgaggtcacacattgactcccctgagccctcttctctccaggctaaagaatcccgaaggcatcgaggccatttctgctgcaacaaggtttcctgtctcttcactgtccgcacatttcttagtattccctccaggcttgggcagggagactcgcagatgcacacccacaagtattcagttctcaaactctagacgagtgttggcaactggattgcaagatgctcctaccctgatagatcaggggtggctgctggaggctgtgctggggatctgaggtttggtctgggctcagtgggagacggcagtgcaatcctgatgagtgatgtctgccaggcaccgtaagtttgattagtgatgtctgccacgggcagggatggaaggagcagtgtgatgtctgctctcttctctcccctctgtccctcttcaggaagaaagagctcattctgtctcacaagccaccggcatcctgtatcagcttccagcctcccctcaggctttccagtcaccagggacactcggagccacagcctagagccccgtgttccctggcctgtgcgtctgcccccttctgagatgcagccagaagctctgtgcctgctgcaaagattcaggtggaccctcctctaatctcctcctgctgt

SEQ ID NO: 7702 - DNA, 2576 bp, Homo sapiens
gagacggccacaccagcgctccgggctaggggggcagcgctgggacacatcccctcctctgaccctgtggccttgctggactctctcccacagtggtcactgccacgctagctgagacgggcctcatgtccctggggatcctgctgctcctggtcagccgcctcctttttgtcgtcatcagcatttactactattaccaagtcggccgaagacccaagaaggcctagttgcccgctgggcctggggccctgcccatgcctgggccagagtggcgctggggcctcggcttccctttggctcctggaaggcaggagggtcccctgccctgccccagtcctgccccagggaggcagggggtggggggccttcctttcctcctgggcaccccgtgtgctgtgatctcctgggctttcaggcttgacatgctggtctggggagagacagggcctctgctgccctgttcttcaccctcacagtgatacctcctttccttgggtctcttggcctccagaccccctcaatagacactgactaaagtcaggctggagtcatgagggtagtgggctaagtcgagggtccagcctcttctgccaggaagcccttcttgcttttgagagaggctgtgaccaccccccatccttctccctacactcccagccaacctagtgcccaagcagctaaacttggcttccttctaatcctggaaaaccctgtacccctcctcctcaatctggccctctccacatgcacaccctgaaaacacacacagacacacaacacacacacatacacacccctgaacacacacacagacacacatacacccatgatgtgagcaaacacacacacgtgcgccttcatagcccagccaagggcatgcaggcagggtgtgctgcctgagatggcacctccctttcagccattcttcaagaatgggccacacacagctagaagtcctctcccagctagaagtcctgtccccactctcctggcctgacaagatgagctctcctgggaccttgctctagggcactctgcctctaccctaggacactggaatgccctgggagccccctccctgcaaccagcctgagttcagccccacggacaaagggacacacagcccccaatggagaccattgtaagtggtggggctgggagaggaggaacagaaggaaagccatagcgctctcttgccccttggcatgtaccccaaggcctgatggccactgggctcagcctgtcccccactcctgcctgcttcccggtgagctgccccccacacgtgcagcccgggctgcctccagggtctggctgagtgggatcaggtggccctccaactcagcacaggaaataagtagaaacatttcagcaggccacctcccctcatcttccccgccctgtccagcgccctggcaaaggctgacaactggctgtcttggggccgaacagcccctgccctgcctctgagggcccaccagcctgtgctgcatacccaccgcccagcttctccctgagggcccaccagcctgtgctgcatacccaccgcccagcttctccctgagggcccaccagcctgtgctgtacaccccgttagtccctgatcccaaccttctccctcctgccagcacaccgatgcacacaccggaagtggcgagcccaagccctggggacaggtgtagggagaaaagcagccccaggcctcagactcgcttcccatcctggcatagagtgggggatggctggagggtgtctataggtacagcccgctctggctgctgccaggtgggcccctgccaggggtcctcacccctgtccaccctgtgcctggctgtccctgcacccagatacagcaacatggcctgtacccagcagagtggtggcaccaccatggttacagcggatgccccgagactctgcttggtaaacgtggcagagcagaatgggaggctggaccctgaggaagggcccctctcctggcatctgtctcttgctacctaagcctgtgcctctccctaaagagctgcctccctgctgccgagccctggtctggccacgagccaccactgcctcccgctgctgcccacaggtggtgccgccaatgggcagtgccctcaggccgaagcctcaatcccccatctgagccaggcctaatcctctaatagtgatggttggtttgtcctcccataactgcaggtggattccacctggggaatgaggctgcgtgtcgggcgtctgctggccctgagacatccagtcttccacactcaactgtgggatgggagggtggcgtggccttaccccatgaggctgtccaggctctggcacacagctgtgctcacaaaatactgggtggcttggttagagctaattgtagtggagcctgcaggtgagggtgagggagggggctgcaggtcaggtaagatctggaagacagacgtacagcttggagggcagggggactctaaggcaaggagatttacagttgggaaggaggcagtggcagaggggtgagggacaggggcccttaagtccagcgaggaaagctcggtgtgggcccgctctacgctccgttt

SEQ ID NO: 7703 - DNA, 1153 bp, Homo sapiens
tgggttcaccagaaggcagtggctagcagctgaggtgtcaggacggcgtcctgggccctccaggagccgggtgatgaaaggttaggccctggcttccctggcagggtagggttggcctcctgtcctgatggctggcacacaccgaagcattaaccgggagtctcttgtgtgccgggtgtgggactgccgtcacagttaccacccgccgctgtctcctttcaccatggggcctgtgtgtggggaggagaaaggcgtatccactcctttttgtggatgaggaactaaagccagggggcgtaggagggtagtttggcctggaaatgacatcacactcactaaagaccgccaatagcaacttttgcagttttttttcccaatgcgacatggtatactgcctccctagttgatccggtctacagccacattattcacagaccccacagtttgaaactgtgttctgatatttgttcgggtgctttattttaagacaccaggaggctcaaaaatgggaggtgacccggggacatccccgcactctgcctctggcagccctggctggggcaggagggtgagatttgcctggggccacagggcactgagacagcagggtcccctgctagagggcccagtggcttctgaccctgtctgtagatggggatggcttttctgccttgccagagggtgggtgcaagtgggaatgagattctggaagtggtccgaggtaggaagtggcacgaccgttattcaccttggttggcattgaaaccccgggagcttggtttcctcatttgcagcgtggccgtcaatagcgcccatcttgcagggcagctgtgattagagaagccagggccaccccggagccagcctctgaggcttcacctcaccccgtttacactgctgtctcctctgcatagatttggctgactgaggacgcgacaggtactcagcttctttctgcatctcagttgcccagcacaggggctggcacgcagtaggtgctcccaacctggtccaagatgttgctggcggtgggggagtggggggctggggaggatcatgggcagacctggggtgccgggaggggctggtggggggctgatggccgggagggcaaggcctgagcagggaatctagaccaccttagtgtccccgt

SEQ ID NO: 7704 - DNA, 1998 bp, Homo sapiens
aagcaccaggtcccacctggcccagccccagccttgggacttcctctcccctcacacacgcaaactgctgtgtctggggagttttcactgaacattgcagagactaagaagggttgagggcagagatggctagcaagacagggcttggtgagggcagaaacagtaggttgagatcctttcttctagccaacagttgccttacaccttacattgggtaatgggtagggaggagcaggctaaggctcccgctcatttgaaaaccaggaagagagaaccagtgtcttcctgagcacctggtcagttggagctactctttttcctctcaagagatcatggccaaaatgagctaaaatcttcagctagaaggggaaaagcttatgggccagtgccagtgcctaccctgtagttcctgagaaagctgagagcaggtgacccacttctggcctagcagaatgagctgctatgcacagcatgcagctgcaggggtcacttcctgagctggccaccagacctcggaaaagctaacctctcaggtggtcttgaagttaggttagggcatccctaaaactctgggtgcttgtggcttctgctgaatttagccatgccagggctgtggcagacactctgtaggccacactgccatgggacagggaataatttgggtgatacaccactgcaatttacacggggtctcttctcagcttggatgctccctgggaggcccagtgcttctgtcctgtgaattctgcatgtgattacccatgatttctgtcataggcatttcccactcttctgcttgcttgagaaggacttggactgatgggacactcagggtctagcccagggagcatatgcttggctaacctaatctccccttgatgtgtatacagaactgtggaaaagcagttggtggatcccaaatgttgttacttcagacaagacagagccctttaactcagcctctggcttaggagtgatgactacaggcttagaatgaagtgtgtctctggggctgagacttggcataactgggctggctgattagtgactttctttggctcgtagggttggtgggaagtgagatcaaccttgaggcccaggtttgtggccaactgtgccaaggtgatacctggcagagcctgggagccagagcccttatgattaatatgatctgcttttccttcatggaggacaaagaaaaaatccactgccatctagtatctgtgaaacatgaggacagcgcagtcaagtctgtaactcttgccatgtcagaatccccaagttttgcctgcctggttgaatatgagagtccaggcatcagaaacagcagccttatttaatttaatttttctaatgactggcctatgacaccttgtgatgctaggcacatcctcatttccccatcctcacttgggactgagagcaggctcaagttccagggtccctggatggcaaggttcagtgctgggccctggaatctatggcacttgggggtctctgacctcagcctctgccacatgtttccaagttgagttgttttgctgaggtggtcctccccttgagttgcttatgccaaccctttaatttaggaaaagtaccttgtaattacttaaggtaatgtttaaatgttttccattcatttggaggtggtgccaacaggggggaaagcatgcagaaggctggaaacaatagctgagaccctactgtgggcccacagccctggcccagccggcactgaggggctggtgccatgttacttgatcacctggagcctgatgggacccaggaggtggcctgaggggttgaagtataacttccctcttctggatcccccctttcattttccttctaccccctctaggaatgggagttctagacctaggtctgcttttggctttcagtctgggttgatttccaagtcgaattcatgctttttcttggcccataggtccaattttggcagaaggcattggacttgtgccccctccctgcttcaag

SEQ ID NO: 7705 - DNA, 1207 bp, Homo sapiens
gagagcattccagcagttctacaagcagtttgtggagtacacctgccccacagaagatatctacctggagtagctgtgcagccccgccctctgcgtcccccagccctcaggccagtgccaggacagctggctgctgacaggatgtggcactgcttgaggaggggcacctgccaccgccagaggacaaggaagtgggggccgctggcccagggtaggggagggtggggcaatggggagaggcaaatgcagtttattgtaatatatgggattagattcatctatggagggcagagtgggctgcctggggattgggagggacagggcttggggagcaggtctctggcagagaaggatgtccgttccaggagcacacggccctgccccatcctgggccttacctcccctgccagggctcgggcgctgtggctcctgccttgatgaagcccgtgtcctgccttgatgaagcctgtgccacctgcaagtgcccgccctgcccctgccccaacccccaccgaagagccctgagctcaggctgagcccagccacctcccaaggactttccagtgaggaaatggcaacacgtggaggtgaagtccctgttctcagctccgtcatctgcggggcttctgggtggctcctgccactgacctcaccggcatgctggcctgtggcaggcctaggacctcaggcggggaggaggagctgccgcaaggccctgtcccagcagaagagggaggcttcctgactgacacaggccagccccatcttggtcctgtcaccctggccccaactattaaagtgccatttcctgtctggactgcagtggatgtatctgcatgggcccctcccgtccccgtctcgctcccagcccaggaaagccaagcctttgtcacacatggtatctttatgagggccttgggtcataggtgtgcatcatagtaatactcggcaaggtcgggcccgtcccgcttgcgctgctgggccctagacaggaggggtcgaggccctcgcggccttgggtgcttggggaggatgccatagtctaaagagagaaaagagggcatgggtggtagggggcagctggctctgatggaactgaagtcacccttgaacagatgtggtttgggatgacaagcccctgaaggctggacttggggcacctcttaggggcgtctccactgtcagggatgggtaggggaaggggaca

SEQ ID NO: 7706 - DNA, 1576 bp, Homo sapiens
tcttgtctcctgttgtgaagcccaaatggaagcgtggatggtatcagggccctacccgtggtcttctcagattctgctagagcaaaaggctggtgcctaaataagatcccttcctttggtgctgcttttggtctttcagccaccagcattatgagtgcctgggggacacctccgagggaactggccagcggagctctgtggtgcgcacgcaccctggccgtgacaggagggtgcgggagtacaggctggctgcatcagcccttggtgcttagaacagaggaggagtgacatgttttgagggtacgtctctgagacagagccccagcgtggccttcgctctgtcttgcctttggggagaggtctgaagctcccactcctttctctgcctgttggctccaggcaccagaaatttactccactccacccacccacaagcctcctgggtgaccctgggctagaattgctgcgcttgcctcggcttggccggttgtggcctctccttgagaaaaccagggttgtgaaagactcagaccattctctcatcttgccttgtcagaagtaaattgtgtcagatttgtgctctcgctggagacctttgccccttgcgtgcccctggccgatgggagggcggtggaggctctgtaccctggccctgctggagcatctcccccaagcccactccaggccctgggaatggccagagtctaggagaggtagaaacgatcctatcagcttctctcccacccaattaggcccagagagacaaagacagatctgaaagcaaatgcaacagagaagagacacttcttagagtaaaatgtgtctcatctctatcagccatcgcctttcatcttcccaggggcctcagaagaaggaattaagttaggctgaacaggcctcagagttaggccctggctgcttgattggctgagggggaaagagttcccttttctcattcagaaaccaaggtgctgtgtctagtcagggagccttggagatgcctggactagttggaggaatcgttggcagaggatcagagaccagcagcaggctgtctgccctgtctagagctcttcccctcaacttgtctgggcccatctgggggttgccacacaacacctaacttaccttttcctgaaagaagttgggaaaccatcatcactagaggcctttgctcagagaggagctgccttaggagtcttgggtcggaggacggggctaggaattgaccagggctttgcctgccgccctcagcagtgtcgggtacattctgacctcgcctgcagctgggctgtggattcttcctgacattcagatgtgagctgttttgggagtcagctagtatggagtacgagatgcaacccagcccccaaacctacattctgcactcaaattccaaaacactgctttactgtaaagaagaggcccctggcacccaatctccctgtccttcactgtcccctcagacctgggcggggaggggggggggcctgtgaccacctgagacatacgctcgtgacactgccccaccccagccacctccacttgcttcctcctccttccctccgctgctctt

SEQ ID NO: 7707 - DNA, 1149 bp, Homo sapiens
attcatttaatattgtcttcaaaccttatactgcctaccactctatccatggccctaacatcctttcacatctaagatgagagagtgattagcacagtgcttgcaaagcagcaggcaaattgatatttgtggatgactcaaaggatgttctgagaaccttttctaaactgctttaaatttgtgtgctaataacacagatggaaacctagctgtgagtaagttaccaatctttaaaacaaagacgactagaatggtttgtatttgtagttcatattcttgtcctctgggattcagtaatctttttagcctctctccacagtggtacatgtatattcctgggtagcaggctgattgctactgatggtactgaaatgttttgataggagcaaaactgtgctgccatcctccttacgagcccagtgttcagaggtgacctgtttgcacatgggcctgtggtgtatcacttttttatacaagagcagtagaataaggtctgactcgagttgattgaagtggtagttttaggttctgataagaggacctattgctggtgagggaggttgaaattgcagaatgagtttgcagcatgaggcaggtctgcccagcagcaggttgatttgcaccgtgagacaagcagcacacataaacagatggcccaacaatgagtcagaacaacagatcctgaacaggtagattggcttttgtctgattcttaacgtggttatagagagtggaattttaatttgtctgccacttttaaggctgcaaaacaagcatttagtgaaagaaattctattcattgggaaatgaaaaatgttattaggcagaggagaaatctgattgtcactggatctagacattgagaaaccagcattttcaggagctgtttcacgtaggcatgggctggcttcatcttttggcatacagttattcaactgtatcattttgctgaatcctctagtatgtaacgtgcagcaagaaaatagtaaaatgatgtcctttatatttggattttaagaagtatagtcctgttatttgcaagtacacttctgatatttgggttaagaaaagcatttttaaaaaggatacactagtgataagtgtcataaaaacatacagcaatgtaagtttgtaatggtattaagcaaa

SEQ ID NO: 7708 - DNA, 1170 bp, Homo sapiens
aatacattgtagtgctttgagtccttgtgattctgtttactaggacataaaatgctaattttagaagctctaaataaattttttccaattcctagcttgcttacttgggtaaaatatagcaagtaattagactggagtaatagtagtgtcctaaaaacatatcagccactggatcagacaacctctctgttctttctctacctttcccaactcccctcagcaagttttgactatgtatttttatatgaaattaatcagccaggaagtatattttcagcctctcctttgtgttagtacctggtataataatgtgtgctaatgcttatgatctttcatagggaaaaagaaataaacacacatggtagaccagggcagtacatagtgaagagttagcatgtggtatagataatgagaagagagaaagcaagaacagcttgggaacccaattgggactttgctccagaaacagaaagaatggaggcattctaagtcaggggaatcacacaagctaaggcagggatataggaatgaacacaaaataaagataagaactttgctgtatgtttaacacttttcataaaaagtgttgggccacaatcaaaaataggattaagtagttatgacaggacctggtactagaaggccttaaatgaccatactatccttgcctagaactagacttgctttgaaagcttcgatcagttcctatcttttgaatggaatactttagcatttgaagggtaaaatgaatttatattggaggaaataaggtttcattggcctgtctgctttttgtatatgtttgttttgctaaggcaatatattcagagaattgaatcagtgctttatcttgtagaaggaagtcaggcatatagttaagaaagcagatttttttttccttaaaaggaattttatttcctaattgtgaaattgtggcctgtttgcttagaaatgagaatgtttatgagtgaaagcacaggtttaatgtttaaaagagtttggataaccgttgcagaagcaaaatggatttctaacattgcttcctaatctgggttgcccgaaagagtaagagaagtcctgcatatccctgtgtgaaggttacacaggttgttacttgaaatgctgcttgtttggaaaataagatatgaaatccaaatgggggtggaaagg

SEQ ID NO: 7709 - DNA, 1191 bp, Homo sapiens
agatattctgatatggagccaaagcacttagttgctctagttctctgctttcattttgctttcttgtagaggcaatcttaacattccgaagtttgttgcttgttactgtggtgcttcagggttaagccatcgtggttgcagcttcggtttccccagcctgaacagtttgctgccctatctccctttacctggtggcctcctggtgaggtttcatgtcatagcttaaatgtcacttcctcagaggagctatccctgacactccttccactagtcaaaatcaactgtttctattattatctcacattgaaccatacttttccttcatagttattccatttagacattcagttgtgaatgactgaaaacccaaaatgaaagtaatgtaaacagggaaaacttaatttctgtctcatctaaaagttctataggtccccctagggctagggctgctgagagtggttccacgatgtcagggaacccaggttcctcctattctgttgctctgccattctcagcatgcagctttcacatcatagtccaaaatagctgctccatctggtaagaagggggagaagcaacaaagagcaagccctttattttttaaggatgtttactagaagttgcatgcaccacttccagttagatcccatgggcctgaacttagtcatgtggcccctgctaggagcaaggaagtctggaaaatgtaggtagtttattgctggtagtcatggccagataaaattcaaggactattactgagtaagaattgggaaataaatactgggaataattagcattttctattacagtagcatatctgtatctgtaggattactattttttaaatatctgtcttccttattagattgttagtttcaggaagtcagggaacgtgtttgttttatttgcttttttattcctagtataatatttagtataatatttaacatagaatattaacacagaagaggcacttatattctttaaatgaattattttatccacccgatcttttgctctgcttatattgtaatttttttatagaacggtgtgtcttgctttttatgctttttaaactaacttatgaaaatcttcttagatttttgagtgttctttgagaacatgatttttaacagctttaaatattagcataattggctatatcatgattttttaaaactattcttctct

SEQ ID NO: 7710 - DNA, 1191 bp, Homo sapiens
gcaggtgcctgtagtcccagctactctggaggctgaggcaggagaatggcgtgaacctgggaggcagagcttgcagtgagctgagattgcaccactgcactccagcctgggcgacagagcgagactccatctcaaaaaaaaaaaaaaaaattatgattctgttgttatatgtctctttctgaggacagtgtgtcctggatggttatagtctcattgaagacagaagtggtcttactcagctctgtatcctcagtatgtagtgattaacacagtgctgagcatgtagtgggtgcttagatgtttccatgaccagattaaaccctttttttggtttttcatttcttagttatttgaagtgttctttagaggaatacttgaagaattgttttgagggaaaaaaaatctctttgggaaatttcttgccctgcgttagagaatcagatattcttttactaacataatttatttaacataaatattatatttattccaaatgtaatgatccaaaacattttatgatctttacagctgcagtgagaagaggagtttgttactttaaacagaggctgaagaaactatagaattagcagagaaagtggagaaggtagaggatggagttgcagactctacaggaggctcttaaagtggaaattcaggttcaccaggtaagttgtattattggcttctcccacactgttgttaagtaatggctaagattagtaaacaagtccatctctggtgtttagtatagtttttaataatctttaagacaattttgtccaagagtcatgtcgtttgccttttaccactactcgacaaagtcatagatactgcttttaagaacttaaagtattcctgacttcctttctagagaaaagaactgaaaagatttttttcatataccaaaggtgttaacaaaaaagaaagaaatcttttttctgctttttggttcatctgaaggactttattcatgtgatttaacttgcatgttttaaataacaacatgtctaactcaactaccatatgtactaaagtttttacagatcatatgactcagctttatgcgttgattccaatcttaaagaaaatgtgattatcttcacagatgtttaaatttcagatttcacaattcttatattttacaaaaagctatctttatataattacataattaaaatttgttatgtaaac

SEQ ID NO: 7711 - DNA, 1135 bp, Homo sapiens
tagttaatccttgcatttactacctttttattctacttgcctttctctcattaaaccttttaaaataaataatcaagatcctatagctctttactttgacatgggatggaatcttagagaagcgaccttaacccatttataccagaggttgcaaattttttttgtgaaaaatcagactttggcaatgaacttgagcagtaggatataaataactcccacaagcttagtgttccaataatggaacactaggtataaatgggttaagggccttctcctccagtattttaccttgtgtggcagtttcttctagatccctgacaggttgttattcaggtacatattgaataccacatttaaaaaaaatgtagctcattttctataatgtattctgaggaattctacttccacaaaaaataagtattattgaggtggggtgggggtgggaaaaggcttctgtggtcaagtaatttgggaaatgctgcattaaacaaagttaaacaggtttctttactgcaggacttctcagaacctttaatatgctaatgtgcattgtgaatctccaagagggggatatgatatgcagcattcttgaatacttctaatgacagggagcccactacctcataaggtaacccattccttttttgtacgactcttatccttagttcttccttttccttatattgatctgaaatctatctcccataacttccacttctattaagtatttattggttatgctgagactaccacacccacttgcattatcctttgtgtggtatatatttgtaagattctggccaggcttgtctggacagtttttttttaaatagtcattaaatattaataacattctggtaaatgtgacaactagttctaaaaccttggcctcattgtcactatgctctcataccttactccccaacctcctccattttcaatttctgtgtattttaaaatttactcagttttccttttgttggatgtggttgggataatctagtagacgtgcctgatttttgtaaagaaagttaggaaatagaagaatgtgtatattcagacagcctggaccccaggaagcagaggtagaaactgtatattgggctgagcactgatgatggtagggaggggtcca

SEQ ID NO: 7712 - DNA, 1155 bp, Homo sapiens
cctctgaagcccattcatggggatcccttaggtttaaaggatttcatgatttgtctttttttgggacggagactcactctgtcgccaggctggagtgtagtggcgcgatctcagttcactgcagtctctgcctcccgggttcaagtgattctcctgtcacagcctcccgagtagctgagattacaggtgcacaccaccatacccagctaattttttttttgtatttttagtagagacttctacgaaataattattattcaccatgttggccaggacggtctcgatctcctgatctcgtgatccacccactttggcctcccagagtgcaggcatgagccactgtgcacggccaggatttcatgttttaagatggcttatgtgatttttctttaaaactttatgtgcagacttttccaaaaatatttcgctagtgtttattgtagtttgttttttagaagagtaactcctgcagcgggttaagagaaagtgaggtctagtggaaaatgaactcagccaaggaatctcgggcccataagctcttctccagcttcactatcagctagctgagtgacctttggggaaatcacttaacttttccgggtttgattttctatgcgatttctgcagtccctacaaatagtcttatgagcagtttcatgacatcatgatttcaggatatcatggcaaaattctttatcagttcaggattggccctgctcctcatttttggagaaaatgccttggagataagatatatgtacattgtgctgccttttgttgaatatgacttttcagcagcatttattaatactttctcaaatgctgtataagttaaaatcccagtcccatcctcatcactttgaatttcaacatattttatatattgtgggtataagcctgtgttgattatacgtaatataattatcacctccgattctgtggtttaccttttcactttcttaatggtgtttttttgatgagcagaagttcttaattttaattttgtccaatttatcagtcttttcctttttactatattttaaaatggtaatattttacttcctaatcaacaacttggatgaaaacagttccagaaagtcattcatttaacaaataatgctgctggaaatcgatgcataagaaattatccccagc

SEQ ID NO: 7713 - DNA, 1124 bp, Homo sapiens
cttttttttttttttcccctgaccacgttcgcgatggtgggtagcagcaaggtggccctggtaggggaggggttggtatcgagattgggcaccggaggagaacgccttctttcaactttgtctgtggcttgcacccccggagaaggccacaggccggttgtcgggtgcagatgtgccgagagtgatttctaagtagttgagttgttgtgatgagggtacgactgctaatggtcggcaggttttgttttcattggtgaatctggtgtcatcatattccggtcatatgttgaaatattctttgtttaggtctggaagtagaggatctcactctgcacgtccacattgtgttgtttttaaaatgatgtctctgggagtctggatttctagaatttcaaatctgagtgaaggtccgggcatgtgtgggcctcatcacctggccttgacagtgaactttgtggctgtgtttcagatttcaaagatttgccccatagctggggaaggagttgtgcatttttgctaatagtcggtgtcaggaatgtagatgctcgagctgggaaagttagagagggaagaacatttatatataaataatggatagttgaatattagaatcagattaatttgggctgatgaaagttttttttttttaaagcagttgtgcactctgggaaggaagtcttttcacaggttcacttgatagggattctttaaggcgaggggctggaattatctcctttttgagcgagttctcaccaacatctgtagctttattgagggcctggtaagggtactgaaattgaggctaaaccatgtaagcgtacttttcagtgtttatgatatttgtttacatctggtgttcactctaagcaatagaaataaataggtcagctttgcttttggtctttgaagactggccccctccttccttttttaagtttcacaatttatttggtttacagcattgttggaaactgttactacatttttactggaaatactattattcattttaattttggtaagttccttcttattctcttcttctgtctttacttgtttatggaatcggtgttgtgggcttaaaactagtttattttagggggtcattaaaaatgtctgaaaaa

SEQ ID NO: 7714 - DNA, 1327 bp, Homo sapiens
caagagaggccgcaggtgatgctggggacataaatcctccctggcccaaatagggaccaactcaaactactccattggagcatctggcttaggacccagggagagtgtcctggaacggcttgcctttgtcagctctccagccacgggcagcatttggtcagctctgccctttctagtgttgggaggaggtcaaggcccaccctgggcctctcagctcactcgtgactcagcccagcgaggccagcagggcaggggtgaatctgcccgcttctcaggtgaggaggctgaggatgcccagggctgctgtgaccaggactaggactggaaacttgaaggttttctgatcccaagtggaaataggaagctggggatgtcccatgtccacatcacaatggctgccccatcccctgcttccgagtcagctgattggaaaccactagggggcagaatcttctccttccctgatgcccgggtgtttgtggagccggcggtctgcaatgggtcagcctaactgctgatatggtattaatatttctttcttgttttacagccaagaaagggaagggaaaggactagacgccaagcctggatgccaaggagcccctggtgtcacatggggcctggcccacgccctccctctcccaggcccgagatgtgacccaccagtgccttctgtctgctcgttagctttaatcaatcatgccctgccttgtccctctcactccccagccccacccctaagtgcccaaagtggggagggacaagggattctgggaagcttgagcctcccccaaagcaatgtgagtcccagagcccgcttttgttcttccccacaattccattactaagaaacacatcaaataaactgactttttccccccaataaaagctcttcttttttaatatataaaagccccttcccaaggagtttgctgtggaaatgtgtttgggagtgggaaggtggggagaaagaccaggctgtagggactggtgggtttcagggggcttggtggtgggtgctctccagagctcatggaaaaagcagaacaattacaaacatttcttccagggcccctgaaagggtgctccccatcaagtcacctaagcctttcggtcctcatctccctcagggaccagggctggggaagggaacctggctgactcactggaaccaccacacccatctcagcctcacccagtcaaaggtcttttgatacaacccacagccaatcaggaaggttctacccatgggggagagcagatgcgagggctgcgtgcctacctcactgcccacctccccccttcccactgtcatggaaacccgagt

SEQ ID NO: 7715 - DNA, 1196 bp, Homo sapiens
cttcggtgagtttgctgtctgtgctgagacagcaggaaggtggctctcaggcatctgtgtacacttcagccacagaagggaggggttttccggcatcagggttggcaactgagtcagatggagggaatggctccagccaaaacaactcgggcagcattcgccatgagcttcagtgtgacctgagacgcttctttctggagtatgaccggcttcaggagctggatcagagcctgagtggggaagctccccagacccaacaggcccaggaaatgctcaacaataacattgaatctgagaggccaggcccttcccaccagcccaccccacacagcagtgagaacaactccaacctgtcccgtggccacctgaatcgctgtcgtgcttgccacaatctcctgaccttcaacaacgataccctgcgctgggaaagaaccacacctaactactcctctggcgaggctagttcctcttggcaggtccccagctcctttgagagtgtgccatcaagtggcagccagttgccacctctcgagcggactgagggccaaacgcccagctccagcaggctggagttgagcagctctgctagtccgcaggaggagaggactgtgggggtggcctttaaccaggagacaggccactgggaaagaatttacacccagtccagcagatctggaactgtgtcacaggaggccttacatcaggatatgcctgaggagagctctgaggaggattcactcaggaggtaagcagtcgctttcctatcttctgcatcccttgcttttctccttgtatcatttccttgagtcctatagatgttgtggctgtatctggagtgtctgggacccacgcatctgcttctgatctcgccattgcattttcttggaaaatcttgctctggtggcagagataggatagggcctagcagtatgagtcagttggctgcgctagctctatttcggctaagctcaaggttctggctttagccttgaaaggagagtgtagattaggttagagaggcatgaggagatggaaccattgactttctctgcctgctttttgaccttgtcgagacattgtatgtgcaggactacttattgtagtagtcccagagtgcctaggaataagtaaaagagaaccctgcatggtagagattagtatattggctcttcgctgattgtattgctttggacaac

SEQ ID NO: 7716 - DNA, 1517 bp, Homo sapiens
cacgccattgcactccagcccgggagacagcgcccctctgtctcaaaaaaaaaaaaaaaaaattcctctgaggaccaatataggttacataggcaatttgtctgtgttttttgttgttgttttttgcaatggagtttcactcttgttgcccaggctggaggacagtggcatgatctcggcacactgcaacaacctccccctcctgagttcaagcaattctcctgcctcagcctcccaagtagctgggattacaggcgcccgccaccacgcctggctaagtttttgtatttttagtggagatgaggtttcaccgagttggccaggctggtctccaactcctgacctcaggtgatccacccgccctggcctcccaaagtgctgggattacaggcgtgagccaccgcgccaggcctggcaatctctcttatcctggtatttttttgtatgcccttggtcataagagaagggatgagaatgtgaattaccactgcttagaaaaacaactcaattgggctgggcgcggttgctcacacctgaaatcccagcaccttgggaggctgaggcaggcggatcacctgagttcgggagtttgagactagcttgggcaacatggagaaaccctgtctctaccaaaaatacaaaaatacctgggcgtggtggcgcatgtctgtaatcccagctactcgggaggctgagacaagagaatcgcttgaactggggaggcagaggttgctgtgagccgagatcatgccattgcattccagcctgggcaacaagagtgaaactccatctcaagaaaaagaaaaacaactcaattaacgtgcatggttgacttaacagggtctcctcagtaaaagtaaaggtaaatcaagaattcatagaagtcataacttatagaaacctcctgtggagcagaaaaataaaatgaaagaagtaataacttagtattgctgttttggaaaatgctgctttcacttttgattcatacatgtgaaagaaatagtaaagaaatagttaagaatcattttacatttttttctttttttttttgatacggagtcttgctctgttgcccaggctggagtgtagtggtgtgatcttggctcgctgcaacctctgcctcccaggttcaagcgattctcctgcctcagcctcctgagtaactgggattacaggtgcgtgccaccacgcccggctaatttttgtatttttagcagagactggatttctccatgttggtcaggctggtctccaactcctgacctcgtgatacacccaccttggcctcccaaagtgctggaattacagatgtgagccaccgcgcccagccatatttgtttattattttgagttgttgatactttctttttacatgaagtctgtagtttataaaatgatgaatttgtctacttcagagttagggggaagagttatcggtgtgtactggcagcaggctgtggattcagaactgtgaaagcttctcccaatactattcagtcttgtttctacctgtttct

SEQ ID NO: 7717 - DNA, 1133 bp, Homo sapiens
gggggcagcagtggcaatacccatgatgactttgttatgatagactttgtaagtcgccgtcaccttccttgacctttgctgtcccggggaactagacctagaagcatctactgcacttgatccagatttccttcatagggatcagatgtgctggtgtagacagaagggatggacaggtggagtctggtctggggagacattttggaggccgataaacaacaaggcattttttgtcatgcctttggttaaaattcataatgaaattcaactctaaatggagattttccactgatacccacttaggtcctattcgtggctaggcaaggagtttgaaggagtgggacataaacttaactagtggagaggaatattatcaccagcattagaagtgaacagtctgggagagaaaagtgtaaagatttctctccctaagataagcctgaaagaaccttttgataattgctagaaggaaagacttgttcatagcttatctcctctgtggttcaaggcaagctaaactgactctgtcttgtttttgaagaaaccagctttttctaaagatgacattcttccgatggacctggggaccttctatcgggagtttcagaacccacctcagctgagcagcctctccatagatattggagcacagtccatggctgaagacttggtatggaaacgtcttcctctaccacagtgcatccttatttgatggtcattcctttgccaaaggcctaggaggcctaccaccttctatcttccctgtaataggaaagagacataattagaaaattatcttttgatcactcttgagattggcattgtgcccagcagtcattatctggaatttgcttgagcttggttccttctttctctgcacattctcagcattacttacatgctcctgttgttctgtgcctgacgtcttctccttgcagatgccactaggccaagttgctctaacagccattgcattagctatttagctttccaggcagatgccagtggtactgggcagaggagattgtgaggtcctgagtatctgtgttcttgctctttcctcagagagctcactccgtcatctagcagttctcacacttgaccagatgtcctgatactgattataatgaccc

SEQ ID NO: 7718 - DNA, 2577 bp, Homo sapiens
catgtttaatttctgaatcatcttgctcttgtggtccttttctcttttgttaagtgtgtggcccacttggactcccaaggccgttccattaatcctccagcccctgcaaagccctgatgcatatacccctccctaccctgtgcctacgcagctgccctgcgttctcccacttgctcggcccagctagggctgagcttcgtcttgcttgctgcctcccctcttcgggactgggctggctgcctcctcaaggccctgcctgaataaacggctcttccctctctttccggtacaggactcattaccagagaagctggctgtgcatgagaagaatgtccgcgagtttgatgcctttgtggaaaccctgcagtaaaagtatccttgagtcccagcagcaccccctttttgtggccccagggcataagcagcctcccatgcatcagctgctcccacccctcatcctgctctgagccaggtggaagggaggctggcttctcccatggggacccagaagtccctactcttggacctcctggagactccgtggcggcagtcaagcccagtgcccagttggagaagactcacgtgctggccttggagatgggaagaaccttcgtacgaaaaagccctcagcagggccatctgtgtgccctgcccatcaccaactgcttcccaagggtgtcatcctgttcctcctgctgccggcctcctgcctgggcctgccttgcagctggccccttccctgcctgctgtcaccatccactgtttgacattccagctggtggccaagagattggtgtggagtcgcagaaagaggaaggagacagtgccaggaggaagaaggaaggagtcccttagctctcttcattgtcccctttacttcctgctatcttcttctcctcttcttctctctcttgcctctatgcctgtatttctggcaatatgacaggcctgcctacccaagatcagaactccaaaaccactcccacccctgaaggtcgggagggtctgagcagccctggtggctgcctgtgctcaggtcctcagctccatgggaaataaaaatggcaccctgaatctctaggattttgtcacttggagtcacagcaaagttctcttcctcttgtccccccgttgctgctccttggttatagaacatggtaaatatttattactttcagagaaaccagatattttatagaggaaatatgtttgaggtgagttgtttttcacttggagaaggcggagggctcttcctgggacggagacctcctcctccggaggttattgagaatccgggctgctgctttgaggatcttcccaccatacagacagcgagatccaagaagagggctggccgggggcaaagtcacctcccagtgtggctgcactggaactgactaaaggctttaccttggatagttgcgtattcctggtgagagccttacatctcccacagtttctgcagagtgactgactccattctggcagcccaggaagtcctgggtgctaaatgtgatggccacatgtagtggttaggggatgttgtgtgtgtcccccaactgcctgggtacttgttcctgatccctggggctgtcctgtggagcttttcctcctgcttgggcctagctaccatctccctctaatcccaggttctctacactgccctggggtttaccagctggattggcttctggttgagaaatcaaagctgggcgtatgattgacttaacccttcaggtattgttacttgaataagtcaagtgcctagcctcacccacctatgatctgtcctttcccagcctcgctggtagtcctggtcaaggagatctaggtctactccattcctcctggcccacctggggcattcactggcagcagctgtgcttcagtggagcaggtggttctcagctgcttgttagtatactgcatgtgacactgttcccacatacaaggctgacttctgaggattggagcaggctctggcggggaccagagctctgcgtgctgctgctgccaccaagaagtgttagcagaagcagtagcagccaactggccctcctgactttggcccagagcacatgcgtggcttgctgaacccaggctcaggtttatccccaaggccccagctttgagaagggggaaggcccctggtaagttattgatgcccccatatttcagctactgctctctttccaaggccttgcatggaaaggcctagccattgtctgaggcagcaatctttggcatctacaggtggcagcagcctttcaccagggctccatctgtgaagagtctcagccatgactttgagctgagcttgggagaagtaaagcaactgttaaggccagcccttgcccctcagacctgccatgaaaggaatgagccctagactgactcctgcagcacccccgggacaggctgggaccagctgtttgtctccaggtgtcagagtccctcctcctcctccaacctctccaacctactttgtttggaaataccgagctacacttcaaaatgtattcaagggatttccaataaatttttttctgtactttacagcctcctgtcctgtaggtt

SEQ ID NO: 7719 - DNA, 2832 bp, Homo sapiens
gctgcccgaggagaactaccaggtgcttcgtttcctgactgctttcctggtgcaggtgagaccttggacttggcctctggggtgaagggagggggaaggaggagctgccgcctcctctgcgccctggtcattgttgctgggagtgggaggcagcatctgtggcttcctgctgcagtccctgattccctccacagatttctgcacacagtgaccagaacaagatgaccaacactaacctggctgttgttttcggccctaacctgctgtgggccaaggatgcggccatcaccctcaaggccattaatcccatcaacaccttcaccaagttccttctggatcaccaaggggagctgttcccaagcccggaccccagcgggctctgaacctggcccctgccccaccagccccttctctggtagcccgggtttggactcttcctcctggcatcaggggccatgaagccccctggagagagatgttggagccacccatcaggcatgctctcccccacctctgtccagcccgcctcacggccctggcggcctcgctgttaccagaagacgtttttctctgccttacacttctcactgcctctctggacaccgggcttttgctgggctctccagagctgggcttggctcttccagctggagaaggactgagccccagtaacccctttcctgctttttcctgcctctgtttccctagcaagtgtggatgaatcaaatgactgccggctgggctggtagcaggggccagtcctcccctcttgattgctgggaatgagcagctgagctctttggtgtggacaccgccccaagctgaggtgcctccctatctggtaggctgccctgctttgcagaagccccactgcatgaaggcctgagtgcaagcacccttgctcctgtactgcccccagcagcgcagtctggggtatttcccctgctgaggagtgacagggctggagactgtgtctgctttctgcctcctcttccacacatcctgggtcagcctttcccaagtgatactgcccctggggtgtcctaaccccttggttgtgcagggactggtagcttggatgacatggctcagagtcccagcatccacttgaaacctccctctccacctccccgcccccgagagctacagcgtgtgatggaatcagtgaccggccaggttagcctctcccctcttggcctcctttcccacacgggcagatcatcagccttcatgttcttgtggacctgtctgttacggagtcacactggcccctgccccagccagaggtgactcagtgcctcaggatcttatggctccttcctccagctgggggactcttaaaggggctggggtagagactaagagtgcccgtaggaggggcagagattgtgctgataggtcagtccagataggtgggttctagcaatttccccaggggattaaggggctctagggccacctttttttttttttttctgagatggagtctcgctctgtcaccaggctggagtgcagtggcgcgatctcggcacacctccgccttctgggttcaagcaattctcctgcctcagcctcctgagtagctgggactataggtgcatgccaccatgcccagctaatttttgtatttttagtagagacggggtttcaccatgttggccaggatggtctcgatctcctgacctcatgatccacccacctcggcctcccaaagtgctgggattccaggcgtgagccactgcacccggccagccctgttgtctttcaaagaacctcggccccagtgatggctgatctcactcccactgtctcgtagaattacactccttcctggggatccctcttcctgcagccttgtccttggggagtacagggaagtacctgcagtgaccctgcccccatgaccttggccaggcaggatgattccagagcccgtactgtggggatcctcactgaccagcccagccccatccgcaagccaggctgggcctgggcataacttcgctgggctctcccaagaccatcagcagtgcatccagccccctggggcctgggctgctgctggttcttcatcagtcccttggtctctagcctcggccagggctgctctgctctccgccctcctttgtgtatcaagtgtcgctcacagccccattcactggggagcctttcggatctatttggtctttctcatgtcccccactggtctgtaccccagggagcgggtgcttgtactgtgtgaatccagtgttcacattcacacttaatgacttccttggcaccaatcatgtatttcaccgtttgcactttttgtatttcaataaaaatgttgatgcaaaactgctcatctggatgttggggaaatgagttgggtgtggaagttggaaactggatgggaagtgtggtgcggtggaggaagaggaacagatggggcctcaggaagtcccctccccagtccgtctgccgcttcctcatcttgtgcactcgagtggtgatgagggcagcttcctgaccagcttctaggcatggaggtgtccacggccaccttcccgttgtttgtacccccagcattccagcaggccaccatgtgctgcatcctatgaccagggcctctcctgtttcccaactggaaggtaccggaagtttgaagggatcttagatttatctaaggcaagcagggggaagaaaagtggtgtggactgtgatggacaatggtgtgggatctggagtcacacgagagtttgagtcctcgttccctcacgtgccagctctcaccgctaacagtcatcatcactggctcaccacccctgtggctgctgcttcatcagaaga

SEQ ID NO: 7720 - DNA, 1516 bp, Homo sapiens
gggaagaagtggggccatctgtctacttggaaaggctaaagatcctccgacagcgatgtggtctggacaacacaaaggtactgctccttttcttctgtgcagttcagggagggtagtcacaagcaggtccgaggcaggctggcccacagagaagtggcttagtcttgctgtagttctggagctgcatcttgacctgcttgacctgaccttagacaatctctctccttctctcaatagcaagatgaccgacctcctttgacctctttgctctccaaaccagcagttcctactgtcgcctcttccacagacatgctccacagcaaactctctcagctccgggagtcacgggagcagcaccagcattcagacctggattctaaccagactcactcttcaggaactgtgacctcctcctcctccacagctaacatagacgacttgaaaaaaagactggagagaataaagagcagtcgcaaatgaagctgccccactcccccggcaccctgcagctttagtttactaaactagaagtcctcatagtttaaaatggcctcagcaggcctagtgtatacaaactggttgtatgtatcatgccgtggagctagggggaggagtcattgtggcacaagtatttgtacatactctgcttctctctgtcagcgtcctgctgctctagaagactgtccgtggatgagtttagtgtacagacttgtaaacagctgccccctctctgctcagtctagttcccagatccttttcttttctttttaattgctcatttgtaaaattgtcctaatctttcctagctttttaatagttaatattagaaactctttaatagttttcctttcagtttgtgagctcttctctgtcgccctgaagggtcactgtattctgtatgaatgcatggcatgatacaactaatttaagagtcttttataaataaagtttgcattaactatacctgactcccaagatgctccatatcatggagtgttgggcagcaattttttaacttttggtaccagctgggtattcagccagttagagaaaggttaattactgcttacagagcttccctttttcttggctcacagacttggagctgtcttttattcctttggaatggaaggaactctccttccctgctctccacaaacagctcctagggagcagaaaaatctcatccttccttgttttgagattttggtcatgatttccctccaattatcaccagtcgtttcaagaagctcttgggcatcctaccactttgctgaccaaaggcacacaagattgcgcccagagattggctgggcttcagtggttctcacactacaactagatttgtgttcatttgactaatggagtttgggaaatcttagtggtttgctgcttggttgtatgagtctcttttggtccaggctaacagttgcttcacattcagtcagagtaaggatgagaaagtgagctgagtattcacctctggaataaattccacaggacctccctccacagt

SEQ ID NO: 7721 - DNA, 1121 bp, Homo sapiens
acagatttcatttattttggggaaaaagatatctacagccctatgatatttggtctcttttgtgaaagagaccaaatgaacatatttataacattgtaatactgttattacactgaattagtatcagatattttgtccccttgcattagatttggttaagcaacatgaactactttactctcaggaacgaaggaaacccaagagagaatttctaccaggttaaatgatggcccctagctctggggagtgggaaggagtagagatggatgattagatgaatgactggacacacttcagctggtgtcatggtagaagtgattaaaaattttcatgttttagcagctgaacttgaaagatatgatgtgccacatttatagccctggccatcttttagaagtgagctcaaagcttagggaagatgaatggtgacaaattatcctcattcttcagtcactcctaactcttttattcttttttcaatagtgtctctggagaatggttcgactgttgcctgataccatcaatagcattaacctagacagaattcttctggatatccacattttcatgaaggtcttccccaaagagaaactgaagcaatgcaaaagtgaatttcccataaggaccctaaagaccctgctacacaccttatgcaaattaaaagggcccaaggtgagtaagaatcgcaactggtctctgagggagcttgagagaaaatcatggaaatggcagtgctatcagtcatgcatgtgtctccctcagatcctggaccacctaacgatgatcgacaacaaaaacgagtctgagctggaggcccatctctgccggatgatgaagcacagtatggaccagactgggagcaagtctgataaggaaacagaaaagggagcatctcgaatagtgagtggcctgacttgaaagattgagggacatgaggctacaccggaagtgatcttatctaaggtgtaggtcaccaggatatgctttccgaaggtccaaggtgaaggctcatggactggttgaatcagtctcctgctgtggtgcagtaaccatttccaccttgaaattttaaaatctaaactaagtataaccatgtgttttttggtccccaagaaagatgc

SEQ ID NO: 7722 - DNA, 1196 bp, Homo sapiens
aaaaaaaacaaaaaatttcacaattagaagcacaccgattaattttgcctattactagaggcttgggggagtgtggtgattttgttttttctttaatactctgaatttttacaaatataacatagccgggcgcggtggctcacgcctgtaatcccagcacttcaggaggccaaggcaggtggatcacgaagtcaggagatcgagaccatcctggctaacacggtgaaaccccatctctactaaaaaaaaaaaatacaaaaattagcccagcgtggtggtgggtgcctgtagtcccagctactcgggagactgaggcaggagaatggcatgaaccggggaggcagagcttgcagtaagccaagatcacgccactggcactccagcctgggcgacagaggagactccgtctcaaaaaaaaaatacaacataattgaatatttatcagaatatgccacccacatttctttactctctatattgagttttacacctccctgacacaagtatgtctggatagctgtttcagatagagagccttgcccgggaggcctccactggagtactaaaagacctaatgcatggcctcatcaccttaatgctggattctcggattgaagatcttgaggaaggacaacaggtcatccgctctgtgaacctcttggtggtgaaggttctggagaagtcagaccagaccaacatcctgaggtatatctgtactctcagccaatagagcctggggcatcctcgcttttgtttacacttagaaaccataatgtccgtaagtcaacttcctaggcaacctaacaatcataatcaacttcctaggcacacttaaagttatagctacatcagttataactatatcagttaaaactttaagtgtgcctaggaagttgatttattactcttcttcatcatggaccaaaggtattttagcctgagaccatagctaaaactagtaaatacttagttagccagccaatatcatgcattttctataataggactgtaaagtttgtcagttacatttttcttgtacatttcaggtacattttattctttctcagctaccaatgacaatgaaaaatagagtcacaaaccttacacttaccaagtggtgacttaaaaggcttaaacaatgtttattttcttaactgaatgtcaggtagtccaggacaattcctgatccatgacct

SEQ ID NO: 7723 - DNA, 1141 bp, Homo sapiens
tcccagctgacctcagtttctgtacttttatttcctctcccttttttactgattatatcacggtaccttccctacttatccctatttccctattctttcaaaacatagtaatgcatgggagaatcattgctacttaggaaatgcctcacttaatcattattttccttatcgactaggttggagaaccaaaggatgtcattcgtaaagatgttcgtgccatcctgaaccggatgtgccttgtctacccagctagcaagatgtttccctttatcatggaaggaaccaaatccaaaaactctaagcagagagcaggtgaagcaaacagtttaaactgagatgtgaatctctgcagcagtagcctatagaagaaatagtttatagatgaacaaataaatttctccagtgcctatgtagttgattccaacctcctgatttagactgtgagagtgatgagttgcacactggtggagccatggtatcaggtgatacaggcaccactcagtatcaccctggtgacaaaatcaagtgcacaggggccatctgactcacaggcatctcttcctttcaggagcacttgctgaaataccattttttcactgataaaaggcagtaaacaaaaaatcctaggcagagccagagtaaggttttagtccttcatatatgccaagggaaatttctctagtaaggataagtctctgtcccaaatatgtgttgtctcattaatctagcctttctcccccatcagagtgcctggaagagctgggatgtctggttgagtcctatggcatgaatgtttgccaaccaaccccaggaaaagccttaaaggaaatagctgttcacataggagaccgtgacaatgctgtacgcaatgctgcactcaacaccattgtaacggtgtacaatgtacatggggatcaggtgttcaaactgattggaaatgtgagtgacttctctgaacactgtcagcatgtcgtgaaaagaattgcaagatctcctaggtgttaggtttcctgtcctctcaactgtagctaagtttttactactttttagtcaactcaacctatcaatgtgtcctagaatccagatagacccttgaggtgtctctgattaggctgttttaatggaaatcaagttttctttt

SEQ ID NO: 7724 - DNA, 1141 bp, Homo sapiens; identical to SEQ ID NO: 7723

SEQ ID NO: 7725 - DNA, 1187 bp, Homo sapiens
cttaaaagccaacaagttctctaaaatctctgaagttctgtgttgcatgtgtgtataagagggttgtagtgtttttgtaggcagccctagtagtaattctcagttatgcagtcagtatagtaatttattgtgtattttagggtgtgtattcagtactaaatgcaaataatcataagaggaggaaaatttaaaaatcagatttttcaattaataaactttctgtgcaatattacttgttagtattttggaacactgagtagctttttttccctctcttcactgtcagttaagtaattggtaacaattaaaggatacaaattattttgcatatttgtttaaaatcctgattttactttagttgtgtttccagctgtccctaaccatgtcatatctgttacatgctgttaatacaagtaaataaataaatgtccttggcttgctcttagctttatgatactgatccttgttcaggtgatgcaaatgaagcttcatatagttgctttgattgcccagaagggaaatttttccaaaacgtcagctcaggttgtattagatggccttgtggacaagattggagatgtgaaatgtgggaacaatgcaaaagaagctatgacagcaatagccgaagcctgtatgttaccatggactgctgaacaggttagtgacacagaagtcttattcctctagttttcccaattttttcccccaaactttaagcttactaattaaacattagtttttatcttctcaagtaaaatcttttttgatactgcattttttttgagatggagtttcactctgtcgcccaggctggaatgcaatggtgcaatctcggctcactgcaaccctcccgggttcaagtgattctcctgcttcagcctcccgcatagctgggattacaggcacctgccaccacgcctgcctaatttttgaattttaatagagacaggatttcgccacgttggccaggcttgtctcgaactcctgacctcaggtgatctgcctgcctcggcctcccaaagtgctgggattacaggtgtgagccaccatgcccggccctttgatactgcatttttatttttaccttaaaaaatactctattgcctagtgatgaaaattcatcttagtcaaaaatattcggtcagacacagaggctcacacctgcaatcccagcactttgggaggcc

SEQ ID NO: 7726 - DNA, 1120 bp, Homo sapiens
ccacctcccctttccccagtaccctcagtgcctgcttctcagtgctgatgcagctgatgacccaggactgcgctctgccccatcacagccagcatgactgcttctctgagagaacttgcccatcaggggctgggacatgggggtgtgggtaaagacagggatgaaggatagaggctgagagaagaaggaagaatcagcccagcaggtatgggcatctgggaaacctccagcctcaagtgtgttagtaacatgaaaaagctttggggggtagttggatctgggtgtctggtccattgctggcagtggacattattcttgccctaagagacactgccttttcagcagcagatactggtgagatgggggtggctcaggctgttcttcctcctcctagaatgtctggagctgtttctacattcagataactgggtcccctatcacaaggctactggctaataggaattccctcctggtgccaccactggccagtacctttcctaagtctttgctcaaattaaccaggttgtgagccagtggcttgagtgaatgttaggccttgggggctgagtctctgaaaagtctaagaagctctgcctagaccaaatatggtatacctcctgacccctctctccctcatgtcctgggattctggggaagagacctagaaacaagctttcaaagaaaaaccagaagttgtcataaatggtcagaaagaacgatcaggttggagacttgggaaacccagggcctaaagagaagtatccatgagggtcaaacttcctgttgaacttcctatgttctttctcaagtgctcagggatctaagttagtggacagcaagcctgtggctacggggtggtgatgttcctcttccagctgtcccctcagctaaggggcttagtttccatgtgggatgccatcacttggttcatgctcattcacacaaagggcacgtgtctcagcctggtatcagggaaattgagacttatttttgccctaaaacgtctccctagctgttcttcgtggggtttttttgtttgtttttttgcctaatttgctttttctgaccaagccttgtggcaccagcaatctccaaagtcctgtggtgggagggctgaata

SEQ ID NO: 7727 - DNA, 1151 bp, Homo sapiens
cctgccaggcctcatggacatgcaggctgtggaccgggcacagccactaggtgagagtcagagggctggggctgtgagtcagagcctctggctttctggggccatctcaacatcagagatatatccagagcacagagctcctttacagccagaaagacggtgacctgtttaagctcccttccagattgggctgtgttctctctgggtatggctggtactacagctgtcaccttcaaaggactcctggagatcctcctgcagaccctccttctacctcaccctgccaggcactgaatcctgtcacttagaacagcaaagagccagccacaaacaactgggacctttgtaagattcagatgatgttccaggctaggtgtgaatacttgtgcttctcatcaccaggttttaacaagtgcggctcgagaaatggcggctgctcccacctctgcttgcctcggccttctggcttctcctgtgcctgccccactggcatccagctgaagggagatgggaagacctgtgatccctctcctgagacctacctgctcttctccagccgtggctccatccggcgtatctcactggacaccagtgaccacaccgatgtgcatgtccctgttcctgagctcaacaatgtcatctccctggactatgacagcgtggatggaaaggtctattacacagatgtgttcctggatgttatcaggtatgagcaacactgaaacctccagaagacacagatttgcttctggtcgcccatgggtgaggttgtgttctgaccactaaatggatgagtgatttggcactttggatagtgagttttaatcctgacttgttcactttgtagtgttgtcacttacagcagagtttcaaactttcatttgtttagagattatatggaagcctagtatgtaaaacaaacaacaacaacaaaaaaaacaggtaaagtcaggggacctggagactttcacatctaccattgtgccctgagggagctccaagaatcccctaggacttactgatgagtaggccatataaccagtatctgtattgcagtaaaggagccccaatcaaatgccaagtcttatggtggtttacaaagctgttgttttttattttttcgttgttttatttttagtctttaaatttgt

SEQ ID NO: 7728 - DNA, 1151 bp, Homo sapiens
aaacaaagtagcaaattgtgagcactgttagagagttttaagtgagatacgatggaaattgggcatgggagataaaatcaggaaaagactttacacaaaattggcatttgagatggtctttaaaagctataccaaagctataatttcactagaccatgacctagacatcagctttttcccccttagaatatgaagcacaatttgggactacttctttgctggacagtttcataaatttaggctacagtattatcatttcagacttcatttgctggaaatgtagcctactgcatttacctataacagctcatttgctgtattttttattttcctttccttaagacaatagcactgcgtggttaggttaacactttcattgcttttgaaagcccctcttctaacctaatcttttgccaggtgatgtccgcatacttcctcagggtgtcttagaagtagatttctatgctagctctccatgaaaggagaagagtatataatttgctttttcatacagtgctgttactattaggaaggaactaactttattctaaatgaaaacacactctatattaaagacaagttagatactttcccatgaagttggtctaggagaagggaaacggaatagatgcctcctgaaattttttcctgttccattcagagtcagatttttccccccctttatatggtcaacaaatgaaaactggcatttggaattaccatcgttccccccattgcttgccatcttcaaatttaatgtctgcctctccacaaagattaacatgtttccactcctgatttacttgtcagggaatttagaagttttctggaacctaaagttcactctggtagggatgattactggataattgcctattcttcggtggaatttccacttttagattacaccaggctctacagcctttatttctttggcaggaaaacccaaaggcaatggagtatatttttttcccttccctggcccagcttaaacaatgactcacttgggccctggggctttgcttcatactctcatttaggggccactttatacccttgtttctattttcctttcttgttctgtttggaccctttatatcctttggcacatgggatttgtctctggggttattgtcagagagatatataaa

SEQ ID NO: 7729 - DNA, 1226 bp, Homo sapiens
tttttgtatttttagtagagacagggtttcaccatgttggccaggctggtctccaactcctgacctcaagtgatccacccgccttggcctcccaaagtgctgggattacaggcgtgacccactgcgcccagcccagaaataatatctttaaggaaacctaattccaaatgcagtagagggaaaagtattctccaaaaagaaagatatgagtgccagtgtcatccagttagaggctaaaaggctttcctccatatgcgttgctcgaatgactgattcagatgtcctctgtgtgtacctgtggaaggtgggaagcactcagaggaactggcctccaagagttttcggaaaggtatggttatatgaagagacttccccatagaaggactaggtctaatctagagttcagagttttgttggggagaaaaattccccgtttttggcagtggttctctctggtctcaatttttcattctgattccagccttctggattccatctaacaatgacttcttgacttttctctttgcagttttaacagtgtatgccagggaacacacattctctttcgagaattcagcttcgtccaagccaccccccacaatagggtatcatttttacgggccttctggagatgcttccgaactgtgggcaaaaatggcggtaagtcttcccaaattctttttccttccttccttccttccttcctttcttccttccttccttcctctctctctctttctttctctctctcttttcctctctttctctttcaaactttttcttttgttcctataaatattgtttgaatgcatgctattcaaggcatttagaatacctcacttttgaggagttgtctggtttatgtcaaagatattactattaccactaccatcactaatggtacctattaagagccaagtgtagctctttacatgtagtaactcatttatctttacaagggctctctgtggtagataccataatccccattttgtaactaatgaaactgaggatcagagaggttaagtaacttggcaaggttacatagtaaattctgggcccagatttatacccaggcagtctgacttcacagcccttgctcttggcagatattaaaatgccatgcagtaaatacaaggaataatgtgaatatgaagaaagaaactcctgaatgggggtgggatggggatactgttgttagagaagggagagaaaagtggagtaga

SEQ ID NO: 7730 - DNA, 1118 bp, Homo sapiens
ttagtagagacgaggtttcaccttgttagccagaatggtcttgatttcctgaccttgtgatccgcccaccttggcctcccaaagtgctgggattataggtatgagccaccacgcccggcctcagcctcacttttcttatttgggacttggggatgatagcactgatttcacagggtcgtggtaaggattagatgtgacagtgtcaagcgcagtgctgggcacaggatgaggacagtcagtccctggagtcccagatgcagatttctagaaggccagagctcaagagaccctagaaataacctgttataacctgcattaacttcctcccttcatcccccacatcttgtactgagaagaaaacaaggcgcattgagtaagggacttgcctctgatcacagggcaacttgactttgttgcttgacggggccaggggaggatatttggcccctctgcccattccgcataagccactgagcctgtggtatctgtcctgtccccagtcctgacgtgaactacgaggagctggcccgctgcacagatgacttcaatggggcccagtgcaaggctgtgtgtgtggaggcggtgagtggtcagctggggtgggtgcgttgctttgtgccttcttgccccctccctggacaggatgggggcatttggctggtggagacggctgagggaagaggcctgagcctcagggagccagggaaggcattcaggcgttcagacctagactctgtttgtcccggctgtagggcatgatcgcactgcgcaggggtgccacggagctcacccacgaggactacatggaaggcatcctggaggtgcaggccaagaagaaagccaacctacaatactacgcctagggcacacaggccagccccagtctcacggctgaagtgcgcaataaaagatggtttagggtccctgccgctgcttgtctgccttccctgggctctggctggaggagtgggggcgtgtgtgggaggcaccttccccaggtgctgacgcctggaaacccggagacagccgtgggccccataccactggtcaggatgaggctttctggggctgtgtgtggtgctgcagctgctgcctgggccttcaggcccctcagagcc

SEQ ID NO: 7731 - DNA, 3148 bp, Homo sapiens
aggctgaggctctgctcccctggagaccttctcttaggagttgggtgcttcatggaaaatccaagccttaggttcccttctgtctctggcaattagatgtgttcttggtgtcctccatgtcctttttgacttttccctgtgtccattgttagcatgtgcaaaagttccctgtcattacccaacccctgcccgcccacctcatttcagggctgtacacacagtgagtgttcctgttctctctctctttgtttggatgtattgctctgtgtaactcagtgggtctccctctttctggtttgtttttttttctagattcctgccgtttgttcatcgttgtgcctaaagcatgtcgatgtggcgtcaagtacatcgtccaaatccctgtctcttcagcttctctgatgcttgaactctcacctttgaccttgtgttgacctttgatgctgatgtgtatttttattatgtttgtttctttcttcgtttttttttctttttttctttcctttttttttccttttgtgctgccaaattggttttgctagaacgactgctgaaggggaaatatttaaacttgcatttgaatataaaaaaaatctatttttctagaacttcataagataaccacttgattttgtgattccaattctttgtaattgtcttcagagcagccctactagcacataccgcgtggtgtttgtatttctgtgaacacacagccagtccgtttctaggctttgtttctctgtgtgcttagttttaaagacaactttgaagtaaacaatgaaataaaagatgtcactaaaacctctgaggctcctgagcacattttgctgatacagtctgtggggcttgaggagaccgcatgtattgttctttcttttgtttttcttctgagttctcaactgcggagagcacctgaaccccctttcctttttgaccgcaggctgcactttgggccccagccagccctttttctttttctttttcttttgtggttcttccctggagcgactctggggagtcctggatatcccgcctgccccttcccctcagccccatgcttgttccaacagtctccacagcaaaatgtgatgctttgatttttttgttgttgtttttgtttttgtattgtttttgtgtttttgttttgaattttttcctttcctactaagattatgcccagaaaaaagttttgcatgtttcctgctgtttcttcacaccttcgtatatatcaccttcacctctctgttttctatagtttgtgcaaaaactgatcgatttaaaagggtttcaaagaagctgttttaaattgttgtagggttgattatttttttcaagattgtattgtttaattttgaagtggcaactttctcctctattgcccttagagcgtttgcctgtgcacttagactgtcacttcgtgtggcctccaggtcttaccggggcttccgggaggctggctgctttgctcagagagggtgggaagggggcctggagagacacgagaagcagaggtagagcctagaaggtggcagcaggtgggtaagaggcttatttagcacattaggggcagtgagcacctggaggaaggagggcgctcccaatcacccgtaggaggccatctgcacaccaagcggcaattcacctgctggcgcttttcctaggtgacaagcacaatactacagtcttcacactgtttacagccctgggcaccagccacccggcactggctcttcatcacagctctgctcttgcttagctagtggggtgggggaaagggcagggatttgtttttttaattgggtggagagccaaacagctactgtccctgggtgccaagcaagccagttttttggttccctgagggaaactgaccctcctctcttgtggcaccatccagcctcagggtcttggagacttgagtaagaatgtgagtggagggggagaggtgaggagaggagcacagggtggatctgtggagggaagaggttacagggggaggagctgatgatagatcccacccagacttaagctgctggtgggtgggtgagctgggaagtaggactgtccagggaagggtggagagatgtagctaggggctggggagggggaggtggaagcgctattgagcatcctccacaccaaggttgatgaaggaagggatcccagcagggtttctgctctggggctggcaggttgcctggtattatgcccaaggccgctctgcctgggggaaagggcagccaggcagaggcccagtgtctggtaggctgctgaatttcctggaaggggtgattggatggaaagaggccagaaaccccagcctgagagactgctgtgcaccccacagtctgactgcacagagccgcctctgttggcaggaggcactgaggctccccttcctgtgtattgagaagcagtgtttgccaatatattttgctttcaattccaagaggagctctgggaaaacctgtggataaaaccaaatgccaaatgttggacgttgtttccttttccttttctctctctgattgttttaattgttctgtggtggttttaatggatttgagaccctggagcggcagctgcctttctgatttccagctgctttttgtgaataatttaaaaagaaaaaaaaaaagaaactttacattttggagacaaacctgtgtgagttttttattggtacaaacgttgtatttaacactaggggttttgtacagttttttgccttttctactagaaaacaatgtaaagtgatttcacaatgtgaagagaaaaaaaaattgccactatgaccaaacgcacagtctgttctgcagcaacaacgggattcaatcaactcagtcgtgattcagccgtagaaatgcttttcctttatcttgtttgagcttttcctttctttcctgttttgatttgcaaaagaaaatgtcttttttgtgtgaacttgtgttgtactctgtagaaaattatggattttactttaatggtttaaaaaaaggcaaggagagccctcgtcgcttttcttacctaatcacagagtttgtgtagtgaatttaaaaagaaaaaaaaattgttataagtttggagcaagggagtatgtgtttcaaaggaatctccttcctttttttgtgtgtttttccttttg

SEQ ID NO: 7732 - DNA, 1176 bp, Homo sapiens
cttaaagttaaaaaccactgatttctttaaaattaacgtattggaaatgctctccctacccctttttttgagatggggtcttactttgtcacctgggctggagtgcagtgggaatatcatggctcactgcagccccaaccacccaggctcaagtgatcccccctacctctgccactcaagtagctgggactacaggtgcacaccagcacgcccagttaatttttgtatttttttttaatagcgaccgttttgccatgttgcccaggctggtctaaaattcctgggctcaagtgatccacccgcctcagcctcccaaagtgttgggattacagtctcttctctcttgtgtctatcatgaggagaatcatttggcagtgaatgaaattagaatgtaacctgcatgtcatccaaaaggaagattttttttcttcttttcagatggaggaatttgaccctttcgttatggtcttttcacagggttgctcatcacccatggtggtaaaatttgctgatacacagaaggacaaagaacagaagagaatggcccagcagctccagcagcagatgcagcaaatcagcgcagcatctgtgtggggaaaccttgctggtctaaatactcttggaccccagtatttagcagtgagtctttgtggtttgctttctgcagactgtgcaagctcccagctgttccttcttctgctgtccctagccaacaaacacagtggcatttacaacttttggcatatagaaattatatgtaaaaattcaggtagtactatttcttttagtcctgttagtctctttctctctctatatatatgtatctctggacatgcatctctggttatatcttgaggcttttgctgcaactaaagtgaattcctggtttcccgttttaaagatttagaaacatcttgtgtccttgcctccaagaaagaaattcctgagggaatcttaactaccagtgtctttctccatatctctttctaccagatgtagagggcatcattaaaatccttattgagtctttcctaaagagtatgataaatgtttctttcagcggacttgagagatcaagagattttttttctttttttgctttatttatttatttatttatttattttttgagacggagtctcactcactctgtcacccaggctagagtgcagtggc

SEQ ID NO: 7733 - DNA, 1146 bp, Homo sapiens
acttaggatctcagcttcccatgtgcaacttcctttttctaggatttggcagagcaagaattgggtagaaagactgactttccacctgacctgttgcatagtattgtgagactggctgactgcagtggttacagtactctcccatttataatacaagcagcatgatttttaatgcctgcaaaatagagtttccaaagaaatgaaatctcagagtcctttagcacctgctcatgggtcaagggcaccttgacacctgcttctttctttctctgctgatttcccaaccctgtacttcaggtgcacaaatggagtccagaggaggctgtaagagccatcgccaagatccggtcatacatccacatcaggcctggccagctggatgttcttaaagagttccacaagcagattactgcacgggcaacaaaggatgggacttttgtcatttcaaagacatgatgtatggggattagaaagaactcaagacactcctgcttgatacagaacaaaaagagcttaacaggaccaacagggcttaagcccagacttgacgtaacagaaatgtgccaataggtaataggtaatttttctttctctgacttgttttgttttcttgaaataacactgttgtgtggctagaaaggaaaagatttagtgtggcttgtattcatgggatacaggacagggatggggctatcatcttttcttgaatagggctaaagaagtattttaacaaaaatctattatgtacctaatattgtgcctaataatatttagcaccacaactcaaaaaacatttagcacttgaaaaaaggagactcacctctggctctttgccactgtcagaatctgaatctcactggccctgtggagtagggatcctatctggagaagtgggagcatgggctgcagtcaggactgctgcagactgagccatgtgatggtacgtaatgagttcccctgagggaatgaaacaccctcaccccttcaaagtcacccctttggaattcaacacagacacacatatcccttcaaaaacttttatttgtatcaacagttcctagctcttgacttagcttagagcttttaaaagagcagacaccttatatatttgagattgaaaaagtttctgctattaatcagaaataa

SEQ ID NO: 7734 - DNA, 1159 bp, Homo sapiens
ttgtagttagttcatagtagctcagcctttcagagaatactaatccttgttctgtagtgatagtcccagttttgtcctagatttagtcacgtctcccaattggacctctctgctgatttggattggctgatctcatctcgctagatattatttgtgttttgttttgttttgttttccaggggaatatgagccgaggaaatagcttatttttccggaaggtcccctttgggaagacttattgttgtgacctgaaaatgttaatttgaagatgtggggcagggacagtgacatttctgtagtcccagatgcacagaattatgggagagaatgttgatttctatacagtgtggcgcgcttttttaataatcatttaatcttgggaaaattcaggtgtttggtgtctgccttttttgttcttttttccagcacaacataacttaccactgatactccccctttagttattctgaattaggatatttttgctccaaattcttattttacttaaccagaagggaaaaaaagttgtattttcctgaagctacaggcactttgtcatgtgatttttgagtctcaatttaaggctttgtaaaatgaagagtagaattccaagaaaaatgagaaataattttgtaaaacttaacaaaatcactaaattaaactatatgggaggttatgaattactttttcttgggtagaccctaaaatgtcagtagcatgcaccagaatctgactcccattatgcttctaagcacatttcattgaccttgtctctcatacttcaagaaaaggacagtacattgctacattaccctagaaagtctgtgtgaggatctgccccttcagtctgttattgcaaagtaataaaatgtcacctacagggagcctctgagcctactctagttcaagaggctacctgaaaaaaaataaataagataaagggtcagcaacaacaaagaaaaagacaattacagaaaataagcaagatttggaaaggaagtataatggcacttttttcctcaaaggaagttcttgttttcacataaaatatgaaaagcagatcctgcaggagtaacccccttctttaagagccaagtatttgccagtgcttaaattacaccatacagttctaattatatataatcttttgttcttcagt

SEQ ID NO: 7735 - DNA, 1511 bp, Homo sapiens
agaccctagaaatgtggtttttgatgcctctcatctgtatctgtacttgggaccattcttgctttgtaatttttctcgtcttttgctctgccaaatatgaatatcagatagcttagcaaaatcatttttttaagctagtcaaagcaaaacaatatttaagtctcttctgcaaagcacctcgcaaatcttttgcctccctgcttacagttatgaatagtaaggtgagccactgagggtatagccgacctgcattttaaacataggaacaaaagtcactggagatcagcttcaagtacagctgtgttaacgagaatgaactaggtatgcgggctggattctggtgtttgattccttttttacttccctagaatgttttgtgacctctaattatttgacaaacatttgtactgaagagcctgtcatgttactgatcacattttttggttcttatttttattgtttcttcatgtaggggtcttgttcctcgccttctaggtgacatcctttctttgtggctgtgtaactcactggcctacctcgtcaatacctatgcactggacagtggggtaggttgtgaccttcgtgagatgtgctcaccttggctttaatctggcagctagattagcttttaaagtaagatgggccgggcgaggtggctcacacctgtaatcccagcactttgggaggccaatgtgggcggatcacctgagatcaagagttcgagaccagcctggccaacatggtgaaacctcgtctctactaaaaatacagaaaaaattagctgggcgtggtggtgcgtgcctatagtcccagctacttgggaggctgaggcaggggaattgcttgaacccaggaggcggaggttgcagtgagccaagatcgcgccactgcattccagcctgggtgacagaaggagactccatttcaaaaaataaataataaataaataaacaagatgacagtttgctacatgccagactgaacaattatatagctaaaaattatcagtcaaattttcaaatgctaatgaaatgagcatactgttcactgtagaacgatactgtttactgtagaacgatacacgttaaaagtccgtaagatgtgacagagtatacccaagagacttagccctgtgttacttcagggctttaaagagatcacttctttactgatacttaacttgagagaacctgggaaagcaggacatctttatggtgtatcgggggcttttcatctaatctggacttaagagggtgcctgtattgggctttctagaaacctcagccttttgagaatcagtcttatctagaagttgtctttcttatctcagcagttgtggggcctcttgtatgtcggcagctccatagcatgatgataaattgaacacatcacagggtatatgactaaatccatgttgtaaacctcttgagtacagagagggattttcttcaacgcatctggtagaaagctagctgtgtaaaacaaaggtagtgaattgtcccttagatata

SEQ ID NO: 7736 - DNA, 1193 bp, Homo sapiens
cataactgaagcaggtgatgactggaaaagtcaggtaagaattggctgcaatttggttgttttctttaaggtttgttgtgggtgtggtatgttcatttctattgctctttttgatatttgatctacatttgatatttaggctactctaaggacatgtattttcaaacatcatttggatttgggtcacaatagccaagcatatgaagccttaacccaaattcctgattccagcaggtaatttcatggccttttttagagaagacaatttaccaactctgtttaacctactaagatagtttgccctcatattcctttctttccttctaggcaattagattgtttacggcagttggtggtagttctttgtgaacgctcacagctacaggatcttgtagagtttccctatgtgaatctgcataatgaggtaattttacttatccagtgatggctttcaacaagtatggtggttgccatgattgctactgacttagttatctgattgcttccccttccctaggttgtgggaataattgagtcacgtgctagagctgtggaccttatgactcacaattactatgaacttctgtatgcctttcacatctatcgccacaattaccgcaagggtgagcaatgtaaccagacagtatcttgcagacagccttattagtttaatcatgttttaccaaaatattgtgtgttggacttaggtaatttttaatatgtgtttaagtacaagattagcttaaaccttgtgaagattaccttgaagataggcccttgcttccattctagaactttctcaaggcgttgccactaaaatggcattctgtgtgcatcttctgtacaattataaaggaaattagcactgggcgcagtggcttacacctgtaatcctagcactttgggaggccaaggcaggtggatcacctgaggtcaggagttcgagaccagcctggccaacatggcgaaaccccttctctactaaaaatacaaaaattagccatatgtggtggtgggcacctgtaatcccagctactcaggaggctgaggcaggagaattgcttgaacagggtggggcggggggcggaggttacagtgagccaagatcacgccacttcactccatcctgggcgaaaagcaaaactccgtctcataaataaataaaggaaattagctttttcactagagacagc

SEQ ID NO: 7737 - DNA, 1178 bp, Homo sapiens
gccttgagggctggtcttatgactgacaagtgaagagcagtgccaccctctactccacattctcagaagcgtctctaggttccatactttaaggcaggctagcttccaaggcatactgacagacatccctgtgcagtcctgggggcacgagggtcccattccaccctggggcttcagggtcaggtgaggaaggtagatccctgaagttgggtccagaaaaggccactgggctagcctgtctctcgttctggtcactgacctcaggatccagcaggacgctgctagcttgcttggctcagctctgcgagtgctgggagcaataagcagtgctgaaaacgcgatgcatttcaacccaaagcactctgatccctttccaggctttgggagaatgttttttccagctcggttacttgctggcatgcataggtcaatatacaaggtgttctcagagaagccggagctgaatgttgacttttgtgctccctggggtgtgttctggggaggaagtgggttttcaggttgtggtgcgtgtaggatgtggtctgggatgattagtatcacacactgtggataaagttaacacgcattgtggagcttttttcctcttttgtacttttgggcgaaggtgcctcaaaagcagctttgtttatcaaggaggtgcccttgattctgtatgcatttttaacatctgaatagaagttagacgcacacataattgctttacttgatgcagtaaatacgtttcagccagataatccataagaccctagttcagatcctgactttgatccctcttagttgtgtgagctctcaccagtttacttgacctcactctctgagcgtcagattcctgagtgtaaaataggtacaaaaactcagattgttgtaaggtttcagtgagttgttgcgtgtaaagcatttagtatacagttcttgtcacaatgtttagtaatggcagctattatcttaactattagagcggcagtttggcgtggcactaataatgatgatggtgacagtttcactgagtgcttactacctcagctattcttccaagtactttgcatcacttagctcatttaaccctcacaataaagcgataaggtaggtgctgttctaatctctgttttacagatgctaaaactcggcagccaggtgtggtggctcatgcccgtaat

SEQ ID NO: 7738 - DNA, 1541 bp, Homo sapiens
accactgcccccctcccacccaacccccccccccaccaccacagctctctgcctttccgttctgtgtggggtggctcttaagaagtggaaagtgatcatcttgttcccttagtttaggatggagggaggtggggcggggattgtgatgggactaggttaggggaagaggaggatagtgtcatcattgtgtctttaaaacacccaggcttttgtggttgtgttaccgtaatctggccagtgttgactttaacccgagttcaggggttagccgtgatgccatacaggtgagcctcattgtatgcaacagaaagcgtggctcctaacagaaagcacggctcctcaaaaagccgaacgaaaacagttgctttagagaggagttcgaggggcttgtttgaattttatgctttcgggcagccttttctaaaatgtgtcctaaagaataccagtctgtgaatatgtttggaaaatgctgggtactctgtggccgtacagaagacttagtctgtatattagcatatattagtaccttaaagacaagtaatgcagtattttccaagctaatttggctaatgtccaagaacctagtgttctgagcagggaaattctgatgtagggaaattctacactatgggcactttctctttttttttttgaaacggagtcttggtctatcgcccaggctcccagcctgaagtgcagtggtgcgatcttggctcactgcaacctctgccttctgggttcaagcgattctcctgcctcagcctcctgagtagctgggaatacaggcgcacatcaccacgcccggctaatttttgtatttttagcagagatggggtttcaccatgttggccaggctggtcttgaactccagacagacctcaggtgatccacccacctcggcctcccaaagtgctgggattacaggcatgagccaccatgcctggcccactatgggcactttctctttaaagaaaattttggaggttccctttgtaacgagaagtccttgagaatagctcagaggggtctggctctgggtccatctgccaggcttgcgttctgattctgtcaccacctctgtgaccttgggcaagtttgttctcttctgcgggcctccgattcctcgtctgtaagttgggagtaacttactcccagtactcatggggttttgttaattgttcctcacaaaaactagggaaactgagacccagagaggcagtgtgacttgcaccggttcccacggctggtggctgtgggttcttcttgtctccctgggcccaagccgtgcagtcttctctgggcaccctccctgtctctctggggtcaaggtcagctgctatttctctagacacatctttccagcttcacccctccctcatttcaggtctcagaacactgggatattcacgttttgtagttccagcgccatgtttgcctctggagcagtggtggagggtggggtgggataccgtcttggtcctcagggtactctaaagtttagaccaggtgaagggtgtagatgcgacaagatgaggcacatc

SEQ ID NO: 7739 - DNA, 1172 bp, Homo sapiens
ggcctgggagcagggcctgctgcttggctaccaatatgtgcttttgcaggcctttgcccagaatgtgttgtcaaaggcggatgtaatccaggccacgggagatgccatctgcatcttccgggagctgcagtgtctgactcctcgtggtcgttatgacattcggatctaccccacctttctgcacctgcatggcaagacctttgactacaagatcccctacaccacagtactgcgtctgtttttgttaccccacaaggaccagcgccagatgttctttgtggtaagcagaaacccctatggccggataatcctggtttttgcctaagtgttaagtagatggatctcactggtgtgcagaattctacgttggttaattgcaagttgttgtagagtgtcaattagtactcttccttactagatcagcctggatcccccaatcaagcaaggccaaactcgctaccacttcctgatcctcctcttctccaaggacgaggacatttcgttgactctgaacatgaacgagtgagtgtctccctggactcgtttcctaccactgtccaggcaggagacaggtgtgccattagaaggcagtagtgttgtgacctcaccttgctttctttgtagggaagaagtggagaagcgctttgagggtcggctcaccaagaacatgtcaggatccctctatgagatggtcagccgggtcatgaaagcactggtaaaccgcaagatcacagtgccaggcaacttccaagggtgagagtgtgggcctgggatcctgccctgcctgggtatgggaaatgccgtgtctccttggtaaacccttcctgagatgggaatgcggcctcctagaggcctggatgggaccttgtgtcacaataggtgccagcgcctctgtcagaacagctcagtgaggtttacttagtcgaggacatgagcactcgtgtcgctgctgctagatacgccctttgcctctgctgaggttggcactaaccaggctccctgcaccctctgtcaggcactcaggggcccagtgcattacctgttcctacaaggcaagctcaggactgctctacccgctggagcggggcttcatctacgtccacaagccacctgtgcacatccgcttcgatgagatctcctttgtcaactttgctcgtggtaccactactact

SEQ ID NO: 7740 - DNA, 1161 bp, Homo sapiens
tctctgtcatggtccccaccccgtcacctcccctctccatttctggggcaggactaggggaggccatgggatgaatggggtttctgtttgccctcggggtacatgggaggggccttgggatcacacagatgtcctggctcccctcatgactaggtcatgggcgcccactgctgagtctgtcaaatggggtcacaaaagaggacattgcccatagtcagaacttgacaacaccagctctttcgcctgcaggtgaatgagactacgctgaaaatcgcggctttgaccaacccagtgtaccccagcgaccagaccacagcggagaagcagtccaccgattcgggggccttctccataggccactagggcctctttccagggccccacactcacaaaggctccaggcctccccacagaggaccctgcctgagcaaggggcatgggagggaagaggggctctcatttctgctgctcattccatgagcatagctgggacccaagtgtctgggcctccgactgctccagcagacaggcagtgctccctgctgagaccccaatctcaccttcactccttgcctggccccatctgcttcctaggacccctggggcaggagcacctgagccatccccttcccaaagagtagagattataatgtaggacagatggccacaagggcctaccaagtgccaggcactttcacacacgttatctcatttaatccttagaataatcctatgaggtagatattagtttcccttgttttgaagataaaccaaggctcagagagactgagtcatttgccccaggccagatagccaggatgtgagagagctgggatttgaacgtccgtctgactaactccatcgcccacaccccatgagagaagaatgaactcccagggtccatcagccctgctgcttcagccgcctccaccctgacggtgattcggttaataaagagtaagccccatgcctttcccagcaacaaagtttgcattttagggagactggttagacagtggtgagggaccccatctctgacttgggtgcatcccaaatttagaaggaaacagaaggcatggctgtcagtgaatttttcctcatcactccccatagctctctccccaaaccagggaaggggtcattcttgttcttctctgggac

SEQ ID NO: 7741 - DNA, 1129 bp, Homo sapiens
tgtttctttatctgtgaaatgggcttgatattcctcctctaccccaaccgatagtgcagaatgaaaagtaactgaaagtccttcctccagggcaccatagtgtctgggtgaaaagtagaatataaactcggtagacttctggtcccttcattggtcatggaatggaccagtgcttgcttcattgagcaacagttctgttgttcagaattcctggatttcacctcacttctgctctccctgcaggtgaatgtgatgttcatgcttgccattcttctgacattcttccacccctttctggtatatcgggaatgccgtacttggaaagaaagtccctctgcaattgcatagttcagaagccctcacttttcagccccgaggatggttttgttcatcttccaccacctttgaggacctcgtgtcccaaaagactttgcctatcccagcaaaacacacacacacacacacacacacacaaaataaagacacacaaggacgtctgcgcagcaagaaaagaatctcagttgccaagcagattgatatcacacagactcaaagcaaaggcatgtggaacttctttatttcaaaacagaagtgtctccttgcacttagccttggcagacccttgactccaggggagatgacctgggggaggaagtgtgtcaactatttctttaggcctgtttggctccgaagcctatatgtgcctggatcctctgccacgggttaaattttcaggtgaagagtgaggttgtcatggcctcagctatgcttcctggctctccctcaagagtgcagccttggctagagaactcacagctctgggaaaaagaggagcagacagggttccctgggcccagtctcagcccagccactgatgctggatgaccttggcctgaccctggtctggtctcagaatcacttttcccatctgtaaaattgagatgaattttggtgttgaaagttcttcctggagcagatgtcctagaaggttttaggaatagtgacagagtcaggccaccccaagggccatgggagccagctgacctgcttgaccgaaggatttctgacagactatctttggggatgttttcaagaagggatataagttatttactttgggcatttaaaa

SEQ ID NO: 7742 - DNA, 1135 bp, Homo sapiens
gtagccttgaacttgcccttcttcctgccagcttctaggggtctttcctggcgcgagagtccggacatgggcccgcggtgcttcagagcgcgctctgccccttgctgtcctctggggacctgggcagatgcggactttctccccagcagcccggccctgagcgccctggcctgggtgagagaacccggcagcctgctaggaagctgcagcgcgcagacaggaccttccttgtttccgatagtggctcagcgggagccccgtgccgcgtgcacctctggcactgctagtgcgcgcggagccagctccttggcaccggctgggaagcccagggctctatggggcctccatgaggggctcctcgcgggctggcccgagaggtctcgggtgccaccatgatgcaggacccttccctggggccactggggggcccttcacccagcgctctgtttctgtgcaggctcggggccagcatggcccccacgctgcaacaggcgtaccggaggcgctggtggatggcctgcacggctgtgctggagaacctcttcttctctgctgtactcctgggctggggctccctgttgatcattctgaagaacgagggcttctattccagcacgtgcccaggtatgcctgaaaatgggctgggtgggctggggggagggatggcaaaggggcaggtggaagccagaaaaggttaggtggccaggtggacagaaagcagggtcagcagttggacagcctcacttctcgacctcttcaaacttcagggggagattgggtggcactctgcccactgtttcatttatctaatccagtggtcactgaatgccaggtgtcctgctggtcatccagaccctgggactaataggcagagtcctaagcctctgacagcctcaggtctagagctctttgaaggagacgtgctgggagaggaatttcttaatagggctatcataagacaagggagagctgcacaaagtggagtatgaatataaagggccccacatccttcccttttcaggagctgggagcccccaggttttcaaattactcatttggacaaagttacatagcctcatttactctaggagggcattgtggagagtctctggtttccacttcaatcaccttgtgt

SEQ ID NO: 7743 - DNA, 1125 bp, Homo sapiens
gtctccgtgggcattgtgatccgtcccaggcagtggtaagtgacacatgacctctgaattcaatgtggccctgatgatggcgtcgccatttcagaggtgtagcctttgggctgggtcccggtcgcctctgttcagcgtatgatcccattcccagggccctggaggttcaggttcgtgggttagagagttctcctccggtcctcgatctcctgaatagaggtgacctccaggaactggggcatcagagatccggggctcgatttccaggctcgccatagacgtcctgtgcgaccttgggctaggcctcagtttccacatccgtgaaatggggtggttaagctcactgaggttagtggcccgtggtggtctggcgccctgtgagtcctctgtatcctctagccccaggggtaggagagtgaacggcggcggtgggtgctgatggtgatgtctgctcccaggattaggaggccagaaggagatcccttccacggtgctaggctgagatggatcctctcagggcccaacagctggctgcggagctggaggtggagatgatggccgatatgtacaacaggtaaagagaactatgtgctaccctgtcttggaaaataagtcttggtcacccttatcgaaggtgaatgacttatgacaaattccttcctgaatgtaggggagcctgaggcccatgcttaccctccccacacccaccttcaaggttgatcctaatgtagatgcagtaaagggtcactagaatgagttgggcatttagatggggatggaactggcaatgcaggagccaagcaggaagagaaactccaatccaggctctggttaggttccaagaaaagctgagtatttgcctcttgacaaatagcacatagccagcccatttagtagttaacattttaaaaccctttattctgtgtcaggcacttgttaatcttcaaaataatccagtgggttaattttattagtcccgtcttaaaatgaggaaattgatgattctagaggttaagtaacttccttagggtcggcagctggtcagtaacaatgccagaactagcacctcagtctgattctgcaactagtgctcataaccatttggcaaatttgggaacaaatcct

SEQ ID NO: 7744 - DNA, 1121 bp, Homo sapiens
tgggattacaggcgtgagccaccaggcctggccaatatttgcattttttctacagacggggtttcaccatgttgcccaggctggtcttgtacttctgagctcaggggatctgcccaactcagcgccccaaagtgctgaaattacaggcctaagccactgtgcctggcccattggatgatttttttttttttttttgagatggagtcttgctctgttgcccaggctagcatgcagtggcacaatctcgggtcactgcagcctctgccacctgggttcaagcgattctcctgccttggcctcccaaagagctgggattacaggcaccctccaccatgcccggctaattttttttttgtatgtttagtagagacagggtttcaccatgttggccaggctagtcttgaactcctgacctcaagtgatccagccacctcggcttcccaaagtgctgggattacaggcgtgagccaccatgcctggccccattggatgtttttgtaacagaagactgacttataattagatctgatatttaatttgtgttctaggcacagcagctacacagaagagatgggagaagaggctaatgatgacaagaagccaaccactaaatttgaactagagcgagaaacagaacttcgctttgaggtggaggcatctcagtcagttcagttggagttgttgactggcatggcagagatctttggcacagagctgacccgaaacaagaaattcacctttgatgctggtgccaaggtggctgttttcacttggcatggctgttctgtgcaactgagcggccgcactgaggtggcttatgtctccaaggacactcctatgttgctttacctcaacactcacacagccttggaacagatgcggaggcaagcggaaaaggaagaagagcgaggtccccgagtgatggtagtgggccccactgatgtgggcaagtctacagtgtgtcgccttctgctcaactacgcagtgcgtttgggccgccgtcccacttatgtggagctggatgtgggccagggttctgtgtccatccctggtaccatgggggccctctacatcgagcggcctgcagatgtcgaagagggtttctctatccaggcccctct

SEQ ID NO: 7745 - DNA, 1226 bp, Homo sapiens
gctgggactacaagtgtgcaccactacgcctggttggccttggcctttgaccaacctctggaaggtctcccttgcagatttatagagcaaaataaactggatttaattttgaactaattggtgaccatgatcaaaacttagctgccatttgtttctcttcttgacagaagtaatttaatgctatggtccagggatgcctctcatctgtctctctttgtccctaggaatttgatcatcactgcccctgggtgaataactgtattggtcgccggaactaccgttattttttccttttcctcctttccctgacagcccacattatgggtgtgtttggctttggcctcctttatgtcctctaccacatagaggaactctcaggggtccgcacggctgtcacgtatccttcaaggccttttagattgtgggattggaagggggaggaatgagggctaaagggaaaatggctgcagtaggggccggggaaagtgaggtcatgttgctctgttctccttgattgtttggcatcagaatggcagtaatgtgtgtggctggcttattcttcatccctgtagctggcctcacgggatttcacgtggttctggtggccaggggacgcacaaccaatgaacaggtatggagaaaagtgacgagagacccctgaagagcaggtcatgtctctttagccttctgattagtgtgcagtgtagtgcttccacaaagagatgcttaatgaatacttttcatgattatgtagagattaatggtagggagtgaggtagtcctagttcctcatgtaagtgtagaggccatgtaagaatagaggccatttctcacatatacaccatggaatactatgcagccataaaaaaggatgagttcttgtcctttgtagggacatggatgaatctggaaaccatcattctgcgcaaactgtcgcaaggacagaaaaccaaacaccgcatgttctcactcataggtgggaactgaacaatgagaacacttggtcacggggtggggaacataacaccctggggcctgttgtggggcagggggagcggggagggatagcattaggagatatacctaatgtaagtgacgagttaatgggtgcagcacaccaacatggcacatgtatacatatgtaacaaacctgcatgttgtgcatatgtaccctagagctgtaagtataataataataaagatactctcaaagagatactaagaca

SEQ ID NO: 7746 - DNA, 1529 bp, Homo sapiens
aaaccaccgattccaagaggatgaggagtgttttctaaaatgcagtaggcttggggagtcggagagttggggccctgagactggggtagcaacccccccttttatcttttaagaccttcccttccttgatccctggaccagactcagtggacatttgtgcaattgctcgccctggagggaaccagatcatttttaaaccagaaataattttttttattattgttacggattctatttttttcctcttctgcgttaccaggtgtgtgtgtacatataatatatatatatatatattataaatatcaaagaaattatatatctatcctgggatgggaaaatgagggagggatacatatacggagggggatcttactcttcccattcctcagaccagcaggaaaagaggggagacgtcagtctttttcctgtggttccctctcatttgtcccagttactaactacggaaatagcatcctctgctggtgctaagtgtgattaggaagaagcctggggagaggtgagtctggaattttggtcacaagagggaaggacttggagaggagaattagttttctaggctcattggcatttagtttccctaggaaaggggtcaaaacttcaagacactggtggtggtgggagatcaggaaaataacttggcctagctcaaacaatattggataatcccctccttgggggagagggattagagtgtgctcctactggccccttggagcctcccctagcttacacagttaacttgattttaaaatccaaggccaggagagaagaatccaaaaagcaatatttttcatcacatgccaaaaacgggggatagagagaaggagtggcaggcctaggcccctccgattgtcccttgggggttacccctcagcccacctcactatggtgctgggtagaggggatacctgggttctaacctctaaataggggagatcccagcctccacaaagaggcccttttattttttattctgattagccattttaaaccaacgaggaataaaaagaaatcctgatctaaccagcgccccctgacttgtgttattttgtctggttgagacagggtgaacgatctctggtgggaagttatcagtgacaacctcataaacttctctggtcccagcccatctttaggcaagactataatgaaattagccacttaacaactaaaaaaataaaaaagagacccagtgcggtggcttatacctgtaatcccagcactgagggaggctgaggcaagaggatcacttgagcccaggagttccagaccaacctgggcaacatagagactccatttctaaaaacaacaggtcctgtttttatttgggtgatttaattcaaaaattcctgaaaaaaggtctcttgaaatcaccaaaactgcttgttatttgaaagcttagagaactcttaaaagttgtttctttcaagagacagggcctcattctggttgcccaggctggagggcagtggcacaatcagatcactatatcctcaaattcctgggct

SEQ ID NO: 7747 - DNA, 1215 bp, Homo sapiens
ggatggaaagaaagatagatggtaggctttaaggcattcctaggtaaagtgacctagggatataaagatttgtttcttttggagtggtatagaatttaattgttcatggctgggcgcggtgggtcacgcttgtaatcccagccctgtgggaggctgaggtgggcggatcacgaggtcaggagtttgagaccagtctgggcaacatagtgaaaccccgtctctactaaaaatacaaaaaattagccaggtgtggtggtgtgtgcctgtaataccagctactcgggaggctgaggcaggagaattgcgtgaacctgggaggcagaggttgcaggtgagccgagatcacgccattgcactccagccagggcaacagtgcaagactccatctcaaaaaaaaaaaaagaatttaattgctcacttccttaattagtttttctttttcttgtttcctacttgcaggtcaagaaagtagtgaagactgtgacaacacggacagtacagccagtcgctatgggaccagacgggttgcctgtggatgcttcatcagtttctaacaactatatccagactttgggtcgtgatttccgcaagaatggcaatgggggacctggtccctatgtggggcaagctggcactgctacccttcctaggaacttccactaccctcctgatggttatagtcgccactatgaagatggttatccaggtggcagtgataactatggcagtctgtcccgggtgacccgcattgaggagcggtataggcccagcatggaaggctaccgggcacctagtagacaggatgtgtatgggccccaaccccaggttcgggtaggtgggagcagcgtggatctgcatcgctttcatccagagccttatgggctagaggatgaccagcgtagtatgggctatgatgacctggattatggtatgatgtctgattatggcactgcccgtcggactgggacaccctctgaccctcgtcggcgcctcaggtaggcaagaataggggaagagaaaagggtctttccaagaccagggacaaggggtagcttttccttcaacttctaggggctttttgggatcagagatactcgtggcctcctcccctctgcttttttttggggtgaaaagctaccctgtttttcccttttctgacttggcttagtattgacttgctatatatatataatataaatatatatataatttttt

SEQ ID NO: 7748 - DNA, 1215 bp, Homo sapiens; identical to SEQ ID NO: 7747

SEQ ID NO: 7749 - DNA, 1827 bp, Homo sapiens
gctgccttctttccatcaactcccaacttcttcctgtgaagtttaattgtctcaacgcctccccctcccccattccctccatttttctcccaagaaacctgactcaattatttgcatattttgagaaactgctgcagattagttctttttgccagttttccctggaactcctggccttttgtggaggggagggatggagagaataggaatcttcactagaagccgtgggaagaattggaagttacatgctgtatatgcaatgtccagcagtctgataaactgacgattcttaatcaagatttttttcctgatggggaagggacttttattttcttttagagaggggaaagtgtgagctcttcccttattcctaatggctatttttgaagcaaagaaggccagcaacattggcacatgccacctggcaaaggacccttgagtaagtgaaggtctcctaaaactgggattaagaaaccttgctctcctcatctccaaggcagggaccatcaagaacctacagactccatctcttctgcaagcctcatgccaaccctgggctattgctgctgccccttaaacacaggctgtccttaacccacctctcctgccctgtgatatgtctgctgagttggcctggccatttccaagaggctgtagaaaggggagaatgtcaaggaagacttttggtagagaaggagcagaaagatgtgtttttgggaagaagaagacctctaggaggagctagtaggaatgtacatgaagcaattagtctgaaactggcttccccactcccccgtttctccttttcctatccttataggcctgtcccttgcctctgccctggattggttggcaaactaaaggacttgatgtacataactcctgtcccttttcccttacaaggtggggattgcccctggctttgcctcttctttgtgcctttggcctggggtgcatctcctcccgcccttccatgtgcctttctttgcctctgcagtctcatttctcataattttgcaaattatattttgttgctttcttacctactattggccctaaatagcagaaagaagagaagtgaccgagagaacctcagattcttcattgaggattggtatagccatgatttcagtcatagcaagcttttgctcaacagcatatgggtgggattttgcaaaaatcctattctgatgaatctcaaagtaaggctggtaagagaagtgagtggtgtgactcttactccttaggtgcccagaatttaccatcatctctgaaggagttacagggaagtggtctccccaattctcccctccctccagtattgccccctctcactttagcatatattaattagcaggttgggctagagaaatcagctgctatgcgggttgattattattattatttctaatccttttccttatttgccttctactccccttaatctaatctaaaagctctgttccatgcaactggagttccttatccctctcttccccttcccttatatattgaggctatggggtaggagaaaagtgcacaacccaccaccccctttactcgtgcattaaaatttcttatttacccttttcccccttcccatttcttcccactttcatctaccttttctggcaaaaaggagccttttgctctctgtgaccctaagagcacactgcacagggaaaattgccccatccagacctggctccactcttgatctctcttgtcctcttctgctcttttcctggtgctcttttttctcggtggggtgtgggtaatagaacagccgtgggcttttggggacctttaacttttttttctctcttt

SEQ ID NO: 7750 - DNA, 1827 bp, Homo sapiens; identical to SEQ ID NO: 7749

SEQ ID NO: 7751 - DNA, 1074 bp, Homo sapiens
taagttttgtattttttttggagagacggggtctcaccatgttgcccaggctcaggctggtcttgaactcctgggctcaagcaatcctcctgccttggcctcccaaaatgctggcatttcaagcgtgagccaccctgcctggcatagttaactttttttaataagtaggaggaatatactcaaaataataaaatatagtaaatacataaaccaataacataatcattcattattatcaagtattatgtactgtacataattgtatgtgctatacttttatatggctgacagtgccgtaggtttgtttacaccagtatcaccacaaatacatgagtaatgcattgtgttatgatactacaaccgttatgatgccactagtgatgggaaactacttcatacagatgctagggcctaaggctattcctgtctttgaggagctctgatcccagggatgaaggcagtaaattcattaatgaggtaagcattactataatgatttctttttaacatttagaagatggttgacttctgccaggaaggagggcaaggcttcactgaggtgacattttggttcgtttgaaaggataattaggattccatcagttggagaaggtgtgaagtcattcaagtcagatagaataatgtgcaaaagtacagaggtataaaaagaatgctgttcattaggtgtccacataggcaagaggaagtttctctttatagaaacatttcatctcataattgaaggtgtgattgaaatataatattatcattttgcaatccctaataaagggatcttaggcattgagcatcaacagctgctaacatcacaaaaagagatctgtatcacctatgaagtagtttaaaaaaatatcaagcctgagtctgatcaaacttgtagatccaaatactattttataggaaacacagaagatgggggcaatgtttaactataccataaggatgtaactagcaacatgggaggaattacaaatgacccaatttctttaataaattaattgcaagaagaaaaaaagtggagacagacctatagattaaaaaatatcagtctcaatg

SEQ ID NO: 7752 - DNA, 1074 bp, Homo sapiens; identical to SEQ ID NO: 7751

SEQ ID NO: 7753 - DNA, 1666 bp, Homo sapiens
ctccctcaaatgtaatgtctcactgagccctgcgcctttaaaacacacggacacatactcatgcatcaagctgctaacagctaataaaaatgaactattaacattccagactctgctaggtgcctgtaatcctaacactttgggaagctgaggtgggaggatcgcttgagcccaggagtttgagaccagcctgggcaacacagtgaggccccatctctacaaaaaacccaaaaattagccgggtgtgggatcacgtgcctgtagtcccagctactcaggaggctgagggagaaggatcatttgaacatggaaggttgaggctgcagtgagctatgatcatgccactgcactccagcctgggtgacaaagtgagaccttgtctaaaaataaaaataacatttagatcttgtctaaaaataaaaaacattccagacttggtgaaaatcatttaggtacatctttatgtgtctctatccctctggctttcagtctacaatgtcctggtgggcgggacgcatgtttcttaaccttgcctttgcccctctgacttgatgcttgagtgaagcctctttagttcttactttttgtgctcattaagatcttagccttcttgaattatggaactccttgagaatctgatgattgttacggacctgctccagagaaatgcacacacatagtattttgcctacaatttgagagtctcttgaattttaaagccgttgcaatttaaatgcatcaggaagacttgacagcagagagtttcttgataaaaatgcagtattcctttattgctgcttgtttggttggtttaaaaatatgcgatatttcttgtcctaccctagcatttctggtgccagtatcaccaatttaaacaatctccctggtaattctaaagttcactaagatttgagaagttctgccctaaagactcagcttgtcttcatagtctatctcatcttctgctcccagccacttaactcctgctacaggggttcaaactctggagtcctggttgttatctaaagggaacaactgccttcctgtagggctaaagtgaagccccttcatggagaagcactagagtctgacagtgggcccaggtcttcttcattttcaggtatagttctgaattcagaaagccaagtcatgtcccagagagctgcacttctctccttctttctgtccatctctcatcaattatttctgtactcaccttcccccacttcagactggaactttccctcttctggagttgttgctttccaccatacaagatgtcttgtgcttctgcatgttggcatccaggtgtattattattcctgtgtggtagccagcggtgcagacttagaatgccttgtaagtgcctctaagtaggatatagtaaaaaggtttgcagagttaagcttacatcccagcaggtccaggtacttctttgaggtacaaaactgatgacagggctgggcgcagtggctcacgcctacaattccagcactttgggaggccgaggtgagcagattacttgaagttaggagtttgagaccagcctggccaacatggtgaaatcccatctttactaaaaatacaaaaattagctgggtgtggtggtgcatgcttgtatttccagctacttgggaggctgaggcagaagaatggctcaggaggt

SEQ ID NO: 7754 - DNA, 1666 bp, Homo sapiens; identical to SEQ ID NO: 7753

SEQ ID NO: 7755 - DNA, 2458 bp, Homo sapiens
tcaaaagaagtatgttactgattattgtgtgtgtgtgtgtgtgtgtgtgtgtgtatgtatatatatgctctaaactctaaccctgatcctgaataagagcactctttatttctctgttggatcagccatttccttttctcctctccttagatgtgagatctgtggatttacttgtcgacaaaaggcatctcttaattggcacatgaagaaacatgatgcagactccttctaccagttttcttgcaatatctgtggcaaaaaatttgagaagaaggacagcgtagtggcacacaaggcaaaaagccaccctgaggtgctgattgcagaagctctggctgccaatgcaggcgccctcatcaccagcacagatatcttgggcactaacccagagtccctgacgcagccttcagatggtcagggtcttcctcttcttcctgagcccttgggaaactcaacctctggagagtgcctactgttagaagctgaagggatgtcaaagtcatactgcagtgggacggaacgggtgagcctgatggctgatgggaagatctttgtgggaagcggcagcagtggaggcactgaagggctggttatgaactcagatatactcggtgctaccacagaggttctgattgaagattcagactctgccggaccttagtggacaggaagacttggggcatgggacagctcagactttgtatttaaaagttaaaaaggacaaaaaaaaaatctaaagcatttaaaatctagtgaaataactgaagggcctgctctttccattgtggatcacagcacacacatacatacaccctccacctccccatcccctgttctccctctgttgctccccttataaaattgatgttgtctttaccagaaaggtagacaaaaaagaagcagcagcagctcttaaagtgagggttattctcatactcggttccagccatcagcagacttcctgctcatcggcagatccccctttccaacctgtaactctgatgtgctctggatcagcttttaacttttaatcatatattactgtcttctaaatcccttctcctcctctactgctgccctatggttctggctcctaccccctgcggcacacttatcttcaaataccatagaattctaatctctggaggctggcagcttgacttggcactttagggccccttagcagggtgagctgttaaaacagcacacatctctcatcccctcttcctttattcccccctgggtttcagaaaggaaggatatatggggaccacctcccccttctttgatcccagcatctcagtccccctcccaaccctccatatggctctcaatggtgctcacttgcttggaagcaggctcccaatagggagggggctgccctctacagtctctttgactgtaagacagggctctgtatcagtgagacgatgagaaaagtcccaggctaatggcagaaatttgcactttgaacatgtgtgtttttgtgttgtggaacctgagattccttatttattaacaggaagtctgattttttttttttggagtctttgttgctatattttgtggggctgggagagagagattagattattttgacatgggatcccttccataacaggtactttgaaggcaagacatagggttgaagaagcacagccagcctctgaaatcatagctctccagtggcttttaaagaaagctggtcctcagcactaacaaaatcactacaatagcctagtgcttttttggaagcctttttagggaagaatgttaggttcatggtaactagtatgctctttgagatttttacagtgttgaaacttaagaattttgagagggtgaggagggttgttcagaatctaaattacagatagatgattgtttcttgtgaatttgtttcttttcctttttttttgtccctaccatttccttacatttcccttggggcccatctctggctccttgctttttgtttcttgctttgctttatcagttcattccagctccctgttagtgaaggacactgctgttagtgaaggaacaaagtctatgagtcctaaaattttaagtcaaagaaaactgctctgtttcccctttagtaacacttctgaagaggaaaaacttcaatagccaaagttaataatcctatataataattgctttggctttcacctaaaattctgggcatcacaatttccttgggatagaggttgtgttggggaatagattgcttattgctgttcactggagagaaaaggtagtgtttttgtacaaggtcataccgccagaagccccaaatcctattttggctcatcttcaggtaaagagtaattcctatcctgtgtgcctcagaagctagaatcgaaggcttaccctattcattgtttattgtcagaaatgcatgatggctcttggaaagaatgacgttttgctggaaaaaaaaaaaagaacagtt

SEQ ID NO: 7756 - DNA, 2458 bp, Homo sapiens; identical to SEQ ID NO: 7755

SEQ ID NO: 7757 - DNA, 1198 bp, Homo sapiens
tttaggctgagaactgatttatctttgtacagcctcaccagacagaaatcagactctttgggagtgctcaatggggagagggaagttagagaaattctacaatggctatattccaagttttcctagttgtggccagtgtcttttacaagtatgtttaaaaatactttaatatgattaaaatattccagttaatgagagagtttgaagtgagaaggaaaaattcttctaaatcagttttcaacctttagaactcaataaaatctgaacattcttctaagaaaaatccataggtagtcaatttcaggcagtattgggtctttctaaagtccagtcatagagcccaaattaagagttcctactgtagacatattatttactttacaacttggatccttggccagagagatgagtgagattttgtatgaaatttaggggtgatttaaggacactggggtgatgacagaagatgtggtgttttcctgtatcctcggccaggtgaagcatcagggcctgaacaagaacatcaacctggactctgcggatgggatgccagtggcaagcactgatcagtggagtgagctgaccgaggcagagcgactccaagagaaccttcaagcttatcgtaccttccatgttttgttggccaggctcttagaagaccagcaggtgcattttaccccaaccgaaggtgacttccatcaagctatacatacccttcttctccaagtcgctgcctttgcataccagatagaggagttaatgatactcctggaatacaagatcccccgcaatgaggctgatgggatgcctattaatgttggagatggtggtctctttgagaagaagctgtggggcctaaaggtgctgcaggagctttcacagtggacagtaaggtccatccatgaccttcgtttcatttcttctcatcagactgggatcccagcacgtgggagccattatattgctaacaacaagaaaatgtagcagttagtcccttctctcttccttgctttctcttctaatggaatatgcgtagttccctggggcctcgctttcccatcttaaatttctaaaaacagttaagacaacaggcattttctttcttttttctctgaccacctgcagcctgttgaaggactacaggtattttcatcaagtagcgttggagacatacacaaatgggcatacaagtttagcc

SEQ ID NO: 7758 - DNA, 1198 bp, Homo sapiens; identical to SEQ ID NO: 7757

SEQ ID NO: 7759 - DNA, 1203 bp, Homo sapiens
gcccggcaaggcggggagcattcctctgccctttgtcttgtgccaacctggaaaggtgcagtctagatttcagtgagaaccctgccagctgagccctgtgcatctactaccttgacacagagtgttttcccactagaagctctgctctgctctcctggcccaagtaggggattccatgccttccctttcatggtcttagcaccagcagcctagtttctcccttccagagtctccagggatgacaaattggattggagacaaacctcgtcagatgctcatcccctaaaaggttaattgtgtatttgtggctgcgtgtgcctttgtgttttcattctcttcccatttttgtacattttggtcttctctgtggttttatacttggtcaaaagtactcgtcttggtattgcactgttgtgtgcatgagaaaactgggggaaggctcactggtacaagaaaggacccctgacccctttccttctctgtggtccccggcattagattgggggttctgggagaggcaggtgaatgtcctaagtgaattgttctgtttgtaactggaatgtttttgaagtctttggtgttgctccgtgaaaggacatcgccacctggtgctcatgaggtgtctttgcagaacaataaatggcaaatgaacaaccacaaaattgttactcttgttggccttctgctgtttgtagattagtgcacctatctgtgagggatttgggttacctccctgagtctgtaagcaaccacaagccctgccactgggtgggggaagtccctccccaaccacttaaaaacaaattttccacatattacccacccacacatttgacctggctagactttgtttgcctaaaggaacagaccacattgctgggaaaatgagtaagtgaacgtgtgggagaaaaacacttttagaatcacgaatattcacttttaaaggtctctttgcctggctgcaatatagtgtgtgtttaaattatttacaggctgttgtttctcaaataaatgtttaatattaatcattcccaaactgacaagaacacaaaaataaaatgcaaatacagagccagctttgtcacccaaatctgtgtctatttctgatagtccatggaatgtggttttcttggaagccagggttggtctccccacagaccccaggctaaggtcaccagttaggaacccaggacttggaaggca

SEQ ID NO: 7760 - DNA, 1464 bp, Homo sapiens
aggacagaggatgtgtgggaaagctggaagttgtgactctcttaccaagtgctttcctcaagtttgtctctcttgaccaatcattttttccaaatcaatcaccagaaggagacaccagtggtggtgattggctggttgccttagctgattgaaactgaaatcgacataggagatactatgtctgtaagggagaggtttagtggccgaaggttagtgttattccacatccacgaagtcaagtattcttggctcttctttctccctctgcccccatttaagacaatgtcactcaccctccccttgtagtatcctgctcagccaagatctgcctaagattatgattcaggggcattttggtgctgttaaaagcaagagccgaatttagaagttcccttaaaaagaaacacataagacttaccaatggaggcattgtgaatggttgcagtggagcttaggtataacatcatcaagtgtgttcacacgcggggtcggtttaatggagtgtccacgcggagataactgcgatattggaacacctgtgagagagattgttctatagggctggaatattcagagttacattcttggaagtttctgtttttacttgcatcaaacacccctctgttgttctccatcatctttaatagcaactggagaccactttggtcattggtaagggggtgcattctcctcacaaaggggttttatggacttcctcaggcggagagcttctgagaacacaggcaggatggaaaaagactactagccacttttgctttcccaaccccccttaatgccatccttcattgtctttctggcttctcttcttctggcacagtaccattttgggtctgtgccccagtgtggagcaaaacattgcctgtcccattctgatatacttcagaatttgagagcagaagttaatgtggaacaaaagttttcaccatctctcaagccccaaggactggagccacctctggaataatgtgttaaatatctgtatattatatatatgtagagaaaaatctaattttttggtttgatttccttcccattaagaatcttgttttttgatacccttgtctccctgagactctttcttggacacgtgttgatgtggatggcactcctgctctccatcttttatgggcagagagatttcaaaacctgagcaggatcatgtctggcagttactaaacagggactttgtccatggtttgtatcatggggtgcctactgctgtctaaactctgctctcctaattagctgactcttgaaaatgaaatcctaacctctttcctgcctcttttctttctcttttcaggaagagtgtgggtagaaagtccggagggcaacttccaatttaattctgctctgtccggcgcataggctgaattccaaaagaactttcttcctaggatgtggggcttaaagcaccgtcatgtggggtggatcagataattg

SEQ ID NO: 7761 - DNA, 1100 bp, Homo sapiens
acagggtttcaccatgttagccaggccggtctggaactcctgacctcaggtgatctgcccaccttggcctcccaaagtgctgggattacgggtgcccggcctgtaaagcctatttctaaaaggaaaatggtaagagggacagcaaagcaaaaaaaaaaaaaaaaaatctgactcagaaacaacacttataggctctgaagggaaatccccactaattgtttcgtgaattttagggacccgtttgagggactagaacttgctgattcctaagactgtcatattttcagggagctcagagttatgaaaagaaatggaatgtgataaaggataaaccgtcaactttctgtttaaattgtctttgtcttgttattacagatcaaaggcagaaatgagacatacctgccgtggtaccatcaacctcgccacagccaacatcaccgtggaggactcctgcaacttcatcatttccaatgggggtgctcagacctaccatctgaaagctagttcagaagttgagcggcagcgctgggtgacggccctggaactggccaaggccaaagctgtgaagatgctggcagagtcaggtcaggaacaaagaacacctgcctggggaactttctttttgccccttttatgcacagattttgtttgtcatcattatgctgtgtcatttgattatcacctatttcctagaggtctcaagcttctcgtcttcatgcagtatttctgctggagtgatggttctcaaccagggttgattctcctccccaggggacatttggcaatgtctggagacatttttggttgtcacagctgaagggagggaggtgctatggcatctagagagtagaggcctgggatgctgctgaacctcctataatataccaaacagccgccaaaacaaagaattatctggccaaggttgaaaaattctgtcctagaggcgtaacagttgttcttttgccttttaattggctaccttaaaattttgagaaataattattttattggtgggccagtcttgggaatattattcctcagaatttggatctattcgtgctttttctcctgataccttcttacttaactctttgttagtt

SEQ ID NO: 7762 - DNA, 1162 bp, Homo sapiens
acagggccttcataaaagatgaccaaatgctaagggtagagaaataatctcgggtattttgttatgagaagtcttacaaagatgtaactgtaatatgaaagattgccttctgttttaactcatttatacaattttcctttctctcctttgtactcctaggctagttcaggggatacgataaaagatctccaaatgtgtcctgtacctccttttggctgccacctgcactgctgccatcaccaatggagtgtttttaatgagggaaggaaggtagctttttccccaaagcaaagtcttgtgggatcgattcctgtttacaggggttgtctctctaaatgtcagatatttccccactgctctatgaaatttggctgggtgatacttctgctggtttctttaccttctgtgttacagttctgcatgtcctacttttactcagttctgttttgcattttctttgccctagagacacaagtgtaatctctccctttatccctccactactccacctcagagtagattgtagcctgccaaaggattccttccctcatcctattgaagttgttttttcattgccccatattaatatgactatagaagagccaattaagtagaaatcaagatatacacacacacatagatacacacacacacaccccatacatgtatttatgtggtcttcagagggtccttaaagaatgaattttagattgaaaaatatttagttgtctcattacctcttctaaacacaaaccagctgatgtattttaatctgtttctgttctatcttgtaattaatttggtgggttctacttgttttaacataaataaagagtatgcagcacgtttaataaaatcagaactcttaattggcttatgcccaggtctaggctgagaagtcctttttcttcttcccacctttatttccttagtttctgtccaccttaatcgaaacaacacatggttatgtctttttcctgctacaactacagggtacttgagcctttcccctcaagtgcattcgaagtcacccaggatgatcctcactagtagcctgctttggcagtgtggctttttgcacacttgccctgtcttcctgagactacttcagtaagccatgcttccttcttccccacttttatttggtgtcatgaatagaaac

SEQ ID NO: 7763 - DNA, 1765 bp, Homo sapiens
tttccttgcaaccacccttggacctgactcagctaacaatctagccctgggggaatgtgatctacctgatgcgaccctgagttctccccagagcctcctcctgccccaccagctctcaagtaccttttctcctggactgtgtggacccacccagctttcttcctccctgttgtgtgtcagattatgccttgcacttgggaaagctcttgtgagactctcccaaggtgctgtatttttctacctcatggagtattctcccagaaactgcaatgtatttttttaggggagtatctttaacaaagcagaatgattcttctaagtttggcaacaagaaggcttggatctgagtcttctacctggcaggatgccaatcctgtttgttgtccgtatgtcctgaaaacatgagggactggcagatgtcattttggtctaaagagctgacttgtttgaaattcagccttaaattaagctcttagttgttcagcttggggggcaactttgatttttctctgtgttgtagtctctcatatttactcaaggagggaccaggatgatacagtcatctgaggttatgctttgcaaaaggctgacggtatggaatatgtttccatgtctgagtcttagaaactggctgctcattgttagaaagtgatgctttgtgagactattgtcttggggccaaaaataatcagggattttaaattgggcaagggacaaggtgctagaatcctaagctctggaaatatttcatgacactggtgtattcactcatgtgttccagatgtattctaattgtgtatgaaatgtatgtacacataagtgtgtgtgtctcaggaagtaggaaataaaaatggaagctattatgacctcaaaaaaaaaaagccaactttgagctaggataaaaattgggtaaaggacatttgcttacctgcaaatgaatcactgtggaaatgtgatcttcccatatcatcaagaaacttgttttctggatgaatactgggagaataaaatgagaactctggagtgagctaaattgatcccaattaagtttttctgcttagcagacagaaggtataattttttgacaccctttcccacctggtgcctatgctaggcttgtcctgagaacatccctcagtaacttgatattcacatgacctacaggatgtcccatctgcagggctgagtcagttggggaacaccagaggctacacagtagctcttcctgctactcggttaatgagcttggcaggttctttgtctcactgaattcttatcatggaaacagcagcagcagccgctaggaaatcttcaagtgtagtgtctgtgctaacccagtggtaaatcccttagatcccctgctggtctctggcagtctccttgattttgggtaccatgtatattttccgctttgactttaacgctttctaggatagggtaagcacccttaattcaggcactgtccattagcttcctttgcaaaggctacttatggccggtcacaatccagcactcagacagagccaaggcaatatcctcttgcccatggctatgatgtcagacagtggatgggctccagcaacaagagacaaaataactaaaggcctttgctctcctctgacattgaggcctggggcttacagtttggaatacaacatgtgaaggtttttgttgttgtttgtattttttagatgtaaacttgattattttattgctaatttaaaaataaaaatgactttgtattgattgtgaaacggttctggct

SEQ ID NO: 7764 - DNA, 1212 bp, Homo sapiens
tcctgttgagttaggtgtgctatgatatctgccccttcacagccatactgcacatgcaggctgtgtcacttcctaaagaggcgcccactctgcttgcttctctaccctgcagtcctcctttaaaccatctgcctaatcagctatgtatctgtactccctgtccctgtcctccgcccaattctgtatacgtttattctttgcataattcttaataagtagttgattggtgccctgtttcttaagaagtttcataatggaaagaggagaagctgatgaggagtctgcgtggagaagtgatggtaccacagaagtggaaggaggattagaaatgccagtcgatcaatctgtgagggctgtgggagataacagaaaaatggaggaaaaaaatcatagattatatagcatggtgttcgtggctgggatcaccaaatccctcttacccggggtaaaggactacatacaaggctgtgttaactttcattaaccttgaaagggaagaaatttaatttgaatttactgtgtggccggccctcttccaaaaagttcaagatgcacctaatgcaagaactaattcttgttctttttgtcacttccagataccaaggctcaaactgtttagcaggaatcactatccttcacctgtacaaagcattctgccacaccaggttataggacagattgccaccttctgtctcccccctcctcccacagactacctactaacagttcattcttcactcacttttctgtctctgaaacatccctttctttagttttctctaaccattattagcacctaatcccacccagattaaggcacctagagtgcccccaagacacaaaggtttcaagtcagtgaaagaaggtctgaccctccccacagatggctcacctttttcaggcaaatatgctcccaatggtggaagctaagatgatcgcaaggataatacagcagatcatgatcatgatcttcttctgctcatccagacaaggaaagaaagaatacatgagaaacatcatcgcaaaaagtattctgcagggagataagtgcatgtggacatggaagagggtgtgaaggaagagagcaacagaaggaaaaaggagatggatctggcttctaggacccagaatgccaacagaaatgttatttttggtgagacattcaagttagattaaaaggatgtttggtatggtcattccaccttctagata

SEQ ID NO: 7765 - DNA, 1523 bp, Homo sapiens
ttcaggctcctctaggtcacacctttgaccaccctacatctgtttcctctttcaggctccagtagtagtcttaaaagtgaagtttatctaaggataagcacatgcctatcttgctcactgctgtgtccccactttttagcacagcgcctgctgcttacaggtactcaaatatctgctgacttaattacttataattaagctcttatttcagtcatggacaaatccttgggtttgactcctaaactctttaaggtaccaatgagaacgtggtttgttactgtcagaggctgtgtaaagccgcttgggaatgggctgatctgcttatgcaaaaatgctaccaacctttcaaaccccattaccacaacatgaaaatttaaagtgctttttctatgggtggtgatggtggagttctagcaacagcctcttaatctgtggagaagatggctggctccaggactgtggttcaataacgaaatacaggcccacaaaataaaataggtttatagcatgactgaactcacacatcagtagaacactctgtgaaccataacaaagaacagataaaggtgtcaagtgagaaaggtgaaatgaggttatcactcacttcacctctcacctgatttgtgttgctagctgaaactgctggccagtaacgtatgtataagaaactgttataggccgggcacggtggctcatgcctgtaatcacagcactttgggaggccaaggcaggtggatcaccagactgaccaacatagtgaaaccccctctctacaaaaaatacaaaaattagccaggcatggtggcttgcacctgtattcccagctacttgggaggctgaggcaggagaattgcttgaatgcaagaggcggaagttgcagtgagccgagatcgcgccactgcactccagcctgggcaacaagagctaaattccatctaaaaaaaaaaaaaaaacaaaaaaaaaaaactgttcttaatacttaatactgtccccaattccattcaaggttcagttgtgttcagctttaaaaccagctatgtgaatgtgagttctagtgcagattatttagtgattatgtaactaaaattgatgaaaaaatcacactatacaactgtgaggagcacacaactgctaagtttgtacttttgaaagtaaattattctttgtttgataccttattttttaagaaagtgggattaaaaatattttggtcagtgctgttttctacccaccttcaaaagccaatggtttgatatttctattaatttgtgcttcctttagttttaataggggatagaagactgcagctggttgggtctggaaaacattaatctgggcaaacggagctggagctatgaggatctgagtcctagggggccctcattcactagcagtaagaatttaagtggtgcatggcacatagcactgtactagattctgcaggggcacaaacatagagccaaacactctccctcttggagaatttcagacccagaaaaggccacgcagttctaacttttgtc

SEQ ID NO: 7766 - DNA, 1299 bp, Homo sapiens
tttattcttcgttgtatccccagcactgagagcagcacctggtacatagtaggtgctctagagttatgaattgaatgattgaatacatcctgcaggactgtctggcacagtgcctgacacaacgagggcgatcaataaatagcagcagcagcagtgttgttattctcttttagagaggggacggcatgacagctgggatttgccagtaagttagggaaggtggggatgggaaagagctggctcccactcctgtctgtgtgcccagtggttcgcttggggtaggagctcaagagtgtctgccggcacattcgtgtttgctcggatattgtttgggtcactgatactggtctaggctctgggataggaggcagcatcccctccccaagggctgactccactgggtactccctgcaccccccacctcaccttacaatgatatttgcttctcccaggatgcagtcatgctgcacagcttcactctgcgccagcagctgcagacaacccgccaagagctgtcacacgctctgtaccagcacgatgccgcctgccgtgtcattgcccgtctcaccaaggaagtcactgctgcccgagaaggtgcagcctctcccctgccatcccccaccctgggctggttctgcattgtaatatcccatttctaacatcgtcttttctctcagctctggctaccctgaaaccacaggctggcctcattgtgccccaggctgtgccaagttcccaaccaagtgttgtggtaagtgtcccccttcccttaccagcagcccatttgtgtacagtggcccacagaactgtccttatgcaggtgtctttggtgctctgtgcctctcaccctcacctttcttctcttcagggtgcgggtgagccaatggatttgggtgagctggtgggaatgaccccagagattattcagaaggtaagtcctgctctcacctggtgggagtgctgatgggcccttacttttcaccatctgtctggagtccatcgtgactaaaatcactgtgcttttgggagttgagtggtgcagagcatggaccctgggaccagattgcctgggtttgtattttgatgccactacttgtaagctttatgaccttggcttacttagccaacccttacgtgtctcatttccctagcttctaaactgagaatatgatcatatccactgtataggcaggctgtgggaatttaaaagatttcattactgataagtgcaccttttagctcttattgttattgagattctttgcagatagtaaactacttttatatattttcttgttt

SEQ ID NO: 7767 - DNA, 1421 bp, Homo sapiens
gcctgaagcttgtcatcttcctggccggcttcgtggccctgatgaggtcggtgcctgacccttccacccgggccctgctactcctggccttgctgatcctctacgccctgctgagccggctcactggctcccgagcctctggggcccaactcgaggccaaggtgcgagggctggaacgccaggtggaggagctgcgctggcgccagaggcgagcggccaagggggcccgcagtgtggaggaggagtgagccggatgccccacacaccgccagtgtcataccaaagagctgagctgcttcggggccatgcagccctcctgccagccccctgcccttttcttgccctgtctctgaaccttcagaacattgatccttgccgcagccccactagccaagagaaacagagaaagaccattccccctgcctgtccttgcggccctgtcttctgaggttctctgtctggggttggctctcttaaccctttctctgctcccagcctgcctcaccagggaaggttggaggggcctccctctggcttctgcatctgcgccagcaaacatcactgccgttggtctctcatgacttaactggcttccctctgctgctgccttggcttcctcctaatgctcgtgctctcctgtccttctgaagttgctccttggccaaatctccagctcccttcttgttttcctcatcctcctaccctgtactcccaccaaaccatggtcctttaaggcacgctcctgtcctcctcattgcccagcagtagggaggggcaggggtaaggggacctgaggataaagggtggggaaacagggtcccctgaggcctgtgggggctgcaggggaggaggatgtaccttgtgtctctttcaagtgccttaatccgagccagcagggccttctgcttgcctgctgccatactgtatgtaggaaagtgttctgtggctgctttgtgtcaagaaaagagcagtcactctcagaatcttgattccccatcagccaaagcaaaagatggctgctgctttgtaggcatgtgcctgcaagtgggaccttgctgggcattatatgccctgtgggggtttcagagaccctgaaagaggagggaggacccgcctccttgtctgcacaactgcatgcacttctctccccatcgctccacaacctgaaaccgagaaggagttgctgaccagtgcccaccccggcagcccgggaggaacacaggcagctcctttcccttcacgtggtctgcagagagcagggtgagctgccagctgcccctctccaccagggtaccctgtcttggtggttaggggccacttttcctttgaggctctagtggaggtggatgtccttctctgccaggcttggcacatgatgtgaagaataaatgcccaattcttactgttcaggtttgatgtgg

SEQ ID NO: 7768 - DNA, 1217 bp, Homo sapiens
cctcagctccccagctttccaggccagccccagccctcagtgcccctgcagcccccttatccccccgggcccgcccctccctatgggttcccaccaccgccggggcctgcctggcctgggtattagacacactcctggccctcggcccctccctagtcccacccacgctcaacctttggcccagccatcgccgagattcgagggtcaactggaagtggcgttggtgctccctgtggacttgcgtcggcacccagaggccttggagggacaaggcactgggcggtgtgactggtcatggcacttgctggccttctggccagaggtcctcctggaagcccctcctttcagtgcctggctgcagcggtgctagccaggctggagtccagcacctctcgccggtgtctgtgtgagtgagcgcatgtgcgcatttatgagcatctacttgcggctgcactcagggccatttgaacccagtgcagagttatctctatgaggaggccccgggtctccagccccctccatctcccctggggtttggcatatttgacatggagccccatgccaagggatgcagctgttggtgtctgtccagtccattcaaggctagcctgcccatgcactgtggcaggggttggattggagggagagaacagagttgggaaaaacaacaggtttgagtcctataaagccataatttaactccagtagctgatgtcagacaagcttgtcctatgtcctatttgagtggcagcagcgccagcccagcaagaaggctgggggttgtcaaggttgtccccagaccttgcttgcagtggttggagaacccagggggctgccttgggccctctggccagagggaagcgggcagctctagccctggagattgtggtcacattggggcttgtttaggattggagggccaggtcacctccccagccaccctcccttctctcctctggggtccccactttagggcgactttgcccgaggcccacgcatccatccactcctttagtgccttgaatctcattcacaagcagccccctcccttcccctccccttctcactctgttgatgtaatcctcccacccccagtgtccatcctaagacaggcatcaaaagaggccctaactttacttcccaaatggtgctttttaaaaaacaccatcactacattaggggcaattttttcacacctccctgtcttcagaatgtaa

SEQ ID NO: 7769 - DNA, 1586 bp, Homo sapiens
caattctggagtttgggatattgctcactggagatggtgtctcggggatagcagaagagggagaatcttgaagagggagaaatagaccaggtggtgtccttgctgacctgtgccacccagggggaggcgtgggtttctggtgagtccttcctctgccatgacaatggtggagtcttgtgcctccttcactgggggcattcccttccccacctgtgggagagcaccctcttggtcctcacagccccgcccatcttctcattgcagtatgacgatggcagcggtatgaagcgagaggccactgcagacgacctcatcaaggttgtggaggagctaactcggatccattagccaagggcagggggcccctttgctgaccctccccaaaggctttgccctgctgccctccccctcctctccaccatcgtcttcttggccatgggaggcctttccctaagccagctgcccccagagccacagttcccctatgtggaagtggggcgggcttcatagagacttgggaatgagctgaaggtgaaacattttctccctggatttttaccagtctcacatgattccagccatcaccttagaccaccaagccttgattggtgttgccagttgtcctccttccggggaaggattttgcagttctttggctgaaaggaagctgtgcgtgtgtgtgtgtgtatgtgtgtgtgtgtatgtgtatctcacactcatgcattgtcctctttttatttagattggcagtgtagggagttgtgggtagtggggaagagggttaggagggtttcattgtctgtgaagtgagaccttccttttacttttcttctattgcctctgagagcatcaggcctagaggcctgactgccaagccatgggtagcctgggtgtaaaacctggagatggtggatgatccccacgccacagcccttttgtctctgcaaactgccttcttcggaaagaagaaggtgggaggatgtgaattgttagtttctgagttttaccaaataaagtagaatataagaagaaaggtacatttgtttttgcttttattcaccctgcccagctatccaggactccaggttaactattcttaatttactgcgaacttaggcagtatcctcccttttatggcagttgttgcattcacttgcccttgctgttagaacagctcttttcaagtagtgaaagtgaagacatctatacctcttcttcatcacgtgattgtttgatgggatcccaaggatgatgggcttagaaattcactggtctttttggttgtccttgacaccatttgattcttacttgcctctgtcggtaacctgctgggcctgggggttgcctggactgcctttcctggttttatagccagctctgtgtgcagtgtccagtcatctagcccccaggccacctagtagctcctcatgtacctcccagctgcttgttgccacatgccctttggaccctcattttgtttcctctgatctaatcaagtgaacctttggtgcttttggtttgagaatacagcaggagtagggcacatatgggattcactcttctgtctggcaaacaaagcctgtctt

SEQ ID NO: 7770 - DNA, 1067 bp, Homo sapiens
gagcaccgtgaccactgcacgtggtcctgtctcagggcctgtggtggaaacaggaggttcagaaagtgactttcttaccgcctttcagcgctgccaccactgacgaggagcggcagcacctccaggaggttggtcttttccacctgggcgagtttgtcaatgtcttttgccacggctctctggtaatgcagaatctgggtgagacttccacccccacacaaggctcggtgctcttcggcacggtcaacggcatgataggtaaggtcacccctgtggggcacacccccacacaggcctccttcctgataccagcattctgagggactggggagagcaactgtacaagacctaggtgtttactagaggaggctgcagcacattagccctccctgagctgctcacctgggctgccctttacgtagaggatacatgctgtggggttgagctctctgcagctcactgcctccttcacttcttcagggctggtgacctcactgtcagagagctggtacaacctcctgctggacatgcagaatcgactcaataaagtcatcaaaagtgtggggaagatcgagcactccttatatccttcccagagccatccccttgctgggaagcacatcccggcatatgtggcacacggagtcacattacccggaagctactacatgtcttgattaggttcctgtacagaacaggttttttgttttgttttgtttttgactttttcatgtggaaaatttcaaacatacacaatagaacagtatattgactcccaaagtacttatcacctagcttccgctggtccatcttggaaatgtacatttatattcctgaaatgtgtccgcctctggccctctcggtgtagcaggccaaatgtgaatttagatcacaacacaggagcacatcctttcagggatttggttgagggcaacagtgtctgagactagagaaactaccagaagaaagggaaaggtgaagaagcggaaaacactgaaagaatctgccaccctgggacccccagaatccaagtgctattggaagtttgtgtagtacaggagatataa

SEQ ID NO: 7771 - DNA, 1947 bp, Homo sapiens
cctcatgagacctcctttggagaagaggtggaggtgcacaacctacttatcattgaccaacacacctttgaaggtgcacatgagctctttcgataatttttatctacgccctccctaatccaggctgttctgggctctggtacctgcaaagcctgacagatgtggcagactgtcctaggaggagcagaaaggaggggtgggaattctgtgagatggcagtgagtttggagggctgggcatcctctccttagcttaggctggtgggggatggataatctgatgagacagggacagcaggtggtacacgctttgtcactgcctaagccacaggcctcagaaatacggggttatgtgtgcgtgcagatatgggtaacctgtcatcacgtagtcatctctctactctctagtgcttcatgcccaccagtttctgcagaatgaatatgccctcagtctggtttcctgcaagctgggcaaagaccccaacacttacttcattgtgggcacagcaatggtgtatcctgaagaggcagagcccaagcagggtcgcattgtggtctttcagtattcggatggtaagtgggcgcagtctccagtttctgagggatgtgaaatgctgagaaagtcagcaggccattgtgaggtttcagagagcctcagttaagcagtagaagaagttgggttcattgctgtaaagagctattctcttctttatttgattgaattttggagcatgtgaacagtacacagtaaaatttagcttacatttctttctttgctactctttgaaaggccaaaagaacaaaagggaggggtgggagaagtgaacgatgggtaagggaatctagtgacaacaggtataaaaattcagaatcttaggtttgttttccacttggttgctcaggcatttaggtgctctttccagcttcaactctgtgtttatattttaatatcttttctcgttacacccacccaagatggctctaaagactatcagcccggaaatctcagatcagatagctgaaatgggatctggtttccatcttgagagagagatctagagtttcagggcgagggggcagatcctagataccaactggatttctctgcacattatcttggggctcatacttcacgtggtcattaactccagtagatactgagtctgtgttgtttttttagatgagtggttttggggggcaagaatttgtaccacaggggcaaccagaggattcttttgatgaggtaaagtgtgggctcatagagactcaaacatattttttccacccccaggaaaactacagactgtggctgaaaaggaagtgaaaggggccgtgtactctatggtggaatttaacgggaagctgttagccagcatcaatagcacggtgaggcctggaccacttggtacttactttaggctgcccatcattgtctgcagaatgtgtctctcttaggttgtctggggccacgtgtgtgtcagatctgaaggagaacaaagtagcgggtgtggaggatagagctctgagttgagaatctcggaaactgaggttgaaccacgcattagactaggttacgtgaacccccatgtgtttcagatcctgagtgctgtgggacttgagaaacgagtgagacctatggtccctgcacgtaggatgttccatgccaaaagaaaatgagccaaatcagaatatcctgagtgcattcctgaaagctagtcctttgaaatattccactgcttatgccatgaccctacctcctcccttgctaaaaagtttttttccatctttattgaggtatagttgacaaaaattttgtatatcgaaaatggacaacttgatgttttggagtagggagatagcagcaaacaaaatggacaatgagctgcccttttggagtttatgagcaaataaagtacatagtacgtgaaatggtgagaagtaaaagggg

SEQ ID NO: 7772 - DNA, 1148 bp, Homo sapiens
ctacttttaagctggcctccttcaggcattcatgcaaaaatgacatctattgtaatcattagcaggactttggggaataagaaatagaagcctcatgtagcttattcgtagggctctattagggctgcatttaccacctttccactcctgtgtggaccctggcagatgcttggagacatttgttcatctgctgtttatctagatcacttcagcatcggtgaggttggtctctcaagaacccaaagctctggtcagtgaatggaaggagcctcaggccaagaacatcagtgtggcctcctgcaatagcagccaggtggtggtggctgtaggcagggccctctactatctgcagatccatcctcaggagctccggcagatcaggtgtgtgtgtttttctgtctgctcgctttcctcctcttttctctaggacttctttgagccttggattccttcctctgccatattcttctttgttcagccacacagagatggaacatgaagtggcttgcttggacatcaccccattaggagacagcaatggactgtcccctctttgtgccattggcctctggacggacatctcggctcgtatcttgaagttgccctcttttgaactactgcacaaggagatgctgggtggaggtatgtgtcatttagggacctgggttgggacagagtcaaaatgtggaacaagaacataatgtccccctttctcacagagatcattcctcgctccatcctgatgaccacctttgagagtagccattacctcctttgtgccttgggagatggagcgcttttctactttgggctcaacattgagacaggtgagagtagtattttgagtgagggactctttcaaaaatagagtattagaattacacagaattcttagtcccagggttctgcttttgaactttcacaggccagctttttgtcctgttttctttcttcctttctcctgatgtcattctctctgtaggtctgttgagcgaccgtaagaaggtgactttgggcacccagcccaccgtattgaggacttttcgttctctttctaccaccaacgtctttgcttgttctgaccgccccactgtcatctatagcagcaaccacaaattggtcttctcaaatgtcaacctcaaggaagt

SEQ ID NO: 7773 - DNA, 1366 bp, Homo sapiens
ctatttaactttttagagccttaaaaccaagaaggagcagagagggggttccagctcaggactccatgttccagcccttccagtggtgtcaggctgccatgtctatatatatatatatatatatatatatatatatatatatatatatatatatatctatcctttttttttttttttttttttgagacaggatcttgctgtgtcacccaggctggagtgcaatgacatgatcatagctgcagcctctttctcctaatcttaagcaatccccccacctcagcctcccatgtagctgggactatagttttgtgccaccacacctagcaagttcttttgtatttttagcagggacaaggtctctccattttgcccaggctggtctagaactcctggttccaagcagtcctcctgcctctgccttcccaagtgttgagattataggcatgagccactgcccctggcctgccctgtccgtagatatgcatgctaagtgttggtctgtcctatgcatctgaatccttggtccttgttccaggattatggccactgcggtctgaccctaatcgtgagactgatgacactttggtgctctcttttgtgggccagacaaggtaaggatgggtctagtgccagctgtaggtgctggtgagaaggttgtgaggtggggaagctggtcccaggctgacccaggccctccattctgctgcagagttctcatgttaaatggagaggaggtagaagaaaccgaactgatgggtttcgtggatgatcagcagactttcttctgtggcaacgtggctcatcagcagcttatccaggtgataactgagaaaggggcaggtgttaccatatacttgaattgacctagatgcagtacagagcaccactggattttaaaacaaccaatttttatggctccaaaaataatgtaaaaattctagggaaaaaattacagataatccactactcagagatcacaactcttaaccttagagttgctccttttagctttatttttcttctgcaaatgtctgtgtatttatttacattttcttttatagactcgggtcattatatatataaacataaaaatatagtttcggatcctattttagcactaattatatcttccgagacactcaaattttttccctttgttaaactagtgatacatccttatttataaaattagaaaatgccaaaatgcacaaaaaaagaaaaaatcatgatgctaccatccaatatgactcttggcagccctttccacatactaattataaccgaagcttaccctattctgatccttactttcaatctatctgcaatacgggggcagatagccttctggcatattgttatccacgag

SEQ ID NO: 7774 - DNA, 1132 bp, Homo sapiens
agaatctctccattttatccacatccctactatccagctttctacttggttaatttaacatcctacccctgactagctctttgcctttgtggttcattcagcaaatttgccaggcaaggtgctaggtgctgtggatacattgatgaacaagacccagctcctaccttcaaataggtcatagtttaatgtaatggacttcttctagaatatgaaaacttcggaccttctctgcagaaaaatgcatgcaaacattttacattaattttcaaacattcactacttctctgaaatccatccatggactctaggtcagcaatccttggctgattaatgggtcacctgtgggacaaccatattctttcgtcaatagtccccttctggaatcatcccttggaacatgagaatggcagatctagaaactagttattgagagtttcttttggacaataaccatctcttttgggtgggtctgttagggtgttctaggactaacataacattgttctttcttattagctcaacgttgacagtaatgaacaaggctcctatgtagtggccatggaaacctttaccaacttaggacccattgtcgatatgtgcgtggtggacctggagaggcaggggcaggggcaggtaagggccattctgaaagtggatagttggtatatgcccactcaaactgtgtcctcctagctatgcttatctagaatggggagggtgcactgaaaatacttttaagagccccctcatgaatcccagtgatataaggataactactgtttattgagtgcctatcttggtctgccaggcactttatatacattatctctaattacacaagtaccctagatagggatatttggccatctcagaagtgaggaaaattagggctgagaaagattaagtaactttttccaaagtcacctaacttaataagtggcaggtgtatctaacagatcctgtgctcattctagtaaactaggtcccagcgatctaagcaagcttgctaggagcagtggtagaagctttttgcttcctggactaggatgtcctgtctgctctgtaaatttgaaagactttggaaatcaacctctgccaagtctgcatcctcaaacctagccccacaataaag

SEQ ID NO: 7775 - DNA, 1203 bp, Homo sapiens
tggaggtagctgagtgtggatggaggtattggtagactgccaggagggcagggggtgtggacaaaacagtgttttcatataaagctctgggacttcttcatttgacttggtctgtcagataaaagttttgtgagactttagatgaagactggaagaagtgaacactttctccggcattctcaattagagcctgccactgtaactgtaatagagtaaaattggaggggcaagaggcatgagaagggattacgcagtcattgtcatttggaggacacacggctcttaggtccagtccagttttcttagtctgattagggaagtagctttgttgaatgcatgaactgagactctttgaggtgccggatttggcaagaaggggagtagctggagggagttggagaagtatgtgaagtaaatgagaattctggaggtatttagacataagtgataggattattttgaagggatgggaggcccttcccctgagttcaaaagttagagggtctgttctttcaggacactttacttcggccgaagacttaaacctgttgattgccaaaaacacgagattagagatctatgtggtcaccgccgaggggcttcggcccgtcaaagaggtgggcatgtatgggaagattgcggtcatggagcttttcaggcccaaggtaagtgttgcagttgggacaagcagtggagggggaactgttggtcgtaggttgttttatgttatttttgtttgtttatttattttctttgagacgggggtctcacagtgttgcccaggatgtcttgaactcctgagctcaagcaatccctccactttagcctctggagtagagtagctggggtattgtaggcatgccaccgtgcttgggctgtgttaggttgttttgcgaattcttgggatgggtggaatatgctttaggagaaaaactcttctcttttttctctctttggatagcaaatttcagtatgtactcttgaccaagctttctagaagtaaaaggagagattcattagggaaacatttatgaagttgacttctttagaagggagaaattaaagcagtttgtttcagaggataggctacagagtggggcagtcctggcttcatttcttgttaattctgactttaggtgccacttaaggcacctttcagatcaaatcccctgggttgttgtgacgatgaaatgattcagtaac

SEQ ID NO: 7776 - DNA, 1310 bp, Homo sapiens
aggctacttccttgttttagaggaaggtactgcccattgggagatggggacattgggacctcagcaatgaagaacccttgtgaagtaaccaggaggaatggggaaagaagcaagttgggcaggatatggcctacttccataggcttttcttttttcaggtttgatgtaagcatgggcttacatcccccaggtacatacttttacttattgtgggataacctggcactagtaggcaggtaaagtcacaaatttggtgtcttttcaccttttgactgttgacttaatagctcctctcactctgcctggagatacttcctgcctcagatgaggagccagaagaaacagagcccgacttgaatgaactcagctcagagttctaaggaccagcattctgggggccattttctctacaggcaaatggaattgcttttccataacatccaaattgtaatgtggttgctgctgaaggaggaggcagcagcgaggtcctgcggtacccatggggtgatgctacttctgcatgcatctacagggcatctgacacctaacatgagacgtggcatgtgagatgagacttggcatgtgagacatagggtcactagagacccttctgggtcagaggagagagactgaattggactaaacccgtcctctgttcccagcacgtttctcatatagccctcagtcactgagggagtcccccgcaggattggagaggcacattcccttgggacagaggctacaggttggagctttttttcccctgtcccccaaccccatccccacctccacttcagaacatggcaccccacccaactggccaagtgttaagtgatgtgcttattgagagcaactccgggtgtcttttaaaatgtagagaaaaggtgacagtttaaggaaaaatatatatagaataccagaaatgccgtttacccggagaatttttttctccccatttgttttgtttttactcaatgacaccatttttagttttatttcctgatagcaaaaggaaaaaaaacacccatccctcaaaaaggccaaggtcccgtccccctgttgtcggtgatttgtttgtctttctgataggttgaaaattgtgtaataaacttgatgacgctgtcaatcttttatactgcattgtatttttttccttttgtaacaaaatatttttaaataataaatggggtgtgagctgttttatggattctgcattgaatagatttgttgaggtgtctggggcatgggcatgggctgatgtagacactcgaatgatggtgaaatgccaagttcttagctaggattgcatg

SEQ ID NO: 7777 - DNA, 1129 bp, Homo sapiens
gtacccactttcatgcttttcctctgcattctgtttctaaataaatttattattaaatagacaagtgaattttatgtaacacttgattttggaaatagcataagatactgaaaataagttttcattagcttatcttagatgtggtctttagaagctgaccttattgataacagcagcccatgcatctcattatgcattctttctttgcttgcttaatcacccagtgctttttgattcttgccgttggctaaagccagaaactttacagactattaacagaatcttgaggggaaaaaaatgtacataagcataattaagtgatacagtttcaaaaggaggtttttcttactttgtttcctggggtaggacaaggaagttttgtacatgttttaccaagtatttaactggattctaataaactagagtgaaatagaatgaacaaaatgaagtttgcagacctacctttgccaacccctcatctcttaggacccagagttcaacaatacagatcagattgacctgtatgatgatgtgctgacagccacctcacagccctcagatgacagaagcagcagcactgaaccacctcctcctgttcgccaggagccatctcccaagcccaacaacaagacccctgcaattctgtatacctacagtggcctgcgtaatagacgagctgccgtttatgtgggcagcttctcctgggtgagtgtgggtaaccaaaaatgcttaggggtgggctggagggagagcactgggaggtgatggcattttcagaaactactgttgcactgttttgtgctctgatggggttggatttctttttcctgggatcaggttggattgatctctgaaagagaactatcctgaggacgtactggtgccgaagaaagcaatgattaagtgggtagttgctttttctgccatcttgttactgcccctgaccctggggctttatgtctagcagggtcatctgagggacgagatttcagagtgaacaccttgaactcttggtggtcattagatggtcctgtgataatggtgggtgatggggattaaagaccttgataactctagtatacttggggtaggtggtgactgttgttctgcaagttattttgtgatgttt

SEQ ID NO: 7778 - DNA, 1209 bp, Homo sapiens
ggattacaggtgtgcgccaccacgcctggccagcagtgtaatttcctcatgactaaatgtgattgaatgcattcagcacctagtaagcattgagtaaatgatagcgatgatagtcgtcattattgtaaagatgtttgtggtttgttcatttcagatgcttgctctgtcaaggcacagcctattgtctcctttgctcagtgtgacatcattcagacgcttctacagaggtgacagcccaacagattcccaaaaggacatgattgaaatccctttgcctccatggcaggagagaactgatgaatccatagaaaccaaaagagcccgcctgctctatgagagcagaaagaggggaatgttggaaaactgcattcttcttaggtatgggactaggagtctttttttttaaatcgggcagcttcctgagccagagtaggttcagagagactcccaggagtaggagtcttggtgtcacttctcttttattagacacagccttctcaacctctttttctttttttctttcttgtttttagtctttttgctaaagaacatctgcagcacatgacagaaaagcagctgaacctctatgaccgcctgattaacgagcctagtaatgactgggatatttactactgggccacaggtactgggtatgataagcagcataatgtgaaaataggacagtttaggctgatttgagtctagaattgtatcctagataatttttttctttcttttttttttttgagactgagtttcactctcgttgcccaggctggagtgcaatggcatgatctcggctcactgcaacctctaccttccaggttcaagcgattctccagcctcagcctcctgagtacctgggattacaggcatgtgtcaccacacccgggtaattttatatttttaatagagacagggtttctctgtgttggtcaggctagtctcgaactcctgacctcaggtgatccgcccgcctcggcctcccaaaatcctgggattacaggcatgagccactgtgcctggcttataatttttttcttttattcatgaagtagacactcaacccaaacactgttcaaatttttgttaagtgtacaaaatttatcagttaaagttctttatttgcgagacagagtggaaacttgtttgtctcacttaagcaaaaaggaatttagtggaagggtatatgaagctcacagtatcaaa

SEQ ID NO: 7779 - DNA, 1160 bp, Homo sapiens
ggaggggatctgcccttctccactcctctcttggatccgcctcggtttcctgtccccccaccacccgcctgccccgcggaagaccgcccagtgagccagcccccaccttccaggcgccttcgccctggggatccaaccaacttgtatcgagtgggcggggcaacggctccccatttttcccgagccccgcccacagagctcttagccaatcctatgcagagagcatctcctggcaggggtctcttcccaaccagaccccacccaggcacattagcgaccaggcttgggcttccccagcgccccaccaccaccacgtgcaggtggagctctgggatgctatgttggggcggcaagcggtgggccgagggccgggtaggctagcacgggaggtaagggtggtatgggatggggcgggggcggtctagggcaataggagagcagagaatgggggaacttgagggtggggggagggcaccggagccttgccaccatcccaggactttgggcaagtcacccgcactccctgggcctcggtttccccatctgtaaaatgatggtaataatacttcacctacctcataggggaggttgtgaggccaccatcacctgacctgggggtcaaggcaggaggactccgaaggtgctacccgtgagcaaagtgtaattaccgaatcctgactgcaaggcccacctgcccctcccccacagagcctccagagctagctgaggccaacgcaggcccatccgtctcttcactctgtcgcaggccctttcatgggcttcgtctgccatctttgtgggtgccctagacttagtccttatcttgtcctggtttcctttcttgtgaccatctccccatgaaagtgctgtacaaattccacccgccccaggacccccgcacctgccctctggcaccagatgccagggaagggacagaggaaaacagccacaaacaagccaggggggctccccggagccccaggggtggggattggtggccactgtttgtatgttcttgagtgcaagtgttttataaaaaataaaacaaaaacccaccatcacaaaaaaaaaaattttgcagcgaagagaaatgaagaaaaactgaagaaaaaaaaaaaacaggaaaaaaagaaccatacaaaatttttccaccacacata

SEQ ID NO: 7780 - DNA, 1200 bp, Homo sapiens
ccatggccctctgggaggggcgcccgcgtgtcgctgggtggagtgggcgtttccgtgttgtagaggcagggccaggttgtcacagcaggtgtatcgtgcttctgataatcaggatgttgggccctgaaaccactccctgccctttccgtttcagtttgtctcccttcacgtgcacacgtggcatgcctgggtctccccagtgcatctcctctcgggatccctgcgtgccatcgctgtatgtgtgtcgtcactgctgctgtggttggcctgactgtggcctctgccatcctctccctgcccctctggatgtctgtggggctcatgtgcatgtgtgtgtgtacatatgcacgcacgtgcgtgtgtgcgtgcgtgtgcgtgtgtgtatgcgcatgtgtgcgtgcgtgtgtacatgtgtgtgcatgcatgtgcgtgtgtgtgtgcgcacgtgcaccctgctttgggatcctgatgtctcccctccagggcctggcatattccatgcatgtctgtctgtgcctgtcgtggtcacctgtgtgctggaggctggtctctaccagagggccatggctcatgtccaccctcagcgtgtggctcccagtttgtggctgtgtgctctcaaagctgttctattttagcctgtcctgagcctcatgctactggtcccccgtctcctcctccctacctacccctacctctcttcctcctcatgggacattccatcctggtccctgggcaggcttttagtgcccccttcctgacccccagctgaacggagcctgggctcaccacccagccattgggtcaaagaacccagcatcctgggaacggcatggagtcaggtacagacagggcttctcggtggtgcccgtctttctgtgaccctgggtgagagccttaccaaatgcacagtcttcagcaagtgggagaaggatgggaactgaggagcaagggggtgtaggctcaccctatccaatatggggccattaaactaaatgagcttacattcaacaaaattaaaatttcagctctcagccacactggccacattgcaaatgctcaagtgcacacgtgtggcatgtggctgctccactggacagcacaaatacagaacactctgtcactgtggagagttgtcctgacctcacctggtcagtctcacgtctggagggtgggaagagaactcttgatgagcccaagcaa

SEQ ID NO: 7781 - DNA, 1291 bp, Homo sapiens
cctcgcatctgggagaatgtgggctttgtgttcaccaaggaggacctcactgagatcagggacctgctgctggccaataaggtgccagctgccacccgtgctggtgccattaccccatgtgaagtcactgtgccagcccagaatactggtctggaccccgagaagacctcctttttccaggctttaggtatcatcactaaaatctccaggggcgccattgaaatcctgagtgatgcgcagctgatcaagacgggagacaaagtgggagccagtgaagccacgctgctgaccatgctcaacatctcccccttctcctctgggctggtcatccagcaggtgttcgacaacggcagcatctacaaccctgaagtgcttgacatcacagaggaaactctgtattctcgcttcctggagggtgtccgcaatgttgccggtgtctgtccgcagatccactacccaactgttgcatcagtgccccattctatcatcgacgggtacaaacgagtcctggccttgtctgtggagactgatgacaacttcctgcttgctgaaaaggtcaaggccttcttggctgatccatctgcctttgtggctgcagcccctgtggctgctgccaccacagctgctcctgctgctgctgctgcagccccagctaaggatgaagccaaggaagagtcggagggaggagtcagacgaggatatgggattgggtctctttgactaatcaccaaaaagcaaccaacttagccagctttatttgcaaaacaaggaaataaaggcttacttctttaaaaaaaaaaaaagaaaagaaaaaaagaagaaagaaagaaacaaagaaagaaagaaagagaaagaaagaaaagaaaaaaaaaataaaacaacacttgctcccacggttgtgacagtggggtttaaagaaaaccagcaggcgccgggcacggtggctcacgcctgtaatcccagcactttgggaggctgaggcgggcggaccacgaggtcaggagatcgagaccatcctggctagcactgtgaaaccccatctgtactaaaaatacaaaaaattagccgggcgtggtggcgggcatctgtagtcccagctgctcgggaggctcaggcaggagaatggcatgaacccaggaggcagagcttgtagtgagccgagatcgcgccactgcactccagcctgggtgactgagccagactccgtctcaaaaaaaaaaaaaaaaaagaaaaaagaaaaagaaaaagaaaaggagtaggcagaaagagcacacagtaggtgttcaaccag

SEQ ID NO: 7782 - DNA, 2452 bp, Homo sapiens
ggcaggggccaggtggaggtggctgtggacctgccagtcccgggcacggtctgcatggagtagctgccattgctccttctgccaaagcagaacatgctccttcctatctcttcaaagttctctgcttttttccttcataaaactccccacagaccccaggactgcgacggccgtggtgagagatgctggttgggataagggcagcagtctgtcctgacccctctctcccttctctccagggcacctctcaccggtggccaataaccatcctgtccttccgtgaattcacctaccacttccgggtggcactgctggtgagcaggggcatcccacctaccctggaggtctgggcacccctgtctgcgacgtggggcttgaggaatggggggtttgcacagtatgtggtagggctgggggcacagtgtcaagcaatgtcagcagggagtgccatctgccccgcacccccagagccacctcaccttcccactgcccttccacccagggtcaggccaactgcagttcagaggctctcgcccagccagccacagactaccacttccacttctaccgcctgtgtgactgagctgccctcctgaggcagcaccacaccagggaccaggggtgcccaggcaccccccaacactggatgcaatggtgttacactggagcccgctgcaggccagctctgctgttcactggccctacccgagactggtgaaactggaagtcttcacactggagttgctgttccagctggtcgcccctcacggcacagagggaacctgagagccagagacttcttgggccttcctgcctgccaccccctaggggccaggacaggaccagtttacctctttccagatatggtggttggagggctggttcaggtgccctggagggaaggggaagcctgtggccctgatttgttcagagcccattctcccttgcctccccttttgagactggagccaacccttttggagagaggacctgcccacctttgagatcagcagggggctcggatccagccctaagagacttgggtggacccccatgagtcaatggagggcagacggctctcccccttaaagctgttccctgggggatggcttggtagtggactttctggggtttgcctgttacgccagactcggacttctaagctttaagtgtggcccaggaggtttcttctccctgggagggcttggctcccaagaagtcccagggcagccgaggccagccctgcctgggttggagaaactgactttgtgccttaagtctactcagtgcctggtgaagccaccctcagcccttcacaggcctgaaccagtaggggccagtgggccaggtaagccctagagccttgaaccaggaatatccaggaagaggaaattccctttgagcccccagatggtattgcagcttcactgcctgcgttcctgggagcgtctggagctcacagtgatcagtgaccacatcattctctctgagcagaggagcaggaatccctcaagcagcagcctggtcttggctggtgggcagatgcaaatagcttttgctgttattaatgaagtaattactaaatgcacttaaaccagggcaggaaggaatggaaggatggagctagaaagctcagagtgggccagagcaggggtgtgacacttgcaaagacagggctctgactctgatccctcccagggagcctccgacacccatcccactcccaaccaccaagaccctgggttagggaagaagttgtatcttaagtgccaccttcaagtttcttagtggtgcctggtgcattccgaggctacatccaggctcatggaaggagtgtagtattcatttagccatgtctgccatgggtccagaaatgggaaagggaattgctgtccttgccctgtggtatgctgccacctctttgggaagcaggccttgcccctgtcccaccactcattctcagctttgaatgggaggcctttctatagtggaggcctttccttgaagcctatgaactgcaggcccccttttgccattgatctcaaagcacttgtcctcaggatagggaagagcagggggatgcaggaatagcagggatagcttgctcccagccccctccccaatttggttccgttgacataggaattttacgattcccaaaccatgcaggggctgagccttccttatgatgactttgttctccctcccactgggggaatcctccctatgccttaaaactgccgagccccactccatgtaataggattcctgggcttcctcaatgggggttcatgttcttggactgcgggccctcagtccttaactggaaagtgaccgtccactgccccatggagcccatctggacacagcacagccccaaaaccgttagcagctggctctgtttccaagcctggggaggggttcctcagtgcaggagttggggacaggctgg

SEQ ID NO: 7783 - DNA, 1298 bp, Homo sapiens
agaagcacaagagcatcgaggagatcgtgcggcgacttgaccccaacaagtaccctgtgccagaaaattggctccacaaggaggctcaccagctcttcttggaacctgaggtgctggacccagagtctgtggagctgaagtggagcgagccaaatgaagaagagctgatcaagttcatgtgtggtgaaaagcagttctctgaggagcgaatccgcagtggggtcaagaggctgagtaagagccgccaaggcagcacccagggccgcctggatgatttcttcaaggtgaccggctcactctcttcagctaagcgcaaggagccagaacccaagggatccactaagaagaaggcaaagactggggcagcagggaagtttaaaaggggaaaataaatgtgtttccccattatacctccttcaccccagaatatttgccgtcttgtacccttaagagctacagctagagaaaccttcacggggtggagagaggattctaaggcttttctagcgtgacccttttcagtagtgctagtcccttttttacttgatcttaatggcaagaaggccacagaggtacttttccttttttagctcaggaaaatatgtcaggctcaaaccacttctcaggcagtttaatggacactaagtccattgttacatgaaagtgatagatagcaacaagttttggagaagagagagggagataaaagggggagacaaaagatgtacagaaatgatttcctggctggccaactggtggccagtgggaggtgatggtggacctagactgtgcttttctgtcttgttcagccttgacccaccttgagagagagccaccaggaaggcgcatcttagcagatgggaggaactgctgagagaagatgggcagaaagctggagcccctggagttggctgtgtctgtgtttgtgactgattactggctgtgtcttgggtgggcagaaactcgaacttgctatgtaatttgtgtctagttattcagaggagtaagatggtgatgttcacctggcaatcagctgagttgagactttggaataagacactggttttcatgcgctgtttttgttttaaagttatgaagaaaaaagtcaataaaattctaaaagtaaccaaaatgtcatgttctttgagaacatttgaaaatatcccaagtgaccatggctccaaatagctttccttttcactcttaacatgctgtaattgcacttgattaacaatgggtggtttgagagtggccacaagatggcaccatgctccataaaatggccatagcagctagat

SEQ ID NO: 7784 - DNA, 3183 bp, Homo sapiens
aaaacctccagatggaagaaggccttaacctcactgctccatctccggtgggttcaactctgcttgtctccctcactgtctgcccccattttgtccctgcagctcactaaaggagtcagggcagctctggctagatgcctatcttcaccaataacaacagccaccctgcccagtctggaagaagaggaggaagactctggagccaaggcagaggggagcttgagggacaatgccactatagtttaatactcagagggggttgggtttggggacataaagcctctgactcaaactcctcccttttatcttctagccacagttctaagacccaaagtggggggtggacacagaagtccctaggagggaaggagctgttggggcaggggtgtaaattatttcctttttctagtttggcacatgcaggtagttggtgaacagagagaaccaggagggtaacagaagaggagggacctactgaacccagagtcaggaagagatttaacactaaaattccactcatgccgggcgtggtggcacgcgcctgtaatcccagctacccaggaggctgaggcaggagaatcgcttgaaccggggaggtggaggttgcagtgagctgagatcacgccattgtactccagcctgggcgacagagcaagactccatttcaaaaaaaaaaaaaaaatccactcatataaaaggtgagctcagctcactggtccatttctcagtggcttctccatcctcatttgcaaacctcagagggataaggcagttgaacctgatgagcaagaattataacagcaaggaaacattaatgcttagaattctgagatccagcacaactcagtctgtgggagctcagctcgctgcccagggataggtatgacctatgtctgccttaggctgctgggagatgccattctccagtttcagaagcaggcagggcaaaggtcaagactgtggtattggggtcttttggctctgaaggatcctggaaccactgattttggtttattccctccagggtctaaagagaacaagaggtgctagctcttaccaaaacagatggtagagagagttgctggctatttaaaaagctctttcatcttttaattcacctcttcttttcacctctttaaccactcctcaggaacagaacacttctaggactgggggtcttttagctccataagcaagtgagcagatgggacaagttagtcttttctccctagaaacaaaggggatgcccagtggtttccctttgcttcccaacctaaaatttcaagtttaataaaatagcaattagcagaagtgaccaaattgggagataattatcagtcatgaggaaagacacagatttcggtcataaagaatgtaagggctataagtagaaactttctataacctaaatgatgttatagaattatttttgagcaggagcagaaagattaaatatgatcacttcatacttctaaatcagaaataggaagattaaaaccacagaacagtttgtgatttctattgctgtagctaggtatcttactctgtccactcttgttcaagtatctaactcttctggaaaccaaataggctttagaagagattatcctatattcctatcagtataatactaaaatgtaactttttaatcatctggtttttaaaagataaacagtttagcccatctctccagagagcaaacataggaatatgactcaggagcctcctagggcttatcatcagccctcacacccgcttccccctccaacccacagcctttgcttccaggtggcaggattactactttgcctcttcagcagcatctactctaggcatattgatcattttagacactgggagaagagaacctcaaactaggaggaaaagacagagcctccacttagttttgggaggggatggcagacagtcaaggagatgagcgtcctaaggcatgttgggatagggtcagatgcaccacccatggagaggtttgtcaacacaaagacatggaaggttagaggtttgtcaacaaaaagacatggaaggttaggtttgtcaacacaaagacatggaagattagaggtttgtcaacacaaagacacaggaagaatgggctgcagaagatttagatgttttccatttgggcacattttacttagctggagaactaggtttaaaacagcctgggtaggaaaattagaagcaagctggatgcagtggctcatgcctgtaatcccaacacttttgggaggtccaggcaggaggatcacttgggcccaggaggtcaagcctgcagcgagctgagatcacaccactgcactccagcctggggtgatagaacaagaccctgtctcaaaaaaaaaaaaaacaacaaaaacttagaattgaggagttgtacctccattggcttcctcactccaaaataggtgctgatccttcctattcctattctttgccaccttttgggtgtggtgtcaccagcctgtttagccaagtagctttgggcataggctgcccaatctgagcaaacaccagtgaggctctattgagccaagaccaagtcctcaaagcacctgaaccactgtggccttctcagcctacagcagtgtggtctcttacatggccacaaagggacacacagtgacaaaaggctcggaatgttacaatggtaaaatgagtgatctcaaatccactgacagatataaaataggcttagagaggaaaagctgcctctggtcaagtagatcatggcagcatgaattccaactcacttttttacaactccaacttctatgtttatctttgttactttcacttttttacaacctggccagaggcattttttaaatcaggcccaatatcagtattctttttgtgtgtgccaattttgttatcacatccctatgaagttgaaaaataaagttaattttgaccaaaagacttcatttgtaacccatgatgttcatctgtgtgtgcacaggattcctgagtgcctctgctacgagttactgttcacctctctgtgctcttaagttcttgaatcactagactcccctttgtattgggcagaggaagaaacatcaggaccctccagaaaacaccaaggcaagggtgaagtatggcaaggaagagcaaggcaaagtccttctgatgactcccgtgttcaaatgtgagattgtcaat

SEQ ID NO: 7785 - DNA, 1167 bp, Homo sapiens
agcagcactagactggcttggcaacaggtccgtctgcactcgaggttactctcgggcgttcaactcaatggctctctctttttaaatcctgccaagaacacccttccctcatcttgcactcctaaaggttgtgggcctctctggagccattgctgcccaccttacccccaccaaatgcgtggctcagtgattaccccgcaccagctacccgcaccggggaccccagtctgaaatcctggcatttatttaaggatgcagctggtatcccatggattcgaatgggccagaaggaaaagaacagaggcaaggagggaagaaagggcggcttttggtggtggtagtgaattggatgcagagaaaaaaggtctgatgggatacagaaattggggaaagtgaataggagagaggcagaaaggagggatgaacttgacgtagatcattccacctggaggtctaggatgcccaactgttggtgggcttttgctctctaagctgtgtaggcccgacccttaacttccccacctcttgcatctcatggagacaggcctaggggaaggccagaccaggccaccataacccaagctggacaatggacaggtggtgtgggccagcagggccagggcttatctaagattgggaaggtcagcgatactgaaattccctacagctttcagtcccatcctgttttacttgcttgtggacattgcttaagcccagtgggtttgtgatgctatttagaacttaggtgggtatgtttcacataccttcagtgctatctcacctggacctttacgcggcccagtgaggaggttgggttaatgtaactcctaagtaaaggaccttctggatcctggctgggatctttccactatatgttgctggacttgggctggtctgtttctgatttcataggtaaattgtagaaggttcctgtcctgtccaggccctcaccaaaaagtttccagaaggaaaagtcaaatacgatgaatttggtctgattattccacattgttaaacatattttcttatgtgaacgcttagtctggcaattgccttgacctttctggtttaattaccatatcagattgatttatttcttccttgttctggatgttctcagtgcttacctgaccttaacactgagttccctccaaaaatcagtgctca

SEQ ID NO: 7786 - DNA, 1216 bp, Homo sapiens
gcagctggcttagggtaggcaacatctgcaccacattctgggaacacggagctggccattgttcctgggcaaggcgggcttcccggtgcccggaaggaggggctcttgaaggacaagcagggcttcacctggcaaagaagaatggaagagaggcccggtgcggtgggttatgcctgtaatcccagcactttgggaggcggaggtgggcggatcacctgggttcaggagtttgagaccagcctggccaacatggtgaaaccccatctctactgaaaatataaaaattagccgggcatggtggcgggcgcctataatctcagctactcggaaggctgaggtaggagaacctgggaggcggaggttgcagtgagctgagattgcaccactgcactccagcctgggcgacaagagcaaaactctgtctcaaaaaaaaaaaaaaaaaaaatggaagagaatcacagcagaggaagtagcatgaacaaaaaatgctttcattacatctcatcccgagtccagggagaaccgggactgcccacctcactgcctccttgttgtcagcccgtcttgctttcctccatctgtttgttcaataaacatctctgggttggtatcctccaaacatcacgcttacttgtttcatgccttgctcctcagtttctttgtgccagagatttttccatttgattcttcccaggaattttgttccttttgacaacaaacgcaaatgtgtcatttgattcctcgagcctctaagctttctttctttcttttcttttttttttttttttttgagacagactcttgctctgttgctcaggctaaagtgaagttggtatgatcttggcctcctgggttcacaggattctcctgcctcagactcctgagtagttgggattacaggtgcccgccaccacgcccagataatttttgtagttttagtagagacggggtttctccgtgttggccaggctggccttgaacgcctgacctcaagtgatccacacgcttcagcctcccaaagtgaagcctctgagctttcactctctgactttttttttttttttctctctctctctctctctcatgggttttgaggcctgccagtttccagggccctgaggttactgcaaaggccacagctgtccgttgctgttcccacccatggctattagtgtccatagactgtgtgtgccaaaagcatctcccaagtaaaatg

SEQ ID NO: 7787 - DNA, 1407 bp, Homo sapiens
ggcttttctccctgggctgcgagaagaccatccctttctgtgtggggttcctggtgggctctgagctgacagccccacaggcccagtggcagtggtaagccctggttagggccaaggggacatacatgccaccttaatgatggcctcctcagcccttgcactccctggggccactcccgtcctggtccctgaccctggtccatccccaactttgcaggtccctgaagaagtctgggaagctgtggctggacgcctaccttcacaaatgaagccacagcccccgggacaccgtggggaaggggtgcaggtggggtgatggccagaggaatgatgggcttttgttctgaggggtgtccgagaggctggtgtatgcactgctcacggaccccatgttggatctttctccctttctcctctcctttttctcttcacatctcccccatagcaccctgccctcatgggacctgccctccctcagccgtcagccatcagccatggccctcccagtgcctcctagccccttcttccaaggagcagagaggtggccaccgggggtggctctgtcctacctccactctctgcccctaaagatgggaggagaccagcggtccatgggtctggcctgtgagtctccccttgcagcctggtcactaggcatcacccccgctttggttcttcagatgctcttggggttcataggggcaggtcctagtcgggcagggcccctgaccctcccggcctggcttcactctccctgacggctgccattggtccaccctttcatagagaggcctgctttgttacaaagctcgggtctccctcctgcagctcggttaagtacccgaggcctctcttaagatgtccagggccccaggcccgcgggcacagccagcccaaaccttgggccctggaagagtcctccaccccatcactagagtgctctgaccctgggctttcacgggccccattccaccgcctccccaacttgagcctgtgaccttgggaccaaagggggagtccctcgtctcttgtgactcagcagaggcagtggccacgttcagggaggggccggctggcctggaggctcagcccaccctccagcttttcctcagggtgtcctgaggtccaagattctggagcaatctgacccttctccaaaggctctgttatcagctgggcagtgccagccaatccctggccatttggccccaggggacgtgggccctgcaggctgcaggagggcactggagctgggaggtctcgtcccagccctccccatctcggggctgctgtgtggacggcgctgcctcaggcactctcctgtctgaacctgcccttactgtgtttaacctgttgctccaggatgcattctgataggagggggcggcagggctgggccttgtgaca

SEQ ID NO: 7788 - DNA, 1855 bp, Homo sapiens
gctgggattacaggctgagccaccgcacccagcaggggtttttaattttataaataaatatgtggtacagctggcagactcctgagctcagttttaaccatgctttaacatggttaatacaggagcagggaggagaaaaggactaagtgcagggtcagtactccagcgccctctcatcagacaatgaattctgacactggctgtaagttttctgtgcagtaatacagatccttaagacattgccccaggcaatgcccataatatcctaaaggttccttgaagttaagtttcaaggatcaagtttcagttttctattttagaatagaaacattactcttgggttcaatccagtagctcatctgccccccagtctccttaggcactgattccttcatgctgtgctttgagaaaggaagcctaggctgacgagaccatcttgcctccctgtagatcgtcacagctacctgtctctggggatccctagtataacacattcagtgttcccctttcagtcttactactttgaccgcgatgatgtggctttgaagaactttgccaaatactttcttcaccaatctcatgaggagagggaacatgctgagaaactgatgaagctgcagaaccaacgaggtggccgaatcttccttcaggatatcaaggtgaacaaaagatcctaggggtgtcatacttcatcatctggcagtgttcgggtatcagaaatcacttaaactagcaattgcccttataaagtgatgatacactgggcttttgccttttgtgcttttttaggcttaccatctaaactaaattaggcaaatagtaatgtcccttttgccaaaacgtggtggttagagatgatgggcttgctgacttctaggttagttggtagagatgcattaacctattctcattcagaaaccagactgtgatgactgggagagcgggctgaatgcaatggagtgtgcattacatttggaaaaaaatgtgaatcagtcactactggaactgcacaaactggccactgacaaaaatgacccccatgtgagtattggaaccccaggaaataaatggaggaaatcatttgccttagggattgggaaagctgcccactaactgtcttccccattgttttgcagttgtgtgacttcattgagacacattacctgaatgagcaggtgaaagccatcaaagaattgggtgaccacgtgaccaacttgcgcaagatgggagcgcccgaatctggcttggcggaatatctctttgacaagcacaccctgggagacagtgataatgaaagctaagcctcgggctaatttccccatagccgtggggtgacttccctggtcaccaaggcagtgcatgcatgttggggtttcctttaccttttctataagttgtaccaaaacatccacttaagttctttgatttgtaccattccttcaaataaagaaatttggtacccaggtgttgtctttgaggtcttgggatgaatcagaaatctatccaggctatcttccagattccttaagtgccgttgttcagttctaatcacactaatcaaaaagaaacgagtatttgtatttattaaactcattagtttgggcagtatactaaggtgtggctgtcttggattcagatagaactaagggttcccgactctgaatccagagtctgagttaaatgtttccaatggttcagtctagctttcacagtttttatgaataaaaggcattaaaggctgaagtagtctgggatttttatctattaagctaaccatttgattcaggctgttgtaggacatgttcttcagtgtggacagctgtatggctgtgactggatcagtgtcctgctggtg

SEQ ID NO: 7789 - DNA, 1103 bp, Homo sapiens
gggccaggagcctcagggtgcccgttcgggaaaatgggagccgaatcaggatcaccccatgcgcccccgcacccttcccccgccggttccaacgcccgggcgcccctagaccggggggggggttctgaggtggacttcctgcgcctcctcgcagcttccctccaactccactaaacgggcacagagacgccaccgctgtcccagaggcagtcggctaccggtccccgctcccgagctccgccagagcgcgcgagggcctccagcggccgcccctcccccacagcaggggcggggtcccgcgcccaccggaaggagcgggctcggggcgggcggcgctgattggccggggcgggcctgacgccgacgcggctataagagaccacaagcgacccgcagggccagacgttcttcgccgagagtcgtcggggtttcctgcttcaacagtgcttggacggaacccggcgctcgttccccaccccggccggccgcccatagccagccctccgtcacctcttcaccgcaccctcggactgccccaaggcccccgccgccgctccagcgccgcgcagccaccgccgccgccgccgcctctccttagtcgccgccatgacgaccgcgtccacctcgcaggtgcgccagaactaccaccaggactcagaggccgccatcaaccgccagatcaacctggagctctacgcctcctacgtttacctgtccatggtgagcgcgggcgggcctaagcggtggcgggggccgggcgcggttcccggggcgcgcgctggggcgggccgggggtgtggccacccgcgggctctcccgcctccctgcgcccttctggaaaatggaggctgctcgaggtttccgaggacttctctggcgcagaaagtcggggcagctggttcttctcggctgtaccctgagaatgctccctcctaggccagggccgcctctgcacacccttcttttttaaggagaccttggtgtcctgaaatcctggggttgcaagactgccagcctgtgtgatcaatcctgcggttaggaaggtggagttttgctttcccatcttttcctctgcctccggcatttggccctaaatgccagcg

SEQ ID NO: 7790 - DNA, 1212 bp, Homo sapiens
tgaggaaatccaagaggaggccgagcgcatgttcaccaggtgaagacgggcacagtgagaggctgggaacaccagggcctgtctgggctgctttggtcttggggacacaacagcccctcgtccccgcctacctggcaaaacagacagcctgtcagggctccctgctgtatactgtgtgtgcagtgtgctgggggcctgacctagtgtcatgggaagaggcagcaggagagatccagtcccttgcctattcgccatcgttgctggctgggcctctcagggtatgtggcaatggacgtgcgcctgggagcttgcttccctgccgtgtctccaggaggaagccctgagtgcccgcaggtgacttgcacatggccttggagagctcacttggtgctggacaccccagcttgacctgtcgctgccaggaaatgggcaggggccaggctgggtgggagaggggaccagtggttcccaggcagcctcgagtgacaccctccttgtgccaaacagagaattcagcaaagagccagagctgatgcccaaaacaccttctcagaagaaccgacggaagaagagacggatttcttatgttcaggatgaaaacagagatcccatcaggagaaggtaggaggggttgggggagagtgagctgagcagtgggctctgcggaggcttggtgccatctgggagtttgattctgaaggtgttgatttggaagtagcagcctgtaggaggggtggtgggtaccaccgcgggtactgcgtgggccatgctgagaggggttgggatgccacagggaactatagcttgacccaagaccctggagtccaaatctgtggctgtgtgttgggggtgggtgtgtttgatctgggccctggagaatgggaaagatttccgtaggtgggatgagaaagagaagccatccttctgttaggtgagtgtgaccaggggtgtagaccacgtgccttgtcccagccgtcatattgtcatgcttgttttagtccccctcaggaatgattggggctgcagagtgctagggaaagaggctgggtcttggggttaggcttgggtgtgaaccccagctctgccccttagcagagcagtacggctttgaattgaatttctgcctctctgagcctccgttcctcatccctaaaatggggatagtggtctctgcctctcaagggcgtgctctggattaaggcagagcgtgtg

SEQ ID NO: 7791 - DNA, 1330 bp, Homo sapiens
tgcctcccaggtggtggtcgggacaggttcaaggagtgcctggctcatgcgagctctcaaggactttgtaaggttaagctgccagaggaaggttggaaggatgtgacacaagggcgttctctgggtttgatggtggtacaggcaggggcagggctgaagagggtgacagagctctctgtagggaggttggagagggtgacagggctctgtggtgggcaagggatggggaggttcatggagagccccaaggcagtgtctggtctgtggtctcctgcaggcaccccgctcagccaggctatcattcaccagtactaccacccaccgaaccttctggagctctttggaaccattctcccactggacttggaggatatcttcaagaagagcaagccccgctatcacaagcgcaccagctctgctgtctggaactcaccgcccctgcagggcgccagggtccccagcagcctggcctacagcctgaagaagcactgaggctggcctgcggccttcttggcagcctcgcctcctgtccatgtctatctgtctgtctgtcggtctctgtcttggtctgttgccctccttcttggcatgccattgtggagggcttggccaggtgtatataaacgtcctctgtgctgggtgtttctgctgcaggtggcaggtggccccaggcctgtttggaggatgggctgggtgggtgggtggggaagaaatgggcccagccccacatggcctgcagacagtgctctgtaaatagttgttttaatttagctgaatgttagcattttagtctttggcattttagcgtttgggaggtagattaataaagtatattccttcaagcctgctgttgataccatgaagactgggcgcctcagtcccagccctgtagctgtgtgtcttgggccaccagtggcctgcaggacgaaggtactgttccatcacctgcggtgtgcctcaggatcaccaggtgcaggcccccaccctcggagatgctgctgcagtgagtggttccactgcctggataacccttgaggaacacgtcagttactgtcacgatggggcaggtggagctccttcctattttttggggtgctccctgtttgtaaaggggagtttgttcattgggaaagacctgggtcttgacacggccctgccacttagtcccctaccctctccattccccaggctccacccgtgctgctcaggtgcaaatggacttgagagcatctatgtgctggtgaagcatgaggtctgagtagaaaaggggtatcccttgagaccaccttgggaccagtgcttgcaagcagcgagatatttccccagcaaa

SEQ ID NO: 7792 - DNA, 1150 bp, Homo sapiens
gggcgggttctgaagcgatgagagaaatgcccgtattaggaggattacttgagcccaggaggtcaaagctgaggtgagccatgattactccactgcactccagcctgggcaacagagccaggccctgtatcaaaaaaaaaaaaaaaaagaaaagggaaaaaagaaagaaagcagcagcatgatcctgacatgacagatgtgggagacccacagcctgcagacactgtgggctggaaggtgggaagggaggggccggtggaggtggagctgtttgaaagtgacacagcagcagtagaagcagtggtgggcgaagcccaggtgaccctcagaacgttgcacaagaacatcagggaaaagaaccagaatcctttaaggaaaatgttcttcatgtatgagagactaaagtgatttttctaagaaagttcagcccttctctgacttacctggacatttctagatacttccaaaggaccctctgggaatccatagcttcctaatctggagatgggaggtcataagggagacgctgtggggttccttgaagtttcttgggttcacagaggagccccctcacttggtgttctcccgtgagccagcctccacctgccaaagacactctggtcctcgtatagtgagtaatggggctcagggcctctccaacaacagagaggagctgatgctgtagggctgaccccgtgacttcctgagtcctcaccctgtccagtgctttgagattcttcccacctccccatcctcaccagccggatcgggcgctgtgcagtgtggtcagcatggtgaagaaagtcatttcctcggtgggcagtattcctctttatctctcattacactggaaatgttatttctgctgtatcatccgtgctcaacgttttagtctgtcaggctcaccttctctctggaaagaatttgcttaacttgacattccatgtgccgctaataaaatatattttgaaagaataagggtgtggttgggagtcactgttgacaaagaccagaatgtacacgagctccccccttggtctcaggtgtactacagagacctcgagatgaggatggtgtggagggtgatatgtgccaccttgtggagtactcgtgagtttttcagaagaactgaactttttctgagtgggtc

SEQ ID NO: 7793 - DNA, 1136 bp, Homo sapiens
caagttacaggggagtggggtgtccctggcctctaagaagtcccgactgtcctcctcttctagcaatgacagtgggaataaggttggcatccagcttcccgaggtggagctgtcagtttccacaaagaaagagtagcaggcctttgtatgtgtgtacatatatatatatataacaaaacatcagccttgggtggtgtgttcctatataaactccaaagggaaacacaccgactgcctcagcaatcatgcaaagaccttgcctggcccggtggcaagcgctgaaaaaccgaccgcctgtaggctcctggaactatacagataggtaaagagttccaagttcgtccagcccatgtgcaaagtcaacagtatttgccttaagatttcatatatatatatttttttgcattgactgctgagagctcctgtttactaagcaagcttttgtgtttattatcctcatttttactgaacattgttagttttggggtaatggaaacccactttttcattgtaatgactttgggggcttttgttagtaagggtgggtggggtgatgggttgcagacggaggtcaggtcttcctctttcctgagactggatctgttcaaacagcaaacgcccacagatggcccagaggtggtggtagtcagggtgtgtgggtgtttttagggttctttagtgttgtttctttcacccaggggtggtggtcccagccagtttggtgctgacggtgagaggaaattagaatctgtttgcaaattgtccaacccaccccctcaacatgaggggcttccattttctgtgttttgtaagggaactgtttccttcatgccgccatgttcctgatattagttctgatttctttttaacaaatgttatcatgattaagaaaatttccagcactttaatggccaattaactgagaatgtaagaaaattgatgctgtacaaggcaaataaagctgtttattaaccttgatgtcttgtgcctttgcattctgtgttgcgggggcgtgaaacctggggaagctgcacagccagctgtgagtgttcagaccggatccatctggtggcattgctagtttcatcagtgactttaagacagtgaccttcgggaggtagtgggagaaaatcttt

SEQ ID NO: 7794 - DNA, 1104 bp, Homo sapiens
ccaaagtcaagggcgatgtggatgtttctctgcccaaaatggaaggtgacctcaagggtcctgaagttgacatcaagggccccaaagtggacattaatgctccagatgttgatgttcaaggcccagactggcacctgaagatgcccaaggtgaaaatgcccaagttcagcatgcctggcttcaaaggagagggcccagatgtggatgtgaacctgcccaaggctgaccttgatgtctcaggacccaaggtggacattgatgttccagatgtgaatatcgaaggcccagagggaaagttgaaaggtcccaaattcaagatgcctgagatgaacatcaaagcccccaagatctccatgcctgacattgatcttaacctgaaaggacccaaagtgaagggtgatatggatgtgtctctgccaaaagtggaaggtgacatgcaagttcctgacttggatattaaaggccccaaagtggatattaatgccccagatgtggatgttcgaggcccagactggcacctgaagatgcctaagataaaaatgcccaagatcagcatgcctggcttcaaaggagaaggtccagaagtggatgtgaacctgcccaaggctgaccttgacgtctcaggacccaaggtggacgttgatgttccagatgtgaatattgaaggtccagatgcgaaactgaagggccctaaattcaagatgccagagatgaacatcaaagcccccaagatctccatgcctgactttgatttgcatctgaaaggccctaaggtgaaaggagatgtggatgtttctctgcctaagatggaaggtgatctaaaggcccctgaagttgacatcaagggccccaaagtggacattgatgccccagatgtggatgttcatggcccagactggcacctgaagatgcccaaggtgaaaatgcccaaattcagcatgccaggatttaaaggagagggcccagaagtggatgttaatttgcccaaagctgacattgatgtctcaggacccaaagtggacattgacactcctgatattgatattcatggtccagaagggaaactgaagggccccaaatttaaaatgcctgacctgcacctca

SEQ ID NO: 7795 - DNA, 1099 bp, Homo sapiens
tcgttttaagcttcccaaatttaatttttcgggctctaaagttcagacacctgaagtggatgtcaaaggtaaaaagccagatattgacataacaggtccaaaagttgatattaatgctcctgatgtcgaggtccaaggaaaagtgaaaggatccaagtttaaaatgcctttcctgagtatttcatctcccaaagtttctatgcctgacgtggagctaaatttgaaaagtcccaaagtcaaaggagacttagatattgcaggtcccaatttagaaggtgactttaaaggccccaaagtggatattaaggcaccagaagtcaatcttaatgcacctgatgtggatgttcatggtccagactggaatctgaaaatgcccaagatgaaaatgcccaaattcagtgtgtctggcttaaaagcagaagggccagatgtagctgtggatctaccaaaaggagacatcaacatagagggcccaagtatgaacattgagggcccagatctcaatgtggaaggtccggagggaggcttgaaaggtcccaaattcaagatgcctgacatgaatatcaaagctcccaagatctccatgcctgacattgacttaaacttgaaaggccccaaggtgaaaggtgatgtggatatttctcttcccaaacttgaaggggatctgaaagggccagaggttgatatcaaaggccctaaagtggacatcaatgccccagatgtggatgttcatggtccagactggcatctgaagatgcccaaagtgaaaatgcccaagttcagcatgcctggcttcaaaggagaaggccctgaagtcgatgttaccctccctaaagctgacattgacatttctggtcccaatgtagacgttgatgttccagacgtgaatattgaaggtccagatgcaaagctgaagggccccaagttcaagatgcctgagatgaacatcaaagcccccaagatctccatgcctgactttgacctgaacttgaagggacccaaaatgaagggtgatgtggttgtgtctttgcccaaagtggaaggtgatctaaaaggccctgaggtggacatcaagggccccaaagtggacattgacact

SEQ ID NO: 7796 - DNA, 1106 bp, Homo sapiens
agggagaatatgatgtcacaatgccaaaggttgaaagtgagattaaagttcctgatgttgaacttaaaagtgccaaaatggacattgatgtcccagatgtggaggttcaaggcccagactggcacctgaagatgcccaagatgaaaatgcccaagttcagcatgcctggcttcaaagcagagggcccagaagtggatgtgaacctgcccaaggctgatgtggacatctcaggacccaaggtgggtgttgaagttccagatgtgaatattgaaggacctgaaggaaagctgaagggccccaagttcaagatgccagagatgaatatcaaggcccccaagatctccatgcctgatgtggacttgcatatgaaaggtcctaaagtaaagggagaatatgatatgacagtgccaaagctggaaggggacctgaaaggcccaaaagtagatgtcagtgccccagatgttgaaatgcagggtcctgactggaacttgaagatgccaaagattaaaatgcccaaatttagcatgcccagcctcaaaggagaggggccagaatttgatgtgaacctgtccaaagcgaatgtggacatttctgcaccaaaagtagatactaatgctccagatctgagccttgaaggacctgaagggaagttgaaaggcccgaagtttaagatgcctgagatgcacttcagagctcctaagatgtctttgccagatgttgacctggatcttaaaggacccaaaatgaaaggaaatgtagatatctctgcaccaaagatagagggtgaaatgcaggttccagatgtggacatcagaggtcccaaggtagatattaaagcaccagatgtggaaggccaaggcctggactggagcctgaaaatacccaagatgaaaatgcccaagttcagcatgcccagcctcaaaggcgagggcccagaagtggatgtgaacttgcctaaggctgacgttgttgtctcaggacccaaggtggacatcgaagccccagatgtgagcctcgaaggtccagaagggaagctgaagggtcccaagtttaagatgcctgagatgcatttcaagacccccaagatctccatgcctgatgtggac

SEQ ID NO: 7797 - DNA, 1311 bp, Homo sapiens
ggacggctggtccctgtggtactcagagtatcgcttccctgaagaactcactcagaccttcatgagctgcaatctcatcactggtaagagagtgggtctgagaaggaaggagaacaaggtgtagcaagtgctgtgattccaaaggctgaatgttctcccttgccgcttcaggaatgttccagcgactggacaagctgaggaagaatgccttcgccagtgtcatcctttttggaaccaacaatagcagctccatttctggagtctgggtcttccgaggccaggagcttgcctttccggtgaggaaggtggaggagaggagtctctttagggtggggcagggatataagaagcactgtgttttatttctgagttgatggatgtttaggagggttcaggaatgcttataggaaggagcagttcatgttcacaggagacctggggtctgatgacatgtgtttgagctggaagtaacacaggtgtggggtggtgtctcataacttgaccacatgctggctttttatccccagctgagtccagattggcaggtggactacgagtcatacacatggcggaaactggatcctggcagcgaggagacccagacgctggttcgagagtacttttcctgggagggggccttccagcatgtgggcaaagccttcaatcagggcaagatcttcaagtgaacatctcttgccatcacctagctgcctgcacctgcccttcagggagatgggggtcattaaaggaaactgaacattgaaccctttcctgtcctgcctcctttgtgagtggtggcgtcttcaaggggagtagatatgttgaagcagggtactttctgtgttcgcagtacctcgatatgcaggagagaagacttcagaagaacagaaatagaggcctgtgttcacttgtgattttaattaccctgcctcctacggtgatgactgtcttctagctgggaaagagcggaagcagttggggcgggtagtgacatggggctttgtgactacctaattcttagggatcagattccaggcctttcccagtgaagggagagaatagctgctaataacaagagctaacgtgtataattcacagagcgcaaaggaactttacattatttcctgtaactgtcctgtgaggtaggtagctgacaatatgcaagggttgtagtttctttttctttttttttctttttttttttcagacaaggtctggctctgttgcccaggctggagtgtagtggtgcagtctcagctcaacctctgtctcccaggctcaagccatcctcccaccttagcctcctgagta

SEQ ID NO: 7798 - DNA, 1311 bp, Homo sapiens; identical to SEQ ID NO: 7797

SEQ ID NO: 7799 - DNA, 1205 bp, Homo sapiens
caggttctagagccttctttccgccaggcctttcccaataccaaccgctggttcctcacctgcattaaccagccccagttccgggctgtcttgggcgaagtgaaactgtgtgagaagatggcccagtttgatggtgagtctgaggagactgggaggcatatggccaggatcagggtctggtttgctctgcatcaaccccttgatttcctgtcttgcttttgggttatggggacctgcagaatgtagggtgtcaatgtggtagctaatattatgtgcagtttcgtgtacactcataccctgactaatttgtattactatatagatttgcgatataaagtatttgttgctgagtgtgttgttgctggaggacacacagtgaactgatgagcagtctggggcctaagttccttacttgtcccattcgtcagtttcctctgttaccttgcttgctctgtgtggttttggaggggtgtggaaagaggcagaacattcgttcactttcctgccttcctctgcaccagctaaaaagtttgcagagacccaacctaaaaaggacacaccacggaaagagaagggttcacgggaagagaagcagaagccccaggctgagcggaaggaggagaaaaaggcggctgcccctgctcctgaggaggagatggatgaatgtgagcaggcgctggctgctgagcccaaggccaaggaccccttcgctcacctgcccaagaggtaaggatattggagggtggagggtgtgggaccaaagaaggcctgttctcacctctgtatgtcccccctcacacacagctagagccagaattttaggttgtccatataaagttaaaggtatattttagttgcaaataaagcagctttctggctgataatcaggaattgggcaaattttgattgtggagagcaagtttcaagtacagccagtactggggaagattgaactcctattccaacaaagacaggaacagattttgatatagtggtaagttggttttgagcaagctcatttgaccatttgagagctctgagaacaaatacagggagaggcgtggggaggaagaaagtgcagagagccttgcggtgcgccacgcgcccggctgtgcggagatagtggatgccagagcagggtcctttgaattgttttgttttctgttttgctgaatcagactgtacaaaaattgctcactaagaaa

SEQ ID NO: 7800 - DNA, 1220 bp, Homo sapiens
acattcctttacccctcaatacttcaatgtgtgttatgcaagaacaaaggtattctagtgtaaaggtattctagtgtataaccacagtaccattatcaagttgaggaaatgttacattgacacagatgtaaacctttacagactttacagtccatactctaatttggtcagctgtcctgtcaatggactgttacagtttctctttcgtctgtaatagttcctctgtttttgtctttcacgacaatgacattttttgcagaggtagaccttttattttatagaattaaaaggttatctttaaaaaaaaaaagggttcctgtgaagattaaatgagttaatatgtataaagaccttagaatagagctgaataagctggaagtaatattatcttgagagatccctgcttagggaacagcagaaacatttcactcagttcatttctgtccacagccagtcccaaaggctccagaatctccatcgctggactcggccctggcttccccactggaccctcaagccctggcctgcaccccagcttcccctccagattcacaacctcctgcttctccccaggattctgaagccctggactttgaaaccccttcctcctccctggcgccccaaactccggactctgccttggcctccgagacccttgcttctccccagtctctgcctccagcttcaccactgctagaggacagggaagagggggacctggggaaggcctcggaactagcagagaccccaaaggaggagaaagcagagggggcagcaatgctggagctggtgggatccattctccggggctgtgtccctggggtgtatcgagtccaaactgtgccctctgcccggcgccctgtggtcaagttctgtcatcggccttcaggtctccacggtgatgtctccctcagtaaccggtacctttcttttttttgagacgacatttcactcgttgcccaggctggagtacagtggtgccatcttggctctctgcaacctctgcctcccaggttgaagtgattctcctgcctcagcctcccaagtagctgggattacaggcatgcgccaccacgcctggctaattttgtatttttagtagagacggggtttctccatgttggtcaggctggtcttgaactcccgacctcaggtgatcacctgcctcggcctcccaaagtgcggggactacaggcgtgaggcaccatacctttctttgg

SEQ ID NO: 7801 - DNA, 1198 bp, Homo sapiens
cttcatcactcatcttgactggtccaaggatgggaatttcatcatgtccaattctggggactatgagattctttactgtgagtggcagtggagcaggacatggggagagggtaattggagtgggttttgtgtagggggggctgttagaggtgttgttagataaggaagtggagatggggttaaagtggagttggaattatatgtaggagaaatttcgtgatttggaaacaactagtttcacaccatgtcttgttgacttgagggagttcaaaaatgcgctaagaaaagattgtttgggaaaagtttctcagggcaagtgtggagcacttgacttatctagggaggaggaactcgtggaagctgttagaacttcagccagagctcaggacaggacgcacacagggtgggtttcacagggggaggaggtgatgctactacggtgaccagatcacatgccatcgccgggtttcatgccagtctttccagtctggctttccctggcatcttccctactgagggcagggtgagagctgagctgggcgggctccctctccccaggggacgtggctggaggctgcaagcagctgaagaatcgctatgagagccgagaccgggaatgggctacctacacctgtgtgctgggctttcacgtctacggtgagcaggggcgtggaaacctgctggaagggtgggggacaaggtggagcccagtttgggcttggaacgctgggcgtgtgtcgttgggtgagagtccagaaacctgaagatccagcccaggaggcccctcgggaccgggaaggcttgcctggaacgcggcagtgggtggccgcggctgccggagcgcctgaaatggtgtagctctgggccgtgggtggcggtgggtaggaggtcgggctgaggccggccgctgtgctaggcgtctggccggacggctccgatgggaccgacatcaactccctgtgccgctcccacaacgagcgcgtggtggcggtggccgacgacttctgcaaagtgcatctcttccagtacccgtgcgctcgtgccaaggtgaggccgcggggatcgccggggtgggaccggtgggcccgagggctcagccgccaccgcaactcttccctccggcccaggcgccgagccgcatgtacgggggccacggcagccacgtgaccagcgtccgattcacgcacgacgactcgca

SEQ ID NO: 7802 - DNA, 1221 bp, Homo sapiens
ccaggatggtctcaatctcctgacctcgtgatccgccttcctcggcctcccaaagtgctggggttacaggcgtgagccacgcgcccggccaaggcccggttttagaggcactaagtcttcctccaccctgccctttacactttgaagcctatactgtatatgtcgatagggttagagaatccattccaggctcggggacccagaggcctggctgcagctgggcctggctctcactgcatccctcctggcacaggtactggtgtggcatactcggacagagaagcccaagatgaagcaggaggagcagctgcagcggcagggccggggctcagacccagcaattgaggtgtgatggcggccccaccccaactaccacctcttttcaggcacagaccttgtgggactgggccccaggcctgcccaggatgtggttttccaagtcctgacccttggagccagaagtggcccctctgcccctccaggcccagggcatggtcctgctgcttcacccctcccctagcctgccgtgtggcactgcccacaggctggggacaagcagcccttgtgttgagtcaggttggccctgtctagggtggaacagaaggacagatggacccaggagggagggcagctgagtaactgggtaacttattggggctgggcatgcactggggggctggaggagctgggctggacccttcccacctgagcatgctgacccccttcctacctccagaataaagaatctcaacctggaggggcctcttgttttcctttgcttcttacattgggttcttgctttctgatccttacagatgtgggctcctgttgctgcacaggtcgagccagggtccaaactttggagtcctagctgctccatcagacagaaatcagttctcccaggcccccatccccttgacaagaaaaagcaattgcttccatccaaaaactttattgagtctatatcagaatcagcctccaggccttctcatgtcactttcccatcactctgttctttgctgttccctggtggttctgactacaagggctaggccctaggacatctggttttctttcttaccccagtccagctcgctgactatccttagcccctctaatcctacgatccccccaacctggagccttggtaaggagttgtgaggttttcagacttgtccatccctccctcttcctcaccccaagctccaggcctctaggcct

SEQ ID NO: 7803 - DNA, 1522 bp, Homo sapiens
agcctggcatcaatgtggcatctgattggagtattcacctgcgataacccaagggatgttctgggttagggggagggaaggggagcattagtgctgagagatattctttcttctgccttggagttcggccctccccagacttcacttatgctagtctaagacccagattctgccaacatttgggcaggatgagagggctgaccctgggctccaaattcctcttgtgatctcctcacctctcccactccattgataccaactctttcccttcattcccccaacatcctgttgctctaactggagcacattcacttacgaacaccaggaaaccacagggcccttgtcgccccttctctttcccttatttaggagccctgaactcccccagagtctatccattcatgcctcttgtatgttgatgccacttcttggaagaagatgagggcaatgagttagggctccttttccccttccctcccaccagattgctctcccacctttcatttcttcctccaggctttactcccctttttatgccccaccgatacactgggaccaccccttaccccggacaggatgaatggatcaaaggagtgaggttgctaaagaacatccttttccctctcattctacccttttcctctccccgattccttgtagagctgctgcaattcttagaggggcagttctacctcctctgtccctcggcagaaagacgtttccacacctcttaggggatgcgcattaaacttcttttgcccccttcttgtcccctttgaggggcacttaagatggagaaatcagttgtggtttcagtgaatcatggtcacctgtatttattgctaggagaagcctgagggtggggggagatgatcatgtgtgctcggggttggctggaagccctgggtggggggttgggggaggactaatggggagtcggggaatatttgtgggtattttttttacttcctcttggttcccagctgtgacacgttttgatcaaaggagaaacaataaagggataaaccataaataactggtggtagtctggattctagttctagcctgagccacagaccctagaagcctagagaccttacatttgctttcctttttttttcttttttgagactgagtctcactctgttgcccaggctggaatgcaatggcatgatctgggctcattgcaacctctgcctcccaggttcaagcagttctcgtgcctcaacctcccgagtcgctgggactacaggcatgcgccaccatgcccagctaatttttgtatttttattagagatggggtttcaccatgttggccaggctggtctggaactcctgacctcaggtgatccgcctgcctcggcctcccaaagtgctggaattaaaggagtgagccactgcgccctgggtctttttttttttttttttttttttgagacagagtgtcgccaggctggagtacagtgtgtgatcctggctcgttgcaacctctgcctcctgggttcaggcagttctcccacct

SEQ ID NO: 7804 - DNA, 1369 bp, Homo sapiens
aggagagttggtggaaagagggaaaacagcccagagactgagggcctagggaacttgcaccagatgacagctggcttttgctcctcactacccgtctcttctctcctcacccagcacatggcgactgctgatgggctgagacagcgctctgggggcatggaacgcccctttgtcctggccagggccttcttcgctggctcccagcgctttggtaaggtttagagaatggagctgtggcagaagggtgtgaaggccagatctcaggagccatggacctggacctgcctctctgaggaatgggagccacacactgcatctgtttcctctcagctatgcgctttgaaggaagtcagggtgtgggaggtccactccttgttcaaatgttcttgtgaactgcatcttcagcagggttctggggacccagagcggatgtgggaggtcagccatgtaaaaagctgaactcctttaccatgtgcaagctccccacttcttgtcttcctcaggagccgtgtggacaggggacaacactgccgagtgggaccatttgaagatctctattcctatgtgtctcagcttggggctggtgggactttccttctgtgggggtaagacagggaggaatttggggtcttggtttggtgggaaaggggcaaagtagagggcacaggaccaaggtgttgtaagcaaagagagttgagagtccaagttagggccttgggaagtttctcaagcagtatctctccttcaccctcttttccaacctgcttcctctctctcctctaccagcggatgtgggtggcttcttcaaaaacccagagccagagctgcttgtgcgctggtaccagatgggtgcttaccagccattcttccgggcacatgcccacttggacactgggcgacgagagccatggctgttaccatctcagcacaatgatataatccgagatgccttgggccagcgatattctttgctgcccttctggtacaccctcttatatcaggcccatcgggaaggcattcctgtcatgaggtgaggcattcacttgggctgtgaagagtgggctgaggtggctgggggtattagggactgggcttcatctctgggtctctttcttcactcactacagccttgtaaaggatggaaaatcattaaggtcaagagtgaaggggagcttaatggagatgaataatagtaaacatttaaagaaaattgacagcagtcataagctctttcagaaaaataaaacagggtaatgggattaggtggtcataaaatccctttttgaggccgggcacagtggctcacacctgtaatcccagcactttgggaggccgaggtgggcagatcacctgaggtcaggagtttgag

SEQ ID NO: 7805 - DNA, 1099 bp, Homo sapiens
ggggttggaaaatgggagggcaggaggtgtctgacccctttgtggtcacctatacagaccctgtttgggaagatgatggactacctgcagggctctggggagaccccacagacagatgttcgctggatgtcagagactggcatcattgacgtcttcctgctgctggggccctccatctctgatgttttccggcaatatgctagtctcacaggtacatggttttccctgcctcattcttctgctcttttcttgtcgggtgattctatgtgttttcagagatcctgtgccccagcttgttttctaggtttatacccctcagcctgcctctagttcacaagcctccctcagtttctgggtgttgggcctgatcctcgttgtgacccccatccctcatgaacctgcaggaacccaggcgttgcccccactcttctccctcggctaccaccagagccgttggaactaccgggacgaggctgatgtgctggaagtggatcagggctttgatgatcacaacctgccctgtgatgtcatctggctagacattgaacatgctgatggcaagcggtatttcacctgggaccccagtcgcttccctcagccccgcaccatgcttgagcgcttggcttctaagaggcggaaggtaaggggttgcagtcacgcttggtcttctcagggtagggctgaagcatagtttagccttaaagagacctgaacacccctgttccttgcccccagctggtggccatcgtagacccccacatcaaggtggactccggctaccgagttcacgaggagctgcggaacctggggctgtatgttaaaacccgggatggctctgactatgagggctggtgctggccaggtaagcagacccagaattgagggagagttgattggccagcggggtagaatggtggctcttttgccccttaggggattgagagccacccttaacttctcccaggctcagctggttaccctgacttcactaatcccacgatgagggcctggtgggctaacatgttcagctatgacaattatgaggtagggaaggcctctccccatgacctgcgtctgtctgttccacctgcctccctga

SEQ ID NO: 7806 - DNA, 1174 bp, Homo sapiens
tgagccgagcccgaagccctgaagagttgagtttggccacccagttatatgcagggctagtggtcagcctctctggcctcctgcccctggctttccgaagctgtctggctcgggtgcatgcagggacattacagcctcccttcacggcccggttcctgcgcaacttggcactgctagtagggtgggaacagcagggtggcgagggccctgcagccctaggggcgcactttggggaatctgcctcagcccatctgtctgacctggctcctctcctgctacatcctgaggaggaagtagctgaagctgctgcctctctcctggccatttgtccctttccttctgaagccttatccccctcccagctcctgggactggtaagggctggggtgcaccgcttctttgcctctctgaggctgcatggacccccaggtgtggcctcagcctgtcagcttctcacccgcctgtctcagacatccccagctgggctcaaggctgtcctgcagctgctggttgaaggagccttacatcgaggcaacacagaactgtttggtgggcaagtagatggggacaatgagactctctcagttgtttcagcttctttggcttctgcctccctgttggacactaaccggaggcacactgcagctgtgccaggtcctggagggatttggtcagttttccatgctggagtcatcggccgtggcttaaagccacccaagtttgtccagtcacgaaatcagcaggaagtgatctataacacccagagcctcctcagcctcctggttcactgctgcagtgccccagggggcactgaatgtggggaatgctggggggcacccatcttgagtccagaggcagccaaagcagtggcagtgaccttggtggagagtgtgtgtcccgatgcagctggtgcagagctggcctggccccccgaggaacacgcccgggccaccgtggagcgggatctccgcattggccggcgcttccgcgaacagcccctgctctttgagctgttaaagctggtagcagctgcacccccagccctgtgctactgttccgtgctgcttcgggggctgctggccgccctcttgggccattgggaagcctctcgccaccctgacacgacccactccccctggcacctggaggcatcctgcaccttagtggctgtcat

SEQ ID NO: 7807 - DNA, 1114 bp, Homo sapiens
gaagacgaccccgatgtggacgagcctttagagactccccttggacatatcctgggacgggagcccacttcctcagagcaaggcggccttgaaggtcctgactgagggtccacggtgtgattattcaggagggtccgaggagaatctgaagggataataataccgattgtttgtttgtaggatctggttctgctgccggagaaggcaaacccgctttgagtgaagaggaaagacaggaacaaactaagaggtacagtaacaacaatctcacgtgtctgagggtcgtcttccatctctccccagtacacgtctggtcaaagaaccttgacctttccacatttcctctttcttggcattttcttttcctttaatctactttgggatatatgtcgcctaattttgtttattgtaaactttacaccttcccactctgtccatttctcttgaactgttttccctcggcaacacaggatgttggagctggtggcccagaagcagcgggagcgtgaagaaagagaggaacgggaggcattggaacgggaacggcagcgcaggagacaagggcaagagttgtcagcagcacgacagcggctacaggaagatgagatgcgccgggctgctgaggagaggcggagggaaaaggccgaggagttagcagccaggtctgggcaggggaaatgatggatagcagatgagaaagaaatcaagatttgctttgttgatgtctgacctaatttcttcttgtctacatttcagacaaagagttagagaaaagatcgagagggacaaagcagagagagccaagaaggtaggtgactgagaagacgccacgggtaatggagtgggcaggttagtaaatcttttccagcttcagagggaaagcatgggcttatatgatctgtttcacctgaggatgggtgagtacctgattgactgttttactttgccctttagtatggtggcagtgtgggctctcagccacccccagtggcaccagagccaggtcctgttccctcttctcccagccaggagcctcccaccaagcgggagtatgaccagtgtcgcatacaggtactgattctaattcttatcttcctcttgggacccctttgtt

SEQ ID NO: 7808 - DNA, 2966 bp, Homo sapiens
agcagaaggatgagtgttatgcctcttcatcctcagccagctctggctccaagtgatggggtttccctctcttctagtggcagagttactactaccaccacccccaggacagagaccgatactacaggaattactacgggtaccaagggtatcggtgaagcccctgccatggtcacctgtcagccatgaagctgaatctctgggggtgccaggcacccccgcaaaacacaaccaaggaaaacaggggctgtcggggtggggctgagctgccggggaggggtggtggggggggagggtgctcaagcaggggtgggggaggggggaggtggaaacaaacaacaaaactgtacattttttttaaagtttgttgaaaagaatattgtcttattctataaaacatttcaaacctagttagagatttgtaatcaaaaaacatttgcgcagaaagcagcacttagggctgcctgttctataccctacagtcagacaggaaaagaactgaaaatggcacccttctgacattctgaggcagctggactggcagccaagtaaaggagagtgatgaggtggtgtggggagggtggggaggcagcgcgagggtgctctccacagcaggtaggagcaggcaggagtggggacagagggagagcttgtgactgggacagtgaaaataaacgattggctcttatcaatcacttgcaccaactaaccgtttgtattttctttaccgacctttcccttttgggatatgtggtctggtgggctgggaggcttacagtgtcccaactctccattttcctgtgcctttgtgctgtttggctgaggcatggagactgccagtgggtggttctattttacaggattcccaggccaagaaagcctggggactgtccttgatggcagagcagaatagcctgccccttctatagacccattgattaattcctgtaaaatcttggggagaatgggattgcagccctcagcctaaagattgtgatttgccagtctctagtctctgtcttccaaggttgagagaggtgggaggtctctgaaatcatccctgttagagtgtctgtcctcttacagtgcgagagaaggaacgtttctcagggtttcagctcacacgaaaacacagcaggattcttttcactgcagcgggatatgtatataggtgaatcctgtggtgtgggctcacaggcccaggtgctgagaatagcaactagcaactattttctacagtgtggagggctcgtgccctgctggtttttttgatacacaggtagagaatgaatagaagaggggagggtggtgggggggggtgggaggcagctcagtggggctgctgaaccttgggaagagtgtgagtgtgaacgtgtgtaaatgtgcgtgtgaaagggagcaccccttcccgacttctagaaacaaaattccttttggggcgctttccctgtgtgtccccagagaggcctctagccaggagccttcagttgggatagtttcatttgtgactttaccaataccctcccagttcttgatagacagctgtaggttgctgggttcaagaatatgggtgggatatggaatgctctttcaatgtctagcttcagttttcattcatcctcctgctcagcactgtcagccaagagcttactcagcagacaccacatactgcagcagttcctagtgagaaaatctgtgccactagaaaatgcttcacttccatttcctcacctgggcagttctctgtttaaaattgtgggctgatttggtcttcctctcctcctcccactgttactgccctgcagcccttgttcaggtgtacagacccttattctggcctctagtgtccttgtctgtcatgacacacccttccgcccaaatacctctgaccccaaggctggaatggggctggtaggagataagtttgcttactcatagtcatgtcctttctcttggcacctgcttccctgcggtgtcctcaaatggatttctgtgtggcagtggagtgattgcatgaatttttctgtaacacattaactttgtattattattaagggagtttgagaaagctttgcttataatgtcaaggcaaggaggtaaaaactggagcccaaagaaattcccttagggcaagattatgttataatagaaaattgaatttcctgaggcagtggctgccaccccttttcagatgtttagtcctgcaaatagcatctttcttgtagtctgtgacatggatggggatgctagggcccttaggggcaaggggactaaactaaatcaagttgagtttttttccagcaggggttaggggaggtactcgctgttgatatttgacactagaaagtaatcttttttacaaaactgtttttctaggtgggtggaaagtgaaactgccacatccttgttggtttagtccaagagatcatttgcaacaacagtagatgtccgggttttgtttctgtctttttattatgaaaaactatgttaagggggaaaatgtggattatggtaaccagaggaatccctagccttgttttccttagaagacttgtttagtgttttatcagacgtctgttgtagttgtagacaggaaagcttgtgagaaaaacaccacatggagcctgtaaatgtttttgcacaacctgtaaagcattcttggaagtggccagtaaaaaggggttttaccatttaaaaaaaaaatgtaactgtgtcattgtttacatctgtaactttttcctcccctgttctcattacaccattctggcgaaaatgtaggcaaagtagcttccagttttagaataaataaccatttggattgaattcaccctatctcctgtggctgcactgactggggcggagggtgtcactgggttatttattcattttttaatgcctctttctcaggtcgcatgggctccaaccaaggaggactctcctcttgcatggtggctgccgttccctcc

SEQ ID NO: 7809 - DNA, 1496 bp, Homo sapiens
actaaaaatacaaaaaaaaaaaattagctgggcttggtagcgtgtgcctgtagtcccagctactcgggaggctgaggcaggagaatggcgtgaactcaggaggtggagcttgcagtgagccgagatcacgccactgcactccagcctgggtgacagagagagactccatctcaaaaaaaagaaaagattatcacatcttctaaaaacatacatactagccgggtacggtggctcatgcctgtaatcccaacacattgggagtctgaggcgggtggatcacttgaggtccggagttcaagaccagcctggccaacatggcgaaaccccatctctactaaactgctggggaggctgaggcgggaggatcacttgaacctagaagccggaggttgcggtgatctgagattgcgccactgcactccagcctgcggcagtgagactgtctcaaaaaaaaaaaaaagaaacatacataatagagcagaataaaaacaaacctgtcctttacctgtcatctcatattttgcaagggctgaggtcctcacagagaagagaaataggctgggcgctgtggctcatgcttgtaatcccagcactttgggaggctggatcacctgaggtcaggagtttgagaccagcctggtcaacatggtgaaaccccatctctactaaaaatagaaaaaaataaccaggtgtggtggtgtgcactctgtaaccccagctactcaggaggctgagacaggagaatcgcttgaaacgcaggaggcggaggttgcagtaagcagagattgcatgccactgcactccagcctgggcaacaagagtgaaactccatctcaaaaaacaaaacaaaaaaaaaatgaggaagggcatttcttgcttagtgccttttaaacacctgatagaactctctggaagctgtgttggacatgggtgcaagttgcagtatggtgcagtcctggctcagtaggaggttccatcaaccaggagcccctttgttattctgtttctgttttttcatggtggataatgtctatgatgttgtgggtactacataggtgagactatatagcacagcctctacctttataagtggtggcaataagcatgtgattaactgtcatacaaccacagagcaaacagatttcagggaaaaaaaaacacactttagtcctttatcaataacgccccctttctcaatgggctagactcctctttgttcttccctatacctttaaagaatacaactatcagcttacaagaaaaacttttcctaagtccaaggacaggagaggcgcagtggctcacccctgcaattccagcaatttgggaggccaaggtgggtggatcacctgaggtcaggagttcgagaccagcctgactgacataatgaaaccccatcgctactaaaaaaaatacaaaattagccaggtgtagtggcacgtgcctgtaatcccagctactcaggaggctgaggcaggagaattgtttgagcccag

SEQ ID NO: 7810 - DNA, 1218 bp, Homo sapiens
gcctgtagtcccagctactcgggaggctgaggcaggagaatggtgtaaaacctgggaggtggagcttgcagtgagccaagatcgtgccactgggcgacagagcgagactcggtctcaaaaaaaaaaaaaaaagttggacattcaggttgtattcagggccatatgcaggtatatgtgaatgagtttctgtaggttacatttatagaaatagaattgctagatcaaagaatatgaacattaaaattgtaaaacatgaataaggtgatacactgtcttccagaagaataccgcattcatgttttacaattttctggtggatccaatgcagtctgggcccttccttttaggttgcactccaggacttgcagacgaactccaagattggggcactcctgccttactttgtttatgtggtcagtggggtaagtgaccaggctgggacagggagaatgttttataaggaagagatgacccagcaggtgtagggctcatggcaagtgctgtcagaatggtgggctcctgcctgtcccctcatgtccctgtaagctaccctcttctcccaacaggtgaaatctgtaagccatgacctggagcaactgcaccggctgctgcaggtggcacggagcctatttcgtaatccgcacctgtgcttggggccctatgtccgctgtctggtgggcagtgtcctctactgtgtcctggagccactggctgcctccatcaaccccctgaatgaccactggactctgcgggatggggctgccctcctgctcagccacatcttctggtagccactgggcctaaacctgcgggtgggattgctgcagagccaagtgggttggggtaaggaaatggggcgaagcctctggctttgagagtctatgagaagatggggaaccttttccctaggagcgtcctagctggtgtgctgtgacacactgggattctgaaaatggattacaaatacgccaaggtattggttcttcagccctcaggtcctaggccagtcacccctggcagccttcttcacttaaccccagcactcccgagtgtgctgtacagatgctattctctttgtgttgtcttgtgccctgttgggtggcaccatgcctcattcccctccctaactgaatggtgctcccacaggactcatggggaccttgtaagtggcctctatcagcatatcctgctatccctgcagaagatcctggcagatcc

SEQ ID NO: 7811 - DNA, 1140 bp, Homo sapiens
tgagttatgattgtgccgttgcattctagcctgagcaacctgtctcaaaaaaatttttttaatttaaaaaataaattagtcgagcatgatgtcacatgcctgtagtcctagctacccaggagtctgaggtgggaggatctcttgagtccaggagtttgaggctgcagtgaactatgatcatgccacggcactgaacttgggtgacagagtgagaccctgtcccaaaaaaaaaaaaaaaagaaaaaattttaaaagattagaaaagatctcagagctaagcgtagggactgggggtatggggagccagctggctgtcttcaccagggtctcctccctttgttccttccaccctttgcagttgaagtctgagcgggaattggacaagataaaggggctgaagctagaagagctctggctcgatggaaactccctgtgtgacaccttccgagaccagtccacctacatcaggtcagttgtagcctgtgtctcccctcctggggaccttcaccccctgggaggctgagctaatgcatcctgaccagggcccgtctgcggagatgtgcagccctgagctggaaccacctgtcctttgagaggatcgcgtgctccccactttggtctgtctgtgtcttccagctttgtcctgagatgttctctcttctcttctgacttgactatctgtttgctgggtctgtggcctttctctttcttcctgaacacaaccttttctagaatctccctaccctgttgttccaggaaaggcatctcccctttctactctaaccagagggtatcttgtacataccctatagatggggttgccttgtgccaagagcctggtgtccatgggttgaggaagccctccctacctgggacttcctactgagatgggccttccctcctttgtactgtgatggcccctcttgcccttgcgccaagagggacccttttctcaggatccacttgcccagggctgttgctgtccatgctgaggttgaggcctcctaggggctggtggcatgcaatctgtctctcttgcccagtgctatgagctgggctctccctgaagaagaaacctgggttccccaagatgtgaccagagctggggccccgccagcaggcgagggaatcccaaggcag

SEQ ID NO: 7812 - DNA, 1152 bp, Homo sapiens
agttaaaggacatttctggccatggaaacgaagagctcctcacaaaacttcaaagtggcagtttgagaacaaggagaatttttagaggatccttaaactggtcatatttgtaactggcgtctgcactgtatagacaaagtactgagtggcagatttcaggtggctttcagaggtctgatttgtgttcagttacacttttgggtctcacatttctacatcctgcttctctctaattccagtttctacttcatttttcaaaagccctacacagttttccagtaacttttccctgatgctgccctcccacagagagggttctttcctgtggatagggagcggagtttgcatggagatggcctctgtcgttagtatgtatctcttccaatagttcagagtactagaagctatgattgccacaccaaaccggaccagttacttacttctaatttgtgttcctgtttctaactctagaacacgatgatgaacgcgttaatttccctcaaagaaagaagaaaggccggggtcccttccggtggaaatatggtgaaggaaaccgtaggtctggaagaggcggttctggtattcggtcttcccgccttgaggaagatgatggagatgtggcaatgagtgatgcccaggatggtccccgagtacgatagtgagtgaccagttggtctggtttgaatttagtggctcatgagattatatggcccttttactgtccatgtcatttcctttcccacctgttagagtgagaaatgccaggactagcttagtgattaaacagtcttagttgtagtcccactaacagtgcaggaaggcctttgagaagactttcctagcatttgtggtcattttattctctgcttacccacagcaacccctataccacccgacctaaccgtcggggtgatacttggcatgatcgagatcgcattcatgttactgtgcggagagacagagctcctccagagagaggaggggctggcaccagccaggatgggacctcaaagaactggttcaagattacagtgagtactttgagaaagtagatggtacagtagagataggaggccacgctgagagtggagatgtttaattttattccacaaaaattattattattattttttttaaatggagtcttgctct

SEQ ID NO: 7813 - DNA, 1739 bp, Homo sapiens
gccagcgttacagtaatgttccaggtaggtgtacatggtttatgctcttacagaggagaccttgtagataaccactccatgatgaacacaaaatgacaagcatatggctgaactttcaagtgatgtcatcttactactgagaagtgagagagaggtcttaaggggtctttgaatgactatttttaggtacataaaatgctttcctctgttgtctacagcatctcataatctatcctggggaattcagctgcctcccagggtgaatacaggtaattatccaaattggtgtatgtcatctttgtaaatgttcaagaaaacaagtggccggcggaacaatgttttttggcgccttccatcttgttcctcttgaaatgattttctggggagggagatcgcaacccggtactacagttcttgtaagggtgtgctgttaccctcatccatatatcgatcacgttactgtcagatgatttgaattgataagctgatgttctgtgaggtacaaaagttaatagcatgttagagttctgatggcagttgttgtttatgaataagcttcattccatcctaataccttaaaataactaatttgctttcctttccaggtattcctgatgacagtctgcctctatcttacagtaagttgtttttcgaattctatgggcctattatctaatagataacttagccattttgatatttgttaccaaagcctgcttaacccataaagttttctggttcctcttgttctctgtagtgatgtttctagatagatgcccactgatatatgccccttttttctcagatagatgcccactgatctgcccagggtcagacgaatgcttgtcagttgtagctttccaggattctgctccaatgaggaggaaacatcctgccttacccctgttttagcctgggaaccagtaattgtgaactcaccagggttaacatgaagagggcatgagagcttattccataaggaattgtctgagacatttggttaccttttcttagtttgtccattagcaaccgtaactaaaatagttttggctgtttgggataattagctaattgaatgattttttgattcaggagcagcttgttgctatataccattgaaaagccttcagagctgagaggttagttgatattttttgttccttacagcttatgccaccaagtaggcagtttctatgatgaatcaaactagctcactatgaccgacagtgaaaatacatgaacacctgagaaactggagaacgcagggagtggggggtaaccatgtctgaggaatctttcacccacagctttgtttttctctaggtactactaaccaataacctgcttggctcaaaggtgagtaatttcacggtattcaatgcactcagtatatagggtaggaaaaagtgcctttttaggcctgtgtttgtgatgacttacatggaatctcgttcggctgatgacttgctgttgagactctgaaatctgattttctgagaatgatgggtgggaacaacataatgcgggatatgagaagcactactgacttggtcttcctcctttcagggccagcaccttctctctaaagcccaagaggagtttgaggtaaatggctttgcaatagttaccatcaatggctgctatataaaattttctgtgatttttgtgtgtgatagcactgtggtctgggtgaatgtacacagacataactggcttaacccaaagtctttgatctcctg

SEQ ID NO: 7814 - DNA, 1739 bp, Homo sapiens; identical to SEQ ID NO: 7813

SEQ ID NO: 7815 - DNA, 1739 bp, Homo sapiens; identical to SEQ ID NO: 7813

SEQ ID NO: 7816 - DNA, 1739 bp, Homo sapiens; identical to SEQ ID NO: 7813

SEQ ID NO: 7817 - DNA, 1739 bp, Homo sapiens; identical to SEQ ID NO: 7813

SEQ ID NO: 7818 - DNA, 2080 bp, Homo sapiens
gagtgcaagtagccatgcaaagttgggaaaaccagacggcggccggagccgtgaaccaggggcaaatggaggatggtgttggggtagtcactagcctgccggaatggaagaagaggggcgtttgggggcggtaaggcctaaaggacactggaggggcctcgggatttggggcaggatcacaggcctagtccacttaaaggtggctccgtgccaggccttcccagaatcaggttgaaaagaactttagggttagacaggttggagatgagaaattggaccatgcaggaagtactgtcggaggcgtgttcctgactttactaccctgagccgcccacggctggggcagtccccgaggttccaccttaaggggcgggccggggcggggctccgctgccccttcccagaggccgcgcctgctgctgagcagatgcagtagccgaaactgcgcggaggcacagaggccggggagagcgttctgggtccgagggtccaggtaggggttgagccaccatctgaccgcaagctgcgtcgtgtcgccggttctgcaggcaccatgagccaggacaccgaggtggatatgaaggaggtggagctgaatgagttagagcccgagaagcagccgatgaacgcggcgtctggggcggccatgtccctggcgggagccgagaagaatggtctggtgaagatcaaggtggcggaagacgaggcggaggcggcagccgcggctaagttcacgggcctgtccaaggaggagctgctgaaggtggcaggcagccccggctgggtacgcacccgctgggcactgctgctgctcttctggctcggctggctcggcatgcttgctggtgccgtggtcataatcgtgcgagcgccgcgttgtcgcgagctaccggcgcagaagtggtggcacacgggcgccctctaccgcatcggcgaccttcaggccttccagggccacggcgcgggcaacctggcgggtgagtgcagcgcgcccccgtcccgggtacctccggttgaatctggtggcttgcaccgaccccctcccctgtccccagacggatctagatggttcttccctccatcccgtaccgacgactgttcccccttcccccaccccctccccggcacattgtccttccctcctttctttgaagaaagccgacccgcccctcactccgtcacgagggtgggtgactcagcgtcctccttccccgcggcgccagaagccagttgcaaccggtttctgaagtaatgtgcaggactccttacatcagctcctctgagtctcgtgattcagccttgcctccctctctccccctttgccccctccccgtcccacccttaggcgctgggagaagggagggtggggaggtcaggggcctctcagaggggcctcacttgttaacccagcccccatttcaggtctgaaggggcgtctcgattacctgagctctctgaaggtgaagggccttgtgctgggtccaattcacaagaaccagaaggatgatgtcgctcagactgacttgctgcagatcgaccccaattttggctccaaggaagattttgacagtctcttgcaatcggctaaaaaaaagagtgggtatcctggggttcccaaggaaacagctagaaaggacttggccagaggaaaagtaggctagaacttttgtctggtttcctgctaactggctctgagttttcctagggcaggtagaggggagatttgttagtcttcagcctaaaatggatttgtccagtcgtctgggggctttctacttggctgtggaatcttgagcaggtcatttaacttctgggcttcagtgcccttatttgcaaaatatagatatttactaaaccagtggttttaaacttgtaaaacagtaggtttttttggggggggggaatcccaaatattgttttacgactcgatatagacacatgtttaaaaaggttcactttgggagtggggaacacaggggccacttctctgcactataaactttctgccttccaatatctttttttttttttgagatggagtctcactcttgtcacccaggctgcagtgcagtggaacgat

SEQ ID NO: 7819 - DNA, 1150 bp, Homo sapiens
tatgactgtggacgcgtctccctgcttctctgggtctgtttcttcatctctaaaataggtatgctaacattccaatgctaagtgttaaacgaagttatgtttatggacataccttttctctggggccttttctgtggctttcaaagttgaagctgtgtgatttgccagaggcaagaatgagaagtaaaatgctgtagcactaagaaaatgagtggaagggtagagctggaggggtccaaaggctaagcctttgtagtgcaggtggggaagacccaggcaaggcacaggactctccccagctcccggggaagtgtgtggtgggtgaggtttagtgtgggctggaattttctgagccttttcctgagaactgatgtctgtcctttattcttctgccccctataggatgctctggagttttggctgcaagctggcgtggatgggttccaggttcgggacatagagaatctgaaggtgagttccctttccacattagggacaaagcttgggcgagaacagagggactcagctagagcctcataatattctctggtccttgattctgcttttttctttctaggatgcatcctcattcttggctgagtggcaaaatatcaccaagggcttcagtgaagacaggtgggtgcaggagccattctgctgactcagctccaatgtgggaacccctcagtggagtgctaggcctaagaaggggggattcctagtctagagcattttctttacctttattctttctttagctttttttttttttttttttttttttttttttttttgagatggagttccgctctttttgcccaggctggggtgcgatggcgtgatcttggctcactgcaacctctgcctcctgggttcaagcgattctcctgcctcagcatcccaagtagctgggattacagacgcgggccaccacacctggctaattttgtatttttagtagagacggggtttctccatgttggtcaagccagtctcgaactcctgacctcaagtgatccacccgcctcagcctcccaaagtgttgggattacaggcgtgagccactgcgcctggccccattctttcttgtgctaaccttgaactcctccctcccctctgcaggctcttgattgcggggactaactcctcc

SEQ ID NO: 7820 - DNA, 1527 bp, Homo sapiens
cccagggctttttttttgagacagggtctcactctgttgcccaggctggagtacagtggtggagtcatggctcactgcaagctcaaactcctgggttcaagtgatcctccctcctcagcctccccagtatctgggactatagggatgtaacactacacccagctaatttttaaaaattttgtagtagagatgagggctcattatgttgctgaggctggtttcaaatgcctgggctcaagcaatcctcttggccttgacctcccagactgctggaattacagatgtgagccaccatgcctgaccccaggcctttttaaagtcctattttctctgcttttcagcctatggaggctccagtcatgctgtgggatgagtccagcttccctgacatcccaggggctgtaagtgccaacatgactgtgaaggtaagagttctagatgggtagaaactgaccggtggagggtgggctgggcttgtagaagtctgtacccaggggagcccctcacacgcttctgctatgtttttatcattcttagggccagagtgaagaccctggctccctcctttccttgttccggcggctgagtgaccagcggagtaaggagcgctccctactgcatggggacttccacgcgttctccgctgggcctggactcttctcctatatccgccactgggaccagaatgagcgttttctggtagtgcttaactttggggatgtgggcctctcggctggactgcaggcctccgacctgcctgccagcgccagcctgccagccaaggctgacctcctgctcagcacccagccaggccgtgaggagggctcccctcttgagctggaacgcctgaaactggagcctcacgaagggctgctgctccgcttcccctacgcggcctgacttcagcctgacatggacccactacccttctcctttccttcccaggccctttggcttctgatttttctcttttttaaaaacaaacaaacaaactgttgcagattatgagtgaacccccaaatagggtgttttctgccttcaaataaaagtcacccctgcatggtgaagtcttccctctgcttctctcatagcaggaatttctctccttcctcccctcccatgcgtctcctccaactccttcattatttatgtagggtcccagggccagaggagagggggcctcccaaagtcaacagcatggaggtgtcagggctgggaaagcacccatgcctcacccatgctgggccacggggctctctggacatcttgggtcttgccgactcttaacttcatccccttcagcaaagggctctagccaaacatagttagttttcctgtttttgcagacttggcctttcacggagagtaggggtgggatggtctggtttttaaaaggtatttctaaaggatactagaggtcatgcattcaagaatttgttgaacactcagcacataccagaaactgtccctgttctggggtcacagcagggaacacagtacaaaaattcctgcctccttggggctcat

SEQ ID NO: 7821 - DNA, 1127 bp, Homo sapiens
gaagcacatcagaactgatgagaaaaatatggccatggcttccctaaagatcaacacaaatctgttttccctgaagaccaacacaaatcttccctgaagatcaggagaaagctttgcaaataatgccataataaccttataaagtaggtactcgtgttatttctttttatagacaaagaatctgatctcacagggtaagtggcttgcccaagcatggcttggttcatttcaagacagagactgaaactcagatctgagatctgcaactgttatgggttgacttgtgtccctccaaaaaatacattgaagttttaactcttcgtggatcagaatacgacctcatttggaaatagagttgttgtagatgtaattagctaagttataatatgaggagattatactgaggtagagtgggttcttaattcactatgactcgtgttcttataagaagacaagagagagacacatggggatgttatgatccacagaggcagagattggactgatgcgtctacaagctggggaatgccaagggtttccggcaaccaccagaagctggcagaggcaaggaaggattcttccctagagcctttggagaggacacaccaacaccttgagtttggatttctagactccagatctgtgagacaataaaatctgttgttctgagccacccaatttgttgtgctttgttatggtagccctaggaaactaatatacggcacgattcctgaatatttgaaggaactgctggctttataaggggtgattggaagaggattgggactagacaagcatggcaatgagggaaccagatgtggagcaaatgggagagatttttaaaggcatcctggaatttctgggagagaggaaggtatttagagagaattttggcatgctttctgtgcaaagaccctaagaaggcccttttaagaaaacttaggctagatgtcttgattattactcagggtgtcaagagtgtgacttgtgtttcccttgactgtgtctccatggtagtctgagccatgcaagtccttggattccatcaggttacactacagaagctccatgctattgcatttctctttgctttggtgctggttatgatccccttattctagtagtgt

SEQ ID NO: 7822 - DNA, 1425 bp, Homo sapiens
gctttattttttctcttacatgaagtaaagcgctttggtcaaacacacaaaaatactgccttgtactggtggttggtttcattagtggatcacacacagtgttctacttggcttgtaaaatggtgccttggatagggtgagtttggataagtatgtatgtatgtatgagttatagcaaaattaagtagattgaatcaagtccatgcaaaagcaataaaacagttttaattttttaattttttaaaaattaaaactttaataaaacagtttttaattttttgctaggttcttttaaaaaatgatgtaacttacatggaagtcttcacaggacttttttctttcctggaactattgaaatgtaatttaggatgatttgatcttccatctcaagttgtcaacatggctgtgtcattctggcttacatatgttttatttaacaaaattctagtcaagggataagggcataatgaagacaagcttcagttatgaaagtacaaactatttgtgtgattaatttttaaaaatgacattaagaagcccattgtaaaataatatttgcagtcaaatggtttttcttgctgtaagtcctgttgtagctatgtttagggtagtggttctcatctaccttggagtgcataagacttacctagcaggcttgtttaaaaagttcagattcctagctttgtacccagggattgcctcaggtggtatgggctgtggtcctggagtcatcacttttataaatagtggttcagagaccacagagagagactgcttcatcgaatgggaagtaccaaggagaaagtacaattcagtattgtctggaggcaagtggacactttgtacctgaggtttagaataggtggtctcttgccagtacaatccccaggcgttttctgtgttcagaagtagtaagaatgcctttaattcagaggattatctaagctctttaaagctgtttttctccattgtcatagtgccttctctgaaaaatgaatgtacaggtatcctattttctaatgtaattaggattttttaaaagcaatttttgatagtttttcttttaaaaagtaaaattcagcactgtgacttgaacccccaaatctttcacatacaggtgaaacattaagccacaaataaaaataatgaacaagaaagaagacaagatcctaattcctgtcattagtgacctaagtaccccatatcagaaactttgcaaaacagatctagggacagaagggctttgaaagacatttttctttggggcaaatttcgtgtgccagaactacagtttaaatgtttttatgagcaagggaaggtagcattgattcccatagctttctaattagatacatgctgtcatggatgtaagccttaaaggagttaatactaatcttgtacatacacaaattttcctcaggtttt

SEQ ID NO: 7823 - DNA, 1191 bp, Homo sapiens
ttttattcactgctgttacactttagaaaaattccagcttgtttacttgcatttatcagtgatgccaaccaagctttgactgttaacttgaaagcttgcttctgaaatgttggtgcattttcaggtgacctcttatctctctgaaagttcatacctattagcaggctctgtaaatattgacatacttagcttttaatacattctataagtaaatttatagatttcagaataacttaaaaaatttaatggtaagaaggggtgatgtgtcgaaaactcatactaaagtattaggtcactttaaaaaaagtgataatgtatgatttaatgaaatcttaagattcagttactatttaaattcaccatttctgttttggtcttataaagagaccttggtttaattatccagaggaagtcctcttcaccattttttttttttcttagttctgcttctggaaagtgttttataaagttttctcagtgagggttcttaagagttttctttggcctcttttctctcaacagtaaattgatgattttatatcagctttttcaataaaagatgcattatcattactggctataaatcatcctggggagatttataaccaggttaaaaataatatcttttacttctctcaccttttacttgtggttcagatgctcagactgtgcctgtttgcgtcgtgtctgttgctctgccgctttccatgcaggcatttttaattttacacaatcctaacaatatatggaactcattcctatgaatatataaaaggaggcttccaaaattttctattaaaatatttcaggataaattaagtgttgataatttgaaaaaataatttcaatgagctgcttatagtaaaaatggtagaatcagagttttcattctttgagaaatctttctgtaagattggctcatagataaaatgagacaaactactatgtatgataaaacaccttcagagtcatgccttgttttattttattttattttttgagacagaggtctcgctctgtcgcccaggttggagtgcagtggtgcaatctcgctcactgcaacctccacctcccaggttcaagcgattctcctgtctcagcttcctgagtagctgggactacaggtgtacaccaccacgcctggctaatttttgtttttttactagaggtggggttttgccatgttggcca

SEQ ID NO: 7824 - DNA, 1069 bp, Homo sapiens
ccataatggaagcccaaagacatttctaccgttaaaatacataatctgccgaccctaaaacattcacataaagaggcaggagggaatactatcccgcagctccacgattagccgcagtcgtgggcggggattggggcttggatacgccttttgcgtctggtccccaagggacgctccccaaccctcggcgcgcgaggcgccgcgtgaggccggctttgcccctccttccctgcaagagcgcagaggagcggttcttgcgcctgcgccctgcgccgctgcgcgctttggcacccgcttggggccctttgtgcgcatgcgcgctcgcgctcccgccctctagctgcgctcggctgagtcagtcagtctgtcggagtctgtcctcggagcaggcggagtaaagggacttgagcgagccagttgccggattattctatttcccctccctctctcccgccccgtatctcttttcacccttctcccaccctcgctcgcgtagccatggcggagccgtcggcggccactcagtcccattccatctcctcgtcgtccttcggagccgagccgtccgcgcccggcggcggcgggagcccaggagcctgccccgccctggggacgaagagctgcagctcctcctgtgcgggtaaggcgcgcggggagcccccgccctgggaaagagggcgagcgggagcctgggggctggggggattaggaggcgaggcgggaggaggacgaattaccctcgactactgacggcttcagccccccggggacgagcgtttggaaaatgggcaaaggggaaggggaacgtaaggttgtgcaggcggtgaggaaatagcggggtgtgaggaaaacaggttgggggcggggagatagtccagtgggcgttaacgccaagactgggcaggtggggaaaaataccagctcgtgggataaaatggagagttgctcgatgcatatggtgaacctgggtgatttagtgaggattagagagattgaaaggatacgggcaggtgggtggtgggagaaacaatttgttactatttttgaggggatggtggtgaaagggttg

SEQ ID NO: 7825 - DNA, 1836 bp, Homo sapiens
ctttttcccctccttttctcaataggatccaagcaaaactccctggaatcgccaaaaaaaaggcagaataagtacatggaaaccagaaatgcaacagttactaaaacaccatttaatagttataacgtcgttacttgtactatgaaggaaaatactcagtgtcagcttgagcctgcattccaagctttttttttaatttggtgttttctcccatcctttccctttaaccctcagtatcaagcacaaaaattgatggactgataaaagaactatcttagaactcagaagaagaaagaatcaaattcataggataagtcaataccttaatggtggtagagcctttacctgtagcttgaaaggggaaagattggaggtaagagagaaaatgaaagaacacctctgggtccttctgtccagttttcagcactagtcttactcagctatccattatagttttgcccttaagaagtcatgattaacttatgaaaaaattatttggggacaggagtgtgataccttccttggtttttttttgcagccctcaaatcctatcttcctgccccacaatgtgagcagctacccctgatactccttttctttaatgatttaactatcaacttgataaataacttataggtgatagtgataattcctgattccaagaatgccatctgataaaaaagaatagaaatggaaagtgggactgagagggagtcagcaggcatgctgcggtggcggtcactccctctgccactatccccagggaaggaaaggctccgccatttgggaaagtggtttctacgtcactggacaccggttctgagcattagtttgagaactcgttcccgaatgtgctttcctccctctcccctgcccacctcaagtttaataaataaggttgtacttttcttactataaaataaatgtctgtaactgctgtgcactgctgtaaacttgttagagaaaaaaataacctgcatgtgggctcctcagttattgagtttttgtgatcctatctcagtctgggggggaacattctcaagaggtgaaatacagaaagcctttttttcttgatcttttcccgagattcaaatctccgattcccatttgggggcaagtttttttcttcaccttcaatatgagaattcagcgaacttgaaagaaaaatcatctgtgagttccttcaggttctcactcatagtcatgatccttcagagggaatatgcactggcgagtttaaagtaagggctatgatatttgatggtcccaaagtacggcagctgcaaaaagtagtggaaggaaattgtctacgtgtcttggaaaaattagttaggaatttggatgggtaaaaggtacccttgccttactccatcttattttcttagccccctttgagtgttttaactggtttcatgtcctagtaggaagtgcattctccatcctcatcctctgccctcccaggaagtcagtgattgtctttttgggcttcccctccaaaggaccttctgcagtggaagtgccacatccagttcttttcttttgttgctgctgtgtttagataattgaagagatctttgtgccacacaggatttttttttttttttaagaaaaacctatagatgaaaaattactaatgaaactgtgtgtacgtgtctgtgcgtgcaacataaaaatacagtagcacctaaggagcttgaatcttggttcctgtaaaatttcaaattgatgtggtattaataaaaaaaaaaaaaacacaaacaatgactgtggcatcattctgctaactttattctttatacacagtttgggtaaagtaagaaccaaacactgcttcca

SEQ ID NO: 7826 - DNA, 1517 bp, Homo sapiens
ggtgatgtaggtgttgacactcaggagataaagagcctggtggaagttcgccaggggtcttttctgtcccccacgtagtccctcatgagctccttggtgggcacagctatgccttagactgcttctgggtgttcccaccccatcacctctgccccactcaggcagaacccgttaggctaggatgcccagtaagtttgagataaaatggagttggctgcaggtaggagttacaggaagaggcacgagcaccaggcgtccctgtgccaaaatacacacaggaggaaggctgcctggcttcagctggcttgtccctagggaggctgtgcgcctcattttctagctggcagcagtcctcgatcacccaggagtggagctccctgccatccttgggcttcccctcatgccaggcactgggctgtggacataatgaaagccctggaaatgtgggtacagtttgcggagcttccagggggcatcctcgtggtggggtgtctggggggctctgactgctctctgctctcatccctgcccagctccccctccggggctccgcgggacactggatctccaggttatccgcgtgcggatggaggagcccccagcggtcagcctcctgcaagactggtccaggcacccccagggcaccaagcgtgtgggagcaggtgacacctcagactggcccacagttctgtcagaatccagcaccactgtggcagggaagccggaaaaagggaatggagtgtaaattcttgctttcctggggagggagggagggatgaggcagcgtcccccagtggcttataactcagagctgcctggctcacccacctggtggagagagtagaaacaggtgccagggcaggagggggctggggcagcatccactgttatttcggggcactggaaagtgtctgttcctggccaggcctgaggtcggcgagggtggctgaggctgttgtgcagtagggcactgggcctgtggagaacacctaccccagtccttcgctgacccccacctctgtttgtcccccatgacctcctcccaccctccccctgctccccaccattctcccttggcacagtgccttacacaagagtggtcataagggggtttgaactgagtcccactacctcgggggacacctctcctccccacttgttcaggcttctaaaccaggaggcctccattacctcttcctgtcccacccctgcagaggcctgaagctgggcctgggcaccccattcactcccgttctcatttacatctgttttcctgttgtatatatcacctttgttgacaataaattatttttttttattaagagttccgtctgggccatcattgggggagagggtttgctagcaggatacctggccacctagagcaaccctgaggggcaggagggttggaagatggtcctggggggagccagggagccacctctcctgaaggtgggacagcaccagggcaggcctctgtggagcccaggaacgagggctgacttgtgctatcagtc

SEQ ID NO: 7827 - DNA, 1199 bp, Homo sapiens
gtgtgccgggcgcggagcagtgccgctgagggcaggggaggagcgaggcaggcggccggctgcggcggcagagagtaggcggagcggcgcggcccggccgaaaggcggcacagcccagccgggggtcgggggggtgcggtccggagccgctcggagccggcgcggcctagcccgagcggcgcatccccgggctggcgtgagcggctgcccggcctccccgcacccccggccggggcccatgcggcgggtgctcctgctgtgagaagccccgcccggccgggctccgcgccttcccttccctcccttcctccaagcttctcggttccctcccccgagataccggcgccatgtccagcgctcggacccccctacccacgctgaacgagagggacacggagcaggtaaggagccccgagggctccccgaattctctggctgggccctttgcaccttgcggagcctcctccctcttctgctctcctcgtgcccctgctgccatcctgcaagcctcggctgccctgtcatccggctcctggctccggctccgcacatcccgcttccgagtcctgacctgggacccacctcgtcctgactccaagctgcacacttgtctttctgccaacccccgtctcccctcaccgccctcctgcgctcttccgtgtcacctccccagcttccctttctcttccctttttctctcaggggcctttctggtcttcctccacccacgcttaaagcagccaccctcccgctcctcgaatagcagcaccccgcgatttgccacagatcgttgtccacctctcccttcgtctctcctgcctcgcttcccctccgcccgcaccggttctgccagtctctgggttatcaccctcagggtccttgccctggactgcgctctcgatccctggccccttgcagttcccccagctttttctaccctgcttcttcgttttccaaattgtgctctccctcttgcttgcaacccaccagctccaccctcatcacctttccaaatccttcgcctactctttgctcatcactttcccttctttgctccaggagctccctggatcctggcgctggcatttgtcgcttccgtgtttccccacagctgtcatgcgcatagttttcccacaggttgcgtttggggttccaatcatcactcccttcagagtctttggatccctcttgttctcttc

SEQ ID NO: 7828 - DNA, 1357 bp, Homo sapiens
gggtttcccgggagggtggctcagggctggaacactctcaggcaagagtggtggagctcccgtcaggccctccgccaggcccactgtgggcttctcccctctcctccctccttcccctccaagcaaaccaccagaggtggccttcccctgacctcaggcccctgggctggaggcctgggcggtggggcagggggcgggggtgctgcgcagccctgcagtgggtggggctgggggctgctccggggctgctgaggctggagggccggcacaaggctccgcctccctccacactgtaccctctgcccctcctccccagagctgggcatttccttccacaagctgctgtggggacgtgtgttccctcaaagtctgtgccatcttctcccacccctcccgggtagaaggaggggctgaccccagggctgggagaggggaggggactggagggcagactggcttctcggtccccagggggccgcttgggctgttggtctccagagcagggccactgggcactctgtgatgggggagcctttgtctgaaagcacagccccctcgcccttcctctccccatggcttccccttcattggcattaatctgggcaccagctctctccatagcagtgacttccctcaccactctcatctctcagccttgccttttcttcctgacactgtcgccccctcctctcaggagacactgccgagggccacctggcagaaggctgagttaggcagcagggccgggagcgtctgccctccacagggtgggggacagataggctaagcgactcccagcttgctaccctcagtggccagtgtgggcgtgggcggtttggggcgcttggctggtggtggccactgcatcccttaatttatttctctgctgtttctgttcttgagaaattgggggtgggagtcctacacagaggctgcccctaccctcacctgagttgtacatttttttgtgatgggttttattttttattattttattttattttttttttttttgatttatgatgactccacccctcttcatcacccccgctcccaggccaggctcagcgattaagccgagcccttgcgtcctaggaaggggccttgccaacctcagccctcctgccccacactcctactgcggctcagaccaagggctccccctccctcccttcccccctcctgccctatggaacagcccgggtgctctgagggggctgggagggcatggcttggctcccaaagggggtaggggcccggggcacccaggcaaggtggcccctccccgtctagccccctcctccccaaccctgcacttagtttctcctctggatcaaacacgtaataaagagaatgt

SEQ ID NO: 7829 - DNA, 2232 bp, Homo sapiens
agggtcctgtgaggggcatagtggcctgcctgagatgggagtctgatattcctccacttcctggccttcccaggtacagagcatgaagcagacgaacagcagcctgcgccaagccctggagggcggtattgatccactacgccccccggaggtatggctgctctttaagttagggtgcaaaggggggtttctctctggaggcagagcagaaagagtactgcttggggagcagggcttccatttgcatggttttgagtctaaaggatatgttgttccttgctttccaggccaacaccaagttcaactcccgctggaccacagatgagcagcttttggctgttcaaggtgggttaaactgtggtgagaagagaggaccccaggaatctatctccccaccctccaaggagtgggggggcagaggggaagggtcagggaagtaactagttcgaaggggtattgacgctgctgcccttttgacccttgcagccatccgtaggtatggcaaagactttggggctattgcagaggtgattgggaacaagactctgacccaggtgaagactttctttgtgagctaccggcgccgcttcaatctggaggaggtgctgcaggaatgggaggctgagcaggatggggcccctggagccccagtccccatggaggaggctaggagaggggctccattgccagccccagccctagaggaagatgatgaggtgagaagggggtgagagaaacccctcagagaggagaggcgaggcgaggtgaggcgccgccttggtccttagactgggctgagggcgggaagagcctggcttctcactctttcctctcccctcaggtccagattacatcggtctccacgtccgtgccccgatcagtgccccctgcgccaccaccccctccacctcccacctcgctgtcccagccacccccgctgctgaggccacctttgcccacggctcccactctgctccgacagccacccccactgcagcagggccgcttcctccagccccggctggcccccaaccagcccccaccgcctctcatccgccccgctctggctgccccccgccacagcgcccgccctggccctcagcccccacccaccctgattggaacccctctggagcccccagcaccctcactctgagccctgacgtcctccaccaaccacgggctccaggacccctttgctggccatccccaggcatctctggtgtcactgaggacagaagggactagggctctggcggggtctttgtaagaccagagtttcggacagcccagccccgccctttgggttctgcatgtgttcctggcagctgggcctgtctcctggggccatggccgggctcaggggcctttgagctggcctgagggcactttcgcttcctggccggtactggaatggctgtgtcctagtctgctggggcttggcctctgggtcctgccctttgtgtgtccggggtagtgaccttagcgtggagtggggagagggcagttgggtgtgctggctgttctcattcctctttcccttcttttagcaataagtctggggtgaggtggggagggaggctgcagggggggaggtgggcagaggggccttacagcagcagaggctggaagagaagctctgtcttcaggggccagctgggaaatgctaaggagctgagggtgcccaccaagcccaccttccagaaacttggagaaatgggggttgggaacttatgcagacatggatttatttttcaacattttttaaaaattaaaaaaaataaaatctaagcttactgagttttctttcccttttggtgcaagggccctgggctttgcttcctgtctgtgccctgtgggtaagtggggagctgggcccacccagcactggccccagacaggaatcaagtctctcctgcaaggcaggtgggctaggccacatcttgcccacaggagactgggtccctgcctggctgggagaagaaacaggaggaggcagctcagattccaaacattctctttattacgtgtttgatccagaggagaaactaagtgcagggttggggaggagggggctagacggggaggggccaccttgcctgggtgccccgggcccctaccccctttgggagccaagccatgccctcccagccccctcagagcacccgggctgttccatagggcaggaggggggaagggagggagggggagcccttggtctgagccgcagta

SEQ ID NO: 7830 - DNA, 2633 bp, Homo sapiens
agaggaacacactgggtgtaagatctgggtgtagagggcggcttcagagagactcacgcttgcgcagttggaattgctgttaacggagactgggaagatcttttgtgccaagatgcagggaaatgaagaaagctctttccagctgtttttatggattcatggagtgggctcatgttgggaccagctgactctgggaggaagactgcctctccatcgctgtcagagagcctgaaaggaccaacaatgaggtgttcttgggacccgccatggggatgattgcttctctaggctcctggatgttgctgcattctaagcttaacctcctggtctcatggcagtgacttgagcttttgattcatagaagaaagccagaggttctgcttgttcttgtctgccagccctcgtcgttctttctcctctgcctctcacctctaccccaaatacctctgttcttagtctcaaggggagaataacatcagggagcccctcatcttccccagaaggacttctcgttcctcatgtagttaactccattgattttcctatcttggtgctgatagctctctaagggtagggcacacctccccacagccaccctccctcttcagagagcccccagccagcagcaggcccctctgcctgcactcctcaggcttgcccctcgctgcctcagtgaggcactagtgccactgccgtggcccagccgggccatagctcaggctgcagcagaaatgcctctcagtggccaacagttgcttttctctctggtgtcaccctgtggcaacaggctggagcaggggaaggagaaagccttcctcttctctcataggatagaaaggcaggctcagaactaatgctcatcctgatctctaggccttgttcctcttccagggaagaaaagccaaatccttatcaaggaaaaagcacctaacagctccctttggatatccctgagctctgctgtggggagtatcataaaggttctagccttcgtgaagttgttctcgtggaggtctgttggtccctctgacctcagcatctgctcacatcccaccctctgcccaactctggcagtctctcctggcagatctccccagagtggtccttgcttctcacctggattcctgcttgtgcaggagcctgtgtacacagggcctccctcacccagcctggcccctctgctgagcactttgcgctgctcttgatgggcagcagtgggactgggaactccttagagagggccttgcagctttacactggaataagtctgcctctgcctctgcctcaccctgctggctcctggtgggtttcatcccaggcagagttgacattgctggaggggtttggtggactcctaagaatcatgaaaccacaggagcatgtttaggaagagatttgtctctggtccctgtctctgaaaggacacagatgctaaatatttattgtcttagatcatggattcctgatacctctcactcaaggggaccaaaagggacccccccgtgttcatcccttgtaaggtgagttcagtctacgttgtctctttccagtcactggatacgtggcaccaactggtcaatgggtgcttggtgccataccctgctcaccctagtctctgcaggccatgtcctgaagggttcctcaggaggtcgggactagggtgggagaggcactatctgagacctgcaatcactcttgttggtcttgagcccattcatttccaaaacatccatctttctccacttcccccaggtcttggttttgagaaacagcaggcatggctgagtgcggtggcttacacctgtaatcccagcactttgggaggctgaggcaggcgggtcacctgaggtcaggagttcaagaccagcctggtcaacatggcaaaagcccatctctactaaaaaatacaaaaatcagccaggcgtggttgtggcctgtaatcccagctactcgggaggctgaggcaggagactcgcttgaacccaggaggtggaggttgtggtgagctgagatcacgccattgcactccagcctaggcgacagagtgagactccatctcaaaaaaaaaaaaaagagaaacatagcaggccttttttaccaggctttttgtgttttgtttgtttgtttggagcatgttaagatttttttaagatttttaaaattttagttatatccaccctatttcaggttatttttgttggtgtcaagtatgtataggacatgtgaatggttctttttaatttttttttaagaggaaatttggaagataaactccttgatatatatatatatatatatatttttttttttctttagcagcttgttatcactggaatcaaagggaaaaagtgatctcttcttgcattggttgtatttgtatgtcacaaataaaagacactttggtcagctgctgagatggcttcctgatgctggggcaccatgggcagcgtggatctgggaagctctggaccctgagcctgtcccaacattgggcccgaacatcaggaggtgcatagctatgatagccccatgctggagaaaaaactcaggctgtccggggcaagcagccagagctgggaacagagaccaaatgtatgtgtttgtgccacttcccaggagttctgagtagaggc

SEQ ID NO: 7831 - DNA, 1310 bp, Homo sapiens
aagccaagccattctcctgcctcagtctcccgagtagctgggatcacaggcgcccgccaccactcccggctaattttttgtatttttagtagagacggggtttcaccatgttggtcaggctggtctctaactcctgaccttgtgatccgcccgccttggcctcccaaattgctgggattacaggtgtgagccaccatgcccggcccagaccagctttaaaacaggtttcaataaatcctgcttcctgtcccttcctttaccatctggtggtgcatttctccctgaaccctaaccccagctgtctctccttcctctcactcttccccctccttataactgaccctttacctcaagggttagcgtagctttggacctgctctgtctgctccgtggagcgtggattcctttaacgtgaggatgcggggcctcccacttgcctctgagtcctggctccctgagcggggctttctgctgcctgggaactgcaaggacttagagagcctaggggaatactgactccgaggtgccttctttcttgtgctctgtgtaggaattggccgttgggcttacctcctgcttcgtgaccttcctcctgccagcgggctggatcctgtcacacctggagacctacaggaggccagagtgaaggggtccgttctgtccctcacactgtgacctgaccagccccaccggcccatcctggtcatgttactgcatttgtggccggcctcccctggatcatgtcattcaattccagtcacctcttctgcaatcatgacctcttgatgtctccatggtgacctccttgggggtcactgaccctgcttggtggggtcccccttgtaacaataaaatctatttaaactttacttcagaaattcattgtgccttccctcctgcctgggctcatgcctccactggcactgggtggaggtgtggagaagagcgcccggctggctgccctgtggtaggttttgtgtgcctcagctggactcctcgtgtgcttctgtacctttaaatggtgcctggcttcctgggaagacaaagcctgttgtcattgtgcagcttttctggctcatcccctccagctcccttgtttgtgcaaagcccaatgggcgtgtatgtgtctgtgtgtgtgtgtgtgtgtgtgtgtgtgtgtgtgtgtgtgtgtcccactggggctggatcttcagctagaagcctttcctctaaggggccagccttctctggtcttcctttttggtggacttcatttcttaggtgctggtgcccttcctaattgggggtagggactttgcagaatcttggct

SEQ ID NO: 7832 - DNA, 1102 bp, Homo sapiens
ccatctcctccccgtcatcttgccctttctccctccgtggctgcagttcatggacctgattgagcaggtggagaagcagacctctgtcgccgacctgctggcctccttcaatgaccagagcacctccgactaccttgtggtctacctgcggctgctcacctcgggctacctgcagcgcgagagcaagttcttcgagcacttcatcgagggtggacggactgtcaaggagttctgccagcaggtgccgtccccctcccctttactctcggccgggggagtgcagtgggcccacagggcctggggcggggtgcggagaccagggcctgaccggcacctgtgccacaggaggtggagcccatgtgcaaggagagcgaccacatccacatcattgcgctggcccaggccctcagcgtgtccatccaggtggagtacatggaccgcggcgagggcggcaccaccaatccgcacatcttccctgagggctccgagcccaaggtctaccttctctaccggcctggacactacgatatcctctacaaatagggctggctccagcccgctgctgccctgctgcccccctctgccaggcgctagacatgtacagaggtttttctgtggttgtaaatggtcctatttcacccccttcttcctgtcacatgacccccccccatgttttattaaagggggtgctggtggtgagccgtgtgtgcgtgtccctgctctgctgcccgcctggctgctctgtctgctgccccctccccccaggtgggtccccctgcttttcacctatctactcctgagcttccccaacaggagcaggtttgaggggccaggcctcttggaggcccctcctgcttcgttgggttctgcttccttcccttcttagctggctcaggggcttctatgggatcctggaagttccttagggacttgcccagggtcccagggccacccacacttcatctgctccctcataggccccacctccacgtcccggctgggccccagaccccagcttcctgccctccaccgggagtctgcatggttgggagtcctgggtggaggggcctttgtgaggctggacccggctcagggcaggtgg

SEQ ID NO: 7833 - DNA, 1152 bp, Homo sapiens
cctcttcagggaggggaaagagtgaggggggcgggcagggggacacctggcaactgccctctccaaggatccccagggccctgctgagtggcaagagagatgcccacagcctggctggagaccccttcaaccccacagcttttcaggatggaggagggtggggggttgggagctctccccgccccctttccctcacagccctctcctagctcccactgcacccttcccctccacatccctgcagctggacccaagcccaggcagcgacagcccctcccatatggcagcaggaacaaagagaactgttccccacaacaaaatccagaagctccggcgggcggccagatctcaagctcccagcccagtgtgacccacggcgttctccatgggccactgacgcccgcggggccagcactgctcctggcttcaaaaatataaatttaaaaatccccaccccaagataattgctctctcctctggcttattgtggtggctccgtggtaggcactgagaagcaattattcacggctaatgattataatcaagtcaaatagaatttaatggacacgtattctcttcctgcttgaaactttacatatgaattaagcacatatgggtttcacgaggcacagacgcagatttatgcagccccgaaaagccctgccgttgccaacgacttttattccactaataaacaggctgatatatgggctcctgggaactgcaatctctgctgccccctggtgggcacaggggctggggtgggagccaaggccacccaggaccctggaggcctgaccagtgccaaagccactttgaacgctggggttccacaaagccctggacggctgaaaggagactcgggctctgtgtgggaagcccgtgttcagaccctgcctccgtcattccctgggattccaggcgggtaccgggtcctcctggctgtgagagtctagaacaaaaagatcccaggagaacacaccaagaggtgtatgggtaaactgaggcaagcagggggaggtgaaagctgatcatttgcaggaggtaccatgtccctcggcaccgctgggacaggggtgatgcccagaacggcgctgatgacaccagtttcagcaccagtgcgaggtgctgagccccgattcccgccaggtg

SEQ ID NO: 7834 - DNA, 1269 bp, Homo sapiens
tctgctatttggatggatccttacagtagcagccttggcctcgtagcctactcctctcctttttttctctttggccttcatgtgaatactcatttttcccccataaaagtagaattgttcttttttgagttcgtcttctagatttacctctgggtgttctctattttgtgtctgtctttggtggtttaagggctattcacgaaaagcagcagctctagagttcttaaaccgctttgaagaagccaagcgaacctatgaggagggcttaaaacacgaggcaaataaccctcaactgaaagagggtttacagaatatggaggccaggttggcaggtaggtaccacgcacagttttctttcttattattaatgtgattaattttgagtcttcacccctgagaaatgtcagtctggtagggtatgggacacagtaattctagtgaactcatttcatagtgatgtgctttcctttatttggacagagagaaaattcatgaaccctttcaacatgcctaatctgtatcagaagttggagagtgatcccaggacaaggacactactcagtgatcctacctaccgggagctgatagagcagctacgaaacaagccttctgacctgggcacgtaagtggacgccgctcactgaggttctggaaatcggggaatgttatgctttcttcctgtaacctcacagcagagggttccctggtctaaactgcagagtttttgcctttgcttattctctgcagagcagtaggtggtggtcgtttatttgtaattatagaaagggtcaggggagcatatttcacagtaatctagaatgttctttgtcatctgtatacacctctctcctgctcttctagaactctgatctagcgtcaaccccatcctttccatctacttaggccctactttctctgttggtatatcagagtggaaacagggttgaagttcatgtgtaaagatgtgtctaaatcttgtactggtattcatctctatcaatcctctggctcctgagatcagctacggaagtatacctaaaacaactcattcctctgtgtatctgctaaccttgaggaataaacttgacctctgtgacttcattttattttattttattttattttattttttcaagatggagtctcgctctgtcccctaggctggagtgcagtggtgtgatctcagttcgctgcaacttccacctcctgggttcaagcgattctcctgcctcagcctcctgagtagctgggattacaggtgtacgccac

SEQ ID NO: 7835 - DNA, 1368 bp, Homo sapiens
agtgacccagccatgcgccttatcctggaacagatgcagaaggacccccaggcactcagcgagtacgtagagtcagagaggcggccttgctggaaatggagaacaaaagcaggcagatgagtgcacgcggctggggggtggtatgctcagtctgcgaggaagaggaattctgtcattcttcctaaacttaaggagattggcagtgggtggcgagctggaagggctttgttagtcgtgatagcttaagcagtcatttggaaaggcccatttagctgggagaaaggtcttgactggaagctgtgtcgtgggctcaagagtaggactggcaagttctgcgaagtggagcaggcctctgcagctcggcgccccgggcctcgccaggacccctccctgccggggccttctgtagagggggttgaattggggcttgctctgagagcaagtaagactttaaaggttgtctcatttcaagtaactgcgtcttcctctgtagacacttaaagaatcctgtaatagcacagaagatccagaagctgatggatgtgggtctgattgcaattcggtgatgacttgttcatccccccttcccttcgccctcatgtggaaagaggagctgggaccgcggcgagcagcacggagcggaagggagagcaggggagagaaggcctcatctctctatatttatacataaccccggggaagacacagagactcgtacctgcgctgtttgtgccgccgctgcctctgggccctcccagcacacgcatggtctcttcaccgctgccctcgagttccatgtctctttcccctgcccctagttgctgtctcggctgctctcccatagttggttttttttttatttggggcagtgggcatgttatggggaggggagggggttcttccagcctcaggtcccagctgtctcacgttgtttattctgcgtccccttctccaataaaacaagccagttgggcgtggttatatgttgctttggccttgagtgattttttttttttttttaaaccaggagtttgtcttgcaggggctgctcctggaacctgatcttgctcttctctttggggcgggcttaggaggagtcccaagctgtggcttggcacagctccatggctttgccaagaaggttgccagatggcgctgttgctcagcagctggaagggaatctgaaggcttccccaccccaagtagtaccaatgagaggttcagataagctttgggtgctgttaattctccacgttatagtggagatccagagaacaggattctaatgtgagatgctgagacctctgtggggagagggcagctatgctgttagctgctgttagatttaggagttgggtcatggattgt

SEQ ID NO: 7836 - DNA, 1332 bp, Homo sapiens
cagagcagctgctgttctgtctgctgggcagagggctgggttcctccgaggtaggcaggggcctcaacccagagcccctctcacaccctctctccaactcaggcttatgtctctccctcctcccccacccccaccccaggaagaggagatcccagaactggagattgacgtggatgagctcctggacatggagagtgacgatgcccgggctgccagggtcaaggtgagggggctggggggcgatgggttgcctgaggcactgccccgggaaagtgaggctgtggagccaggccctcaagccccagctcctgcctcaacagaatggggccaatgcctagctgtgaggttgttgtggcatctcctgtgcctcagggtggccccagtctcttggaagtgggtataggcgagctccaggcccccactcctgaggactcacttatccttcctcccccatcctctgctaggagctgctggttgactgttacaaacccacagaggtaagagatttcctggggggctggcgggggtggcagggtgaggggagcccggctcctgtcatcttggggtctggtctccttaatgtttaccctcccaccccatccaggccttcatttctggcctgctggacaagatccggggcatgcagaagctgagcacaccccagaagaagtgacggtccccgacccaggagaacggtggctcccacaggacaatcgctgccccccaacctcgtagcaacagcaataccgggggaccctgcggccaggcctggtgccatgagcagggctcctcgtgcccctggcccaggggtctcttcccctgccccctcagttttccacttttggggttttttattgttattaaactgatgggactttttgtgtttttatattgactctgcggcgcgggccctttaataaagctaggatacgcctttggtgcagctaacaggctcggctggtctcttttaggggggcacactgctctttgacttctgccagctcagcttctccccaggtgaccacaggccttcctaagggccacgtagccatgacgatagcccagtgctggctcccagaccaggagttgaaagtggctggggagctgtgggggtggggggagcagtattgctgttggcaggcaggaacactcctttctctctgggcaagggccaccatgtcattgagcctagacccccaaggctccacagtcgggaaaggagaaggtggtggggtatgctggagctgaggtctctgagtctctcagggcccacaaacacacacaggcttactccttgggcttttaagtgtttttttgtttgtttttgttttt

SEQ ID NO: 7837 - DNA, 1153 bp, Homo sapiens
ctgtgaagatgagggctgctcctgggagcacagccggggtgagagcaccaggtaggagccgtggcactgcctcagtacccctgccctacccgcccaccccgctggctccatcaagctatgggggaccgagatagccgggtcttgccttccacccctgccatggcctttgcttccccatctgtactaggtgaggtcccctgggttcctattgctaaagcctccacctcttgcctagagatgtactttgtcctgggccccgaaggtctaggtcacaggggttctgttctaagcctgtcttcctcctgcagctcttgtgactgtggccctggtcactgtcctgagactgaccctgtttctctgctgcagtatgtcgggcagtctaggctctgggagctggtatggtgccatcgggcgtgagccgggctggtatgggggcagccagacgaagaccactcctctgctcttctcccaggtgccaggaccaggcggccaccaccacagtctctactccaccccacagacgtgatccccctccctcccccacagaatacccaggccccagtccccctcaccctaggcccctgtgccaagtttgtctgccgcttcttgcccaggatcctgggggtcgtggctaccccctcctctggccggctccttgctgctcctgtcatagtgagcttgtgccgtccccctaggatggggggcatggccctggctgccagatgcccacagcaccctggcatgacctgccacctctgcttccacaccggagccagctacctctcctgtgcctgccactcaataaacagtgtctgcgccccacagttgtgcacctgtctgtcatctgccttgtgttcctatcacttttgcctgtttggcctaaggctgaacagacactagcccttgaagtgggctgctaggctgggcaggggtgacttaccccatcaaggctggtgggctgggagaggaggggcctgcagtttgcaagggaaggagaccacacaggcctttgttctcaaagctctcctggcccagaattgccccactacctccagatccctctccacttgaacagttgctactctttcctcaagacctgcgtcaactgttacctcctttaggaagccttctgtctcctggtcaagggacatgg

SEQ ID NO: 7838 - DNA, 1118 bp, Homo sapiens
gcagctggcctgggggaactgggggctgccctgctgcaactagtgcggcggctgcaggccctgcggctggagcgagaggagtatgttctactaaaggccttggcccttgccaattcaggtgagtctggggcaggcactgacaggtgaggtgtctccgtaaggtcttcaggttaactcagtgacggtagcacagccccattttgcagataacgaaaactgaggcttagggaagaacaatgacttgctagaagtcaaaaagcaagccaagtgcaggctccaaactgcacacaggattttgagccctagtgccacactaatgcagaaaggtcatttagtgggagggaaggtggggagggtacaaggtggccacagttgagggagagagggtggggtcctggcccacgagccgcagcaatgagtggtgcctctcagtcagccaatcaacaaatcctcgtttggctcttccttaggccccatccagcagtgctcaagatacggggagtgcccttgccagagatagcccaggccaacaccacattcctctcttcttgcagactctgtgcacatcgaagatgccgaggctgtggagcagctgcgagaagctctgcacgaggccctgctggagtatgaagccggccgggctggccccggagggggtgctgagcggcggcgggcgggcaggctgctgctcacgctaccgctcctccgccagacagcgggcaaagtgctggcccatttctatggggtgaagctggagggcaaggtgcccatgcacaagctgttcttggagatgctcgaggccatgatggactgaggcaaggggtgggactggtgggggttctggcaggacctgcctagcatggggtcagccccaagggctggggcggagctggggtctgggcagtgccacagcctgctggcagggccagggcaatgccatcagcccctgggaacaggccccacgccctctcctccccctcctagggggtgtcagaagctgggaacgtgtgtccaggctctgggcacagtgctgccccttgcaagccataacgtgcccccagagtgtagggggccttgcggaagccatagggggctgcacgggatgcgtgggaggcaga

SEQ ID NO: 7839 - DNA, 1185 bp, Homo sapiens
cagaagctgcggagcgccaccgcctcccgccggggctcccctgcaccagccaacccgggccgagcccccgtcgcctccaaaggggccccccgccgagccaacggccccctgcccccctcctaatccccaccactgtgacccccttccctcataggggctgtgacctgggagcccggctcactcccggaggcctctgcctgcggctgacctgatccccaagggactgtcctttcctctcctaccccaccccactcccagacagagcagaagtatttttataagcagagaattttttatgtcttaccagatagagttgcagggaagggggggcctgctggggagtggggtttggggggccctctcccaggacactgcctcttctgggcagaaggcccctccagggggactgctccaacaggaaagagcccctcccccacttctaagcactgagttaggagtgctaactcctaaactgggaccccctaccctgttctcccctgaggccccgttcctgggaggggcacccctcaactgtcactttatggactgtctgtgcaattacgtccaccaaagacccgtgttgggggtactgaaggagaggccctgggggaccctctgaagcatttctgcctcactttatgtcatctgcttctcccctgttggggctaaggaaggagataggtggctcctaaaagaggaggccatcttctcacccaccccttcctctttggcacagctactcctggctgggggtggggccttgggggtctgggctgggcatccatggtcactgcctcagcccagccaggctgtgcctttgactttaaaataaaagtccacccagtgctgtgtgtggcatctgcgtgtcctcgttcgtgttgtgggtgtctagagcagagattctgggcagacaggctgctagcccgtggagtttggaacctcagtggggagggacaggcagactcttctgggcaagaagatattctttgttccttgacttttgctatgagcaggagggcgcaactctcatcctgggtgtatatccggacagctctgctgggtatcatttaggatattcttggttgtaaatacagctgctgcttgacttagggtggacctacatcccgataaacccaacctgaatagaaaatgctgaaagccgaaaatacatttaatgtctgcaac

SEQ ID NO: 7840 - DNA, 1118 bp, Homo sapiens
gatctctgtccctagaggatggtagagtcccctggattctttgccctatcccagcatggcctgggcccctccctggaggggaggagaggacaggccaggctgggcactgtcctctactaggtgtgcccctggggtcccagctgtcagtgcagctgacctgaagggtgtggtgtaattaaagaatctctgagctgcaagggggttacctccttcagcatccctccccaccccatgaatcacccatacactccctaccagtgggaggccttctacctcccacctccaagatccattctgatcattgagtggttctttcttagtgtcaccctgcccttctgaaattcccacttattgtgaaattcccacttattgtgaaattcccgttagttctgccccttggaatcaaacggagaaatctaactcccgtttgtgttttaaatcaggctaaatacacattgtatcccaaagccctttaatccctggggccatgggagggtacattgcctttccacctgaggctgatcagtaattatcaggggggctgctgggagccagctctgaaggagggctatgacagagtgcatgctgccactctgtgatgtcacttctgagacagatgcctgggagccttgggcccactgtctccaacccacagggcctgggcggggaaggaacccaggtgaggcagggctgggaagccagtgttctttcccctgagttcctttccatgcagactgctttgtcttacctccccaacacgtgttcatactacgaccctgctctctctgtccagccagggccttcgtgggtctgtgccacgaagaccactcacttctgcctattccctgcacttgaggcacaggtcactagttaacaggttactagttagtgccccctgaactttggtgaatgtgtatgttgaagaggctgggtttctcctgctcactctcagtctctggctttcttctggatggggctggcttccctctgggtgcccatcttcaagtcgtttgctcttgcaaaccctactggagcctgtgtttctgagggtggagtctctgcaggggtgggcctggagctgacacctcttctctggacagatggaccccccattcctg

SEQ ID NO: 7841 - DNA, 2704 bp, Homo sapiens
agacagccgcggtgtgcccccgcgcgtgtgaccttgggcttctttaccaccccagatacgacgactaccaccacgagcgctggcacagggtccatcccgccatggcaacagcagcaggcggctgccgcagcttctccaggagcccctcagatgcaaggcaaccccactatggtgcccctgccccccggggtccagccgcctctgccgcctggggcccctccccctccgccgcctccaccgcctggttccgccggcatgatgtatgccccgccccctcctcctccgcctcccatggacccttctaactttgtcaccatgatgggcatgggggtggcgggcatgccgcccttcgggatgcctccagctcccccaccgcctccaccacagaactagacttgttttttaagaaaatatatattatatatagagagaattggtctcgtttaaacacgccgaacctcaccatatggagccagacattgggacgcacgcatgtgattgtgtgtgcacgcatgtgtgtgtgtgcacgcactgggctgggccaagcgactgaggattcgcttgggaacgggcaggtggtagtaggggcgccagcttgggctctcctggcgccccgtagcatcgagtgtcttctttgtcttctttctctcctcacccaactccctttgcctctccccaaaccgggccgccaggatccctccccgcggcggcgatggcccgagccatgagagtgaggactttccgcgcccattggtgacccttccaggcagacagcctcagcaacgcccctggtggacaggatggttcggcaaagcagcctgagttatttttgtggacggaatcggaacacgctggctccatatcgtgaaatttttattaatttttttctttttcctttgttacttctttatcttttcctttcttcagactccgtccaaggagatgctctccccggtcttctgctgcaatttagattcctttcccttctctccagttctccttcccttaccaaggagaggggagcaaatggttttgggcaagggctttggccattcatgtcaagctggttgtgggtttttcaaggtgccatagccacccccaaagatgtttgtttaaagcgtggggttttttaatctctgccacccttgtcaagggagtcttgtaaagttgccgagggtaggttcatctccaggtttcgggattcccatccgtcctggcgatcctgccagcagtgggtgggcagcctgagctccctcgggctcgcctgccagcctggagttcttcctgtgctccttgatcacctgagctgcctcagattccatttggtcctctccttcctggaaggcttccttttatgttttgttttaatcccaaatgtctgaatgttttgcagtgtgtaggggtttgagccccttgttcattctccttcctttttcctcccgcttccctctccatgaagtgattctgttgacaataatgtatactgcgcgttctcttcactggtttatctgcagaaatttctctgggcttttttcggtgttagattcaacactgcgctaaagcggggatgttccattgaataaaagagcagtgtggttttctgggtctgcttctttattttctttttaatgcctgccccgcccggtttttcttttcacataaacttcctctaccaccagcagcagcagcagcaccaaaggtgccttaactttcgttcagcaccaggtccgggggggtgagactgtgggtggttaattagggaagcccaccacctgcctcctgtgtgtggctttggtggtgggagctcagtgtgtgggtggctccacagtctcccctttggtgactagttaacatcgctgagaaccaattttgcccctccttgttcactgctcatttttctagtctctgtcctttgaaggctttttcctggggctcagacgtccacgtttgatgagctccagtggtgatttgtgcctggaagctgccacctaaggccctgggcctggggaggcatcaacactaaaggtcaagccaactaatcctgcctgtcaggcacagagcagctaaaattaaaaccgccaagtggcttttttccttctctgctggtgacttgcagcctgccagcgctgtaggctttggcgggggtcggggggacaggataaagtgccccatcttgtgctttgcaagcacttttcaaagggtcttctgctttttttccatgtcttgggcggcgagtgggtagttactgttagggttccagaaaaatccatgtggagtctccaccaggtagtgaggtcctctcctgggcagaggtgccttagagctgccctggttccacctgcctctccttccttcagggcggctgagggacagtaggctcccccagcatctggctgctggggccagcaactggcctgggctgctttccagctgtgagctagggctggctactgctgtttactggggtgtctggtcccccgtccaggaggcctgtgctttgctatgggtctgccaggcttgaggagccctcagaagcaaggcaggctcagtgcgtttccccagccaagccctaaacttcggctcaccaaaaggaggacatcttttttgcctttgtccttaagtggcagaatgggggcagggcctggggcctggctaccctctttgaccttggcttcacctcattgcttctcccacaagcttggtt

SEQ ID NO: 7842 - DNA, 1411 bp, Homo sapiens
tcctaccccttgacttccttttctttctcctgcaggtctcagaacggccccgaagcctccccctatcccctgaattggagagctctccttgatgccctctgttagggcccaccccaatcccagggcagaaggacatgagggagcaaagagcttgaggaatgccatactccggctggtccgggacatggaaattcggactcagggaggacccgggctgggcaatgactgggagacttgcctgggttcccaggacttgggggtcctgactcccagccctcatcctgccttacccctctgttcccagccccagcctttctaagccattgggaatagaatggccccttttgttctggtgtccaggggtgattgtgccaaagctcttatttccagtgccaagcccccagaggcttgtaagagttgggatgagggatggagagggactgggtctctgggaacaggttggaggtcttatctgtggactgtctgactcccagctgaggccaagatggggcatgtccccgtctctgcttagcgtctgggtgagaaaaacaggctgtgatccagaagaagggaagatagagaaggagggaaaggatgtaggcgaaggaggtgagagacaggataggaggaaggaagtggaggaggaggtgataggaattggaaggaggtagaagccgtgcagaggaagaggggagagggacgaaggaggagcgatgaagaagaggagggagacaaaaagagggatggaggagagagggagtctggagaacaaagggtcctttctctggggaggggtgcagtgggcggggctgacactgtcagccaatcctcccatcggggaagagaatcctggacagggacaggatggggagggtatttataagggctttttggtgggagatgggtacccagtgggggccactggagggtctccgggcacactctggcccttcccagaaagggggtcgtttttctcgaatcttcaaccagttgtgtattggaaactagggcgcattttactattgatcacagtcattatattgttattatattactatttttattaaacctccccccactgaagtgtggggggcaaaataagtatttatctcctcaaatgccacattcccaggagggacagaccctgatgctctgtgaggcgcaagaaaccaataaagatgccgggcgcggtggctcacgcctgtaatcccagcactttgggaggccgaggcgggcagatcccgaggtcaggagattgagaccatcctggctaacacggtgaaaccccatctctactaaaaatacaaaaaattagccgggcgtggtgacgggtgcctgtagtccctgctactcgggaggctgaggcaggagaatggcgtgaacccgggaggcggagcttgcagtgagccga

SEQ ID NO: 7843 - DNA, 1995 bp, Homo sapiens
aagctggagggccacgagctgcctgccgacctgcccccgcacctggtgccgccctccaagcgcagacatgagtgatggcgcccggccccgcacctgccatttgcacgcccggccgggaggcagagacggggggaggggaagcctcaccatttctcaaggtccataaagactgagcggatgtttcctcgcctctcgaaaaggaaaaccaccatctttcttttaaggctgttcctgggcctggcgggggaggcaggggtgagaggatggaattgtgtgcacaagaactgtggctattttaatatataacgttagaggctgcgttctttgtcgccgcctcccctgtgtgccagccctgtgtgcacggcctctgccccccggcctttgctgtggctggagctggacagtgcagcgactgcgaccgtgggggagccaggtcgcccttttggcagctgctaggctgaggctgcatggacaggaacaccaggcaccctccgtgtgcttctgagctgaggttgcttcacgggaccgtggcttccttcctcacctggctctgcctcccccgtgctctcgggcgaagtgggttcttgtgccttcccctcccgggcccaggctccccgtgcgcgggccctgccctttcctcccgcgccccaccggctccgacgcgcaaccccgctcagcagtcacagaagcagggcccagccaccttggtctttttttgggagttcaggggagtaggagaatgtcttccagaaaaatacataagctagtttctgttctgtaaagtgatatctttcatacttgaccaaagttcccaataacttcccaaccactgttcaaaagctgtgatttttgtctccccttcccaccctccagccaaggagcagccctgcccagggggcattaggtgtgggtacccggggagcaccccgttcctggaccccagtgttgcatttcctggctgaggaagggtggtcatcccagctcctgccctaccctctcacttaactggagctttgggacgcaccctccacagtgggaggtggtggtgggtggcggtggcggggcctcacgacagcttggtgctggtaagaggaagcccgtggttctggctaggctctcatgtccagacagcggggaccaggggaaaacccagccccttctgtaatcccccttcatttcctaccttccttcctcctctgtttagcaaaggagggcagctcacttggatgtccttacaacgcccctggcccccaggttgagcaataagaaaccagaaccttgcggcccagtggcccgggccagttcaggccgcctccccctcctctgcctggggccattgagcccagcctccagggcccgggcgcgtttgcaggccagtggccactgtccgggctgtgatggcaccaaggcaggtggagcaccaggtaccacacagctgggcttcccaccaggctttcccgcgggggtctcagggagcttctccccagcgctgctcggagtctgcaggaactggccttgttctccttagcccgtcactccatacagtattaggtgaggatggatgcgggcgctgtccttgccgggaagtcactgttgaagttgcagtggcttgttcacacctgtgggaagagaagtgaagactttctccttgcattaaaaagtctgaactgtgcgaaagcttcgggtgcttccttgtcttttccaggggcagcagtcctgggccatcctcccctggtgtctgagggggtgatgccagcagggacagagtggcaaggcagccggggcaaggtgaccaaccctgcccagtcctgctctgctgggcagtagctgccccctcctactaagagggccaggcctgtagggaaaagggtttctggggtgatgcccccttccctgagcaaggtgggagctgagcagttcacttggggtggggaggggggaaacagttgggaggatgttgatagctgaggcctaggctggcacccctcagccaca

SEQ ID NO: 7844 - DNA, 1300 bp, Homo sapiens
caagtcagtgctttcagtatgctctgctccttgcatggattaactcatttcattctcacaaccacctcatgaggtgagaactattattttacagatggtgaagcaggctcacagaggttaggtaacttgtcccaggtcacacagccactaaatagacaggaagcctgtgtctgaccccagagcccacattttaaccatgattctagtgctcaagcaccacagtgagaaagagcagggttaaaatcttggctctgccacttatgagctatgttcccctaggcaggttgcttaacctctctgaactttggtttcctccttggtgaaatggtcgacacaatccctggctcatgagggcttgaggagaatgagtgagagagggtgtgtggggctcctagcacgatgcccggatcctggtggatgctcaggagcccatgctgcatttacatcactaaggggcagcactggcatggaactggacagagagcccaggtgcccctggggtctgacaaactctccctgggaccggcggggcttcctggatgggatgacatggagcagggccttgaggaaggcgtggagttcctctgggctggggagggaaggggctgacggcaggcagggtctgcagtcactggccaccaccatcagcacctttgtcctcccaggtcctggagctggactccatccgcagccaccactggtgcatccagggctgcagcgccgtcaccggggagaacctgctgccgggcatcgactggctcctggatgacatttccagccgcattttcacagctgactgaaccactccagatgccccccacctagcagtccaggtccctcaaccttcaccaaacactacccatggggggttgggagtcagccggccaaactaacactccccctcctccaccccagcctgctgctgctactgctgcccgctgctgctctgtggccacccggctcccatggcgggagggctgtgccctggctgtctctctggctcctgacctggcctttggctaccataccaagaagagagggctgggcggggaggagctgctactgctgctaccgaggctgtgggcctcatccttcactcagttgtgaaataaaccgctccttgccccgattcctggctgagtcatttgttgattcaacagcgttagagaccacctgggaccctcaatctagcaggggacagaaaggaatggatcattggagtcgatggtgaactgtggctatgtcaaagggatgcagaaaaagttatagaagcatgggacacggtgcaactgattccatc

SEQ ID NO: 7845 - DNA, 1186 bp, Homo sapiens
agtgttgtaagtaaggatctggactgcaggaagtcaagagcctgaggccactcattcaaatataggttggggaaggagccaaaggctggcccttagaggggagagggaagttgggctaggcctagagaaggggcgtggtcgaggagagaggaaggacagggtgttgggaggggagatgagcctgatcctgtaaggaccaggcgtcctcattctggcttcccgctctcacaggctcggtggaagccctgcatgaggttctacagctgcctgctgccctgcgcgcctgcccgcccctccgcaaggccttggcggtagatgctgccttccgagagggcaatgctgcccgcctgttccgtctgctccagaccctgccctacctgccaagttgcgctgtgcagtgccatgtgggccatgcccgccgggaagccctggcccgcttcgctcgtgcctttagcacccccaagggccagaccttgcctctgggcttcatggtcaacctcttggccctggatggactcagggaagcacgggacctgtgccaggcccacgggctgcccttggacggagaggagagagttgtgttcctgaggggtcgctacgtggaggaagggctaccgcctgccagtacgtgcaaggtgttagtggagagcaaacttcgaggacgtaccctggaggaggtggtcatggcagaggaggaagatgagggcacggacagacctgggtccccagcctgaggagggagcgtgagcctcccagagccccaggactgggccagagcacttaggtttctttttccatggtttccaggtaataaaaggaacttgttttgttggtaccagtcactagatgtgatttatttgaggggctgttgtagggagttaggatacacagcatgcagggagaggaacgcagactagccaaggcctaaggtaccccaagactcactttcgccactggtccttggccttgatgacctgagttggcatctgaggttggcacgcatcccatctccacccacctgccaccaagggcagttggtggttttgccatcccatccctgtcccctgctgcccaccctctgccacctaagcaccaggatgagggtgagttgcattagggcttgccactcccctcagggacctcaagctgttgcctgagaagcttgagagggtcctgtggtagtgcc

SEQ ID NO: 7846 - DNA, 1180 bp, Homo sapiens
ctcccctggtcttgttacctgtgtgtgtgctggtgctgcgcatgaggactgtctgcctttgagggcttgggcagcagcggcagccatcttggttttaggaaatggggccgcctggcccagccactcactggtgtcctgtctcttgtcgtcctgtccttcctatctccccaaagtaccatagccagtttccagatgggccacagactggggaggagaatcagtggcccagccagaagttaaagggctgagggttgaggtgagaggcacctctgctcttgttgggaggggtggctgcttggaaataggcccaggggctctgccagcctcggcctctccctcctgagttgccttctgttggtggctttcttcttgaacccacctgtgtaaagaggttttcagttccgtgggtttcccctttgattctgtaaatagtcccagagagaattcgtgggctgagggcaattctgtcttggaggaagaagctggacattcagcctgtggagtctgagttttgaaggatgtagggagccttagttgggtctcagaccataagtgtgtactacacagaagctgtgttttctagttctggtctgctgttgagatgtttggtaaatgccaggttgatagggcgctggctgcttggagcaaagggtgcatttcagggtgtggccaccaggtgctgtgagtttctgtggctcatggcctctgggctggtcccttgcacagggcccacgctggagtcttaccactctgctgcaggggtggaaggtggcccctcttgtcacccatacccatttcttacaaaataagttacaccgagtctacttggccctagaagagaaagttgaagagtcccagacctactagcattttgcaactatgcttgtaaagtcctcggaaagtttcctcgcgtaccagacagcggcgggggctgatagcaattttagtttttggcctccctatcctctcacatgagaacactgcctggatgcatctcatgatctctggagaatttccccatctttctcttctttccatcgtgtggattcaatagtgtggatttgaaggctgccctgcccccgactctcctgccgcacccctggccattgtaccttttgatgtttagaagttcgtggaagtagacgctgaggtgtgcagaggagctggtggataacagaga

SEQ ID NO: 7847 - DNA, 1135 bp, Homo sapiens
tcagtgggcacagaggagatgcctgaggatggagagcccgatgcagcagagctccgccggcgccgcctgcagaagctggagtctcctgttgcccactgacactgccccagcccagccccagcctctgctcttttgagcagccctcgctggaacatgtcctgccaccaagtgccagctccctctctgtctgcaccagggagtagtacccccagctctgagaaagaggcggcatcccctaggccaagtggaaagaggctggggttcccatttgactccagtcccaggcagccatggggatctcgggtcagttccagccttcctctccaactcttcagccctgtgttctgctggggccatgaaggcagaaggtttagcctctgagaagccctcttcttcccccacccctttccaggagaaggggctgcccctccaagccctacttgtatgtgcggagtcacactgcagtgccgaacagtattagctcccgttcccaagtgtggactccagaggggctggaggcaagctatgaacttgctcgctggcccacccctaagactggtacccatttccttttcttaccctgatctccccagaagcctcttgtggtggtggctgtgccccctatgccctgtggcatttctgcgtcttactggcaaccacacaactcagggaaaggaatgcctgggagtgggggtgcaggcgggcagcactgagggaccctgccccgcccctccccccaggcccctttcctctgcagcttctcaagtgagactgacctgtctcacccagcagccactgcccagccgcactccaggcaagggccagtgcgcctgctcctgaccactgcaatcccagcgcccaaggaaggccacttctcaactggcagaacttctgaagtttagaattggaattacttccttactagtgtcttttggcttaaattttgtcttttgaagttgaatgcttaatcccgggaaagaggaacaggagtgccagactcctggtctttccagtttagaaaaggctctgtgccaaggagggaccacaggagctgggacctgcctgcccctgtcttttccccttggttttgtgttacaagagttgttggagacagtttcagatgattatttaattt

SEQ ID NO: 7848 - DNA, 1235 bp, Homo sapiens
ccttcttctaagctgttgtccacgcagcactcgagccaccttttagagtcctaatgcagtcacatgcctcctcgctgcaagctgtgggagggttcttaccctttgcttcagtccacacgccctagtccctggccggctcctgggagctctgcggcctccctgggtctccgtgtttcctagagcctccgtaagtgctccctgtccgcagatgcgtggggcccttcctcacctctgctctggggtgccctccgcctggcttctgcttctcagcagcttcccagggcagccccttcgggtctcagcgcataggtcccctactctgatctactcctgcttgcttttttttgcagttgctctgctcgctaacctaacggacttgctcagacttaagcctctagtttccaaatgcaggccgtgagggcatggaccgagcctggcccagcctgcccatcaccctgcatgttccaggtgctcaataatatttgttgaatgaatgaatgcgtgcacagggacgtgctgaggaggcttgggggccaattggctctgccccgccctgcctctgatccccgcctcctcacctgcccgcagccaccttctgggtgaaccctcagttcaagatccggctggatgagacggatgacccggacgactacggggaccgcgagtcaggctgcagcttcgtgctcgcccttatgcagaagcaccgtcgccgcgagcgccgcttcggccgcgacatggagactattggcttcgcggtctacgaggtcaggagggtggatcaccggtggatctcactgagcaggcagaggacctggcgcccccgacccgcagtgcaggcgggcttccaccagggggcgccagggaccatgcccttccccacaaattcccctccactccccccaccatcctgagggctgggaaatctcagcctccaggaggcacctgctgaggccctctggccgaaagagaggaagggggttggctcagggaagggagattctgggattcacctcacgcttagagggcggcctgctgctcttggaggagggagctggctcagctgatgcctgggagtactgagccctccgtcttggaagctgtgagcagaagctggcaggggaaagataggggatagggagggcctgtcggccaaggtgaggctgtgccagtcgctctgggattagaactccttgctcttgccctgtatctgccctgcttcacacactgccctcaag

SEQ ID NO: 7849 - DNA, 2070 bp, Homo sapiens
caaaaaaaattagaagaattcagccatagtcaatattaataaacaaggaatgacccaattgtttttcatataagggacaattattttgtgttttttagtgaaactacacaagtcttaaaactgaggtgcttgacaaacttctgtcttcccaggccctcttcctactcccaaaacttctgatttaatagggccaagagggcctgggcatcagtattctgaagtcctctagatgattatttctttcatctccatagaggatgatatttcataatatttgaagacttagaggtttatcccagctcaggaaaccatggaactttcctgctgcagagcatccctcgtcctacctgtagctgatcctgctatagagatggggtatcaagagcagaggaattgcaagcaggtggggattgtgtgggacccatcctgaccccattttgcctctctgcaggaagttggagctgccacctgtgtctggacctgttgaaagagaaagcttccatctaccagaaccagaactcctcttgatgtggccacccacctgctccccgacatatctaaggctgtttctctcctccacttcatatttcatacccatctttcccttcttcctcctctccttcacaaatccagagaaccttggggtggttgtgccagcctgcctttggcagctgcaagctgaggtggcagctctgaccacctctggccccaggccctcagggagaaaggagcaacacactgcccctaggcgtgcgtgtggcccagtttctctctgctctccattaagtgcattcactctgcttgccttgggcccagcccctggtgatcacagggttcaaacagtgtcctcctagaaagagtgggagagcagctcacttctctgtgttctgcctcccctctggtctccagagttttcctgtcctctagaggcaagccaggccagggagctgggagcgagcaagctgaggccacgtccacaaggagcttttcatgcccctgtgccgcatagcctcacctctttcctccagagtggctctctgcggccctgtgttcctgctacagagtgttcttttctggagtcaggatgttctcggtcaccctcctggttctgccctgtcccattccaccccaccccagggggaacagtagcttcaccttgttattcccattgctctcctggctcactcttacggtcggtctccagtgactgaagcattccccacccttggaatttctcatcttctgcctcccttcctactccttttggttttgtggggagaggggaaggatcagggggccaggccagcagctcgggggccacaaggagatggataatgtgcctgttttttaacacaacaaaaaagcctacctccaaaatcccctttttgttcttcctggacctgggcattcagcctcctgctcttaactgaattgggagcctctgccacctgccccgtgtatcctggctctcagctcatggggaagccacatagacatccctttcttcccttgcacgctcgctagcagctggtaaggtcttcacaccctgattcctcaagttttctgcttagtggcactgacattaagtagtggggggacagtccatgccaggacaccctggagtagccttcccccttggccgtgggcaggccctaactcactgtcgctttggagttgaggtgtcttttttttttctttctttagttcctgtattctaaacattagtaaaaataaatgtttttacacagagccctctgctggatggtttatctcctgcctttctccattaagaaggccatttcatcctaagatttccatgatggtggtttttttttttaatgttttgaaatacagcttttttccccccaaattaaaatttttttgtggaaccccaatatgtaaagcgaatataaaattggttattttgttttgttacataaattcaagtttataacaattctttgttataaagaacaatgaagctgttttgatcaatacaaaatttgggttaaaatcaactttaacatctatttttatgtttcagttgatttggagaattctcctagtctt

SEQ ID NO: 7850 - DNA, 1297 bp, Homo sapiens
ggcctccagacccacactcacagtctgtgaaaaactgaaaatcccctggtgggcactccctggagcccaagcagctcccctaggggactgaccggacctgacctcccctccctgtgtctgggtcttcaggttttagtttggtctttgttcatctgagttgtgctggggcaacgccaggaagtgccctgggtacctctgctgtgcgctccttcccaggtggcgccatggattcctctgggggctggcgcatgcccaggaaagcctgggccacacgggacactctcttctttatcgaggacacttggaaaggtgactgatatgggtgcttggcttctctggtcccagcttgccctccggggagcaggggctctgtcttgtcccagatgagctgagagcccctgagaggagggctttcccagccctgggaccctccgaggtgggtgtgcgggtctcacaggtgcttcctgggacttcctgtggctgcacagggcttggctttgtcttcgttcccggtggaaaaccgtgggagaggaagcttgggcctctactccaagtatcagagcctgttcaccctcctccctttggtagcttgtgaatgtgccaggtgtttcgaggtaggcttgccttctggcagcatggactttgttaaaataataggcggaaagaagaggcctgggaagggcccccagtcttttggaatgtcctggtcacagggtcatgtcagctgccagttctcgtctcccgtcctggagttgctcggtcttgcggagctgcccgcctgcctgttctggcggctccagcgcaggctgtccctgctgctttgattccaggtgattttattttttttatttttttattttttttgagacggagtcttgctctgttgcccaggcaggagtgcagtggcgcatctcggctcactgcaacctctgtctcaagcgattctcctgcctcagcctcctgagtagctgggattacaggtgcatgccaccaggccccgctgatttttgtatttttagtagagatagggtttcaccatgttggtcaggctggtcgtgaactcctgacctcatgatctgcccgcctcaacctcccaaagtgctgggattataggcgtgagccaccgcccccagctgattccaggcgaattcttctctgatgggcgggcgagggtgtgttcgtgtgatgggttggagtgtgtgtgtctgagtacacagatgatgtgttttcccttcagcttcttacgttttctgagcatccattgtgccttaacattttctgcttgtcctttgggaca

SEQ ID NO: 7851 - DNA, 2803 bp, Homo sapiens
gagggctataaaagcaaaagttgtggcaagtccagccggagttagcgacagggagggatgcgcgcctgggtgtagttgtgggggaggaagtggctagctcagggcttcaggggacagacagggagagatgactgagttagatgagacgagggggcgggctgggggtgcgagaaggaagcttggcaaggagactaggtctagggggaccacagtggggcaggctgcatggaaaatatccgcagggtcccccaggcagaacagccacgctccaggccaggctgtccctactgcctggtggagggggaacttgacctctgggagggcgccgctcttgcatagctgagcgagcccgggtgcgctggtctgtgtggaaggaggaaggcagggagaggtagaaggggtggaggagtcaggaggaataggccgcagcagccctggaaatgatcaggaaggcaggcagtgggtgcagggctgcaggagggccgggagggctaatcttcaacttgtccatgccagcagcccctttttttccagaccaagggctgtgaacccgcctggggatgaggcctggtcttgtggaactgaacttagctcgacggggctgaccgctctggcccagggtggtatgtaattttcgctcggcctgggacggggcccaggccgggcccagcctggtggagcgtccaggtctgggtgcgaagccaggcccctgggcggaggtgaggggtggtctgaggagtgatgtggagttaaggcgccatcctcaccggtgactggtgcggcacctagcatgtttgacaggcggggactgcgaggcacgctgctcgggtgttggggacaacattgaccaacgctttattttccaggtggcagtgctccttttggacttttctctaggtttggcgctaaactcttcttgtgagctcactccaccccttcttcctccctttaacttatccattcacttaaaacattacctggtcatctggtaagcccgggacagtaagccgagtggctgttggagtcggtattgttggtaatggtggaggaagagaggccttcccgctgaggctggggtggggcggatcggtgttgcttgcctgcagagagggtggggagtgaatgtgcacccttgggtgggcctgcagccatccagctgaaagttacaaaaatgcttcatggaccgtggtttgttactatagtgttcctcatggcgagcagatggaaccgggagacatggagtccctggccagtgtgagtcctagcattgcaggaggggagaccctggaggagagagcccgcctcaattgatgcctgcagattgaatttccagaggcttaggaggaggaagttctccaatgttctgtttccaggccttgctcaggaagccctgtattcaggaggctaccatttaaagtttgcagatgagcttatggggggcaatcttaaaaagtccacagcagatgcatccggctcgaggggccatcagctttgaataaatgcttgttccagagcccatgaatgccagcaggcacccctcctttcctggggtaaaggttttcagatgctgcatcttctaaattgagcctccggtcatactagttttgtgcttggaaccttgcttcaagaagatccctaagctgtagaacattttaacgttgatgccacaacgcagattgatgccttgtagatggagcttgcagatggagccccgtgacctctcacctacccacctgtttgcctgccttcttgtgcgtttctcggagaagttcttagcctgatgaaataacttggggcgttgaagagctgtttaattttaaatgccttagactggggatatattagaggaagcagattgtcaaattaagggtgtcattgtgttgtgctaaacgctgggagggtacaagttggtcattcctaaatctgtgtgtgagaaatggcaggtctagtttgggcattgtgattgcattgcagattactaggagaagggaatggtgggtacaccggtagtgctcttttgttcttgcttcgtttttttaaacttgaactttacttcgttagatttcataatactttcttggcattctagtaagaggaccctgaggtgggagttgtgggggacggggagaaggggacagcttggcaccggtcccgtgggcgttgcagtgtgggggatgggggtatgcagcttggcactggtactgggagggatgagggtgaagaaggggagagggttggttagagatacagtgtgggtggtgggggtggtaggaaatgcaggttgaagggaattctctggggctttggggaatttagtgcgtgggtgagccaagaaaatactaattaataatagtaagttgttagtgttggttaagttgttgcttggaagtgagaagttgcttagaaactttccaaagtgcttagaactttaagtgcaaacagacaaactaacaaacaaaaattgttttgctttgctacaaggtggggaagactgaagaagtgttaactgaaaacaggtgacacagagtcaccagttttccgagaaccaaagggaggggtgtgtgatgccatctcacaggcaggggaaatgtctttaccagcttcctcctggtggccaagacagcctgtttcagagggttgttttgtttggggtgtgggtgttatcaagtgaattagtcacttgaaagatgggcgtcagacttgcatacgcagcagatcagcatccttcgctgccccttagcaacttaggtggttgatttgaaactgtgaaggtgtgattttttcaggagctggaagtcttaga

SEQ ID NO: 7852 - DNA, 1120 bp, Homo sapiens
ggaagatagaaacaagatagaaaatgaaaatattgtcaagagtttcagatagaaaatgaaaaacaagctaagacaagtattggagaagtatagaagatagaaaaatataaagccaaaaattggataaaatagcactgaaaaaatgaggaaattattggtaaccaatttattttaaaagcccatcaatttaatttctggtggtgcagaagttagaaggtaaagcttgagaagatgagggtgtttacgtagaccagaaccaatttagaagaatacttgaagctagaaggggaagttggttaaaaatcacatcaaaaagctactaaaaggactggtgtaatttaaaaaaaactaaggcagaaggcttttggaagagttagaagaatttggaaggccttaaatatagtagcttagtttgaaaaatgtgaaggactttcgtaacggaagtaattcaagatcaagagtaattaccaacttaatgtttttgcattggactttgagttaagattattttttaaatcctgaggactagcattaattgacagctgacccaggtgctacacagaagtggattcagtgaatctaggaagacagcagcagacaggattccaggaaccagtgtttgatgaagctaggactgaggagcaagcgagcaagcagcagttcgtggtgaagataggaaaagagtccaggagccagtgcgatttggtgaaggaagctaggaagaaggaaggagcgctaacgatttggtggtgaagctaggaaaaaggattccaggaaggagcgagtgcaatttggtgatgaaggtagcaggcggcttggcttggcaaccacacggaggaggcgagcaggcgttgtgcgtagaggatcctagaccagcatgccagtgtgccaaggccacagggaaagcgagtggttggtaaaaatccgtgaggtcggcaatatgttgtttttctggaacttacttatggtaaccttttatttattttctaatataatgggggagtttcgtactgaggtgtaaagggatttatatggggacgtaggccgatttccgggtgttgtaggtttctctttttcaggcttatactcatgaatcttgtctgaagcttttgagggcaga

SEQ ID NO: 7853 - DNA, 1169 bp, Homo sapiens
aaaattttgtaaattgtttattttaaacttatctgtttgtaaattgtaactgattaagaattgtgatagttcagcttgaatgtctcttagagggtgggcttttgttgatgagggaggggaaactttttttttttctatagacttttttcagataacatcttctgagtcataaccagcctggcagtatgatggcctagatgcagagaaaacagctccttggtgaattgataagtaaaggcagaaaagattatatgtcatacctccattggggaataagcataaccctgagattcttactactgatgagaacattatctgcatatgccaaaaaattttaagcaaatgaaagctaccaatttaaagttacggaatctaccattttaaagttaattgcttgtcaagctataaccacaaaaataatgaattgatgagaaatacaatgaagaggcaatgtccatctcaaaatactgcttttacaaaagcagaataaaagcgaaaagaaatgaaaatgttacactacattaatcctggaataaaagaagccgaaataaatgagagatgagttgggatcaagtggattgaggaggctgtgctgtgtgccaatgtttcgtttgcctcagacaggtatctcttcgttatcagaagagttgcttcatttcatctgggagcagaaaacagcaggcagctgttaacagataagtttaacttgcatctgcagtattgcatgttagggataagtgcttatttttaagagctgtggagttcttaaatatcaaccatggcactttctcctgaccccttccctaggggatttcaggattgagaaatttttccatcgagcctttttaaaattgtaggacttgttcctgtgggcttcagtgatgggatagtacacttcactcagaggcatttgcatctttaaataatttcttaaaagcctctaaagtgatcagtgccttgatgccaactaaggaaatttgtttagcattgaatctctgaaggctctatgaaaggaatagcatgatgtgctgttagaatcagatgttactgctaaaatttacatgttgtgatgtaaattgtgtagaaaaccattaaatcattcaaaataataaactatttttattagagaatgtatacttttagaaagctgtctccttatttaaataaaa

SEQ ID NO: 7854 - DNA, 1096 bp, Homo sapiens
ctagtgagtgtatgagaccttgcagtgagtttatcagcatactcaaaatttttttcctggaatttggagggatgggaggagggggtggggcttacttgttgtagctttttttttttttacagacttcacagagaatgcagttgtcttgacttcaggtctgtctgttctgttggcaagtaaatgcagtactgttctgatcccgctgctattagaatgcattgtgaaacgactggagtatgattaaaagttgtgttccccaatgcttggagtagtgattgttgaaggaaaaaatccagctgagtgataaaggctgagtgttgaggaaatttctgcagttttaagcagtcgtatttgtgattgaagctgagtacattttgctggtgtatttttaggtaaaatgctttttgttcatttctggtggtgggaggggactgaagcctttagtcttttccagatgcaaccttaaaatcagtgacaagaaacattccaaacaagcaacagtcttcaagaaattaaactggcaagtggaaatgtttaaacagttcagtgatctttagtgcattgtttatgtgtgggtttctctctcccctcccttggtcttaattcttacatgcaggaacactcagcagacacacgtatgcgaagggccagagaagccagacccagtaagaaaaaatagcctatttactttaaataaaccaaacattccattttaaatgtggggattgggaaccactagttctttcagatggtattcttcagactatagaaggagcttccagttgaattcaccagtggacaaaatgaggaaaacaggtgaacaagctttttctgtatttacatacaaagtcagatcagttatgggacaatagtattgaatagatttcagctttatgctggagtaactggcatgtgagcaaactgtgttggcgtgggggtggaggggtgaggtgggcgctaagcctttttttaagatttttcaggtacccctcactaaaggcaccgaaggcttaaagtaggacaaccatggagccttcctgtggcaggagagacaacaaagcgctattatcctaaggtcaagagaagtgtcagcctc

SEQ ID NO: 7855 - DNA, 1214 bp, Homo sapiens
gtgggcagaaggggcagggctgccaagccaggaagctggtgggcacagagcacagggcgccggtcccagtcagtgggacctgccatgcccctgggcctggaggttgcccctggcaggccacagaggcccactgtgacctggccccagcctgcctccactgggactgcccatccatctttcgggtctggggtcgctggctgccattgggctttgctgccgcttcctccacctgcactgccctcccctcccagtgcccatcttgtgaaaggccagaatgtgggtatgtgatggggaggccatgggacctgtgggaccagggaagatgctagtagagggcagaactcagtccttgttccaagaccacggagaggtcttgggccctcacccggaatatgcaccagccacaccctcacctgtgccgcctctgcccgcaggtaaccccccgcggcctagcctggagcccgaggagcccaagaggcctgtccccgcagagcgcggtagcagctctgggacgcccaagctgatccagcgggcgctgctgcgcggcaccgccctgctcgcctcgctgggccttggccgcgacctgcagccgccgggaggcccaggacgcgagcgcggggagtccccgacaacaccccccacgccaacgcccgcgccctgcccgaccgagccgcccccttccccgctcatctgcttctcgctcaagacgcccgactccccgcccactcctgcacccctgttgctggacctgggtatccctgtgggccagcggtcagccaagagcccccgacgtgaggaggagccccgcggtgagtggcctgaagccggcctgcttcacatatgggagacgggggttcccagggagggaggagtggctggtggggacatgcaaggaggcaaggccgagaccacagtcatcagctggaccctgaaccaggcattcggggtactgaagacgcatgtagggagcagagttctaagttcagctatcaggtggtccaggcaggtgggggcgatgcctgctgtgaaataaaagaagtaatcgggccaggcagtggtgcacgcctgtgatcccagcactctgggaggatcacgtgagccttgaaaggttgaggctgcagtgagcggtgatcatgacactggactccagcctgggcgacacagcatacatgtaatcataatcgtagcaaactcctggctccttacttgtgcca

SEQ ID NO: 7856 - DNA, 2273 bp, Homo sapiens
aggagctgagcaagagcttcctgaccctgacccagcctgaccgggccctggtgaggaccagcagtcgacgggaacaacgcaggggggcaggtggctatcagccccttgaccggcggggctcaggggagcccacgccccagaaagccggctcctcagactcctgcttcagcggcactgacagggagacattgagcagcttcaagagtgagaagaccaactccacccatctggacagccccccaggggggccagcccctgagggcagcgacacagacccaccctctgaggctgagctgcctgcctcaccagacgccggggtcccctcagatgacacgctgcgttcctttgacacggtcattggagcagggacgccaccgggcctggctgagccgctcctggtcgtgcggcccaaggacttggccctgctacggcctagcaaacggcagccacccctgcgaagacactctccacctggccgtgcccctcgacggcccctgcttgaaggtgggggcttctttgaggatgaagacactagtgagggcagtgaactgagcccggcctccagtctccgatcgcagcgccgctacagtactgacagctcctcttctacttcctgctactcccctgagagctcccggggtgcagcagggggaccccggaagcggagggccccccatggggctgaggagggaactgctgtgccccccaagcggccatatgggacccagcggacgcctagtaccgccagcgctaaaacacatgcccgtgtgctgagcatggatggggctgggggtgatgttctgaggcccccactggctggctgcaaggcagagctggaggcccaggttggggtggagcaggctgctagtgagcctgttgtgctgcctgctgaggcgcgaaggggacccgctgccaaccagcccggctggcggggggagctgcaggaggaaggtgctgtggggggaggtgagtgcttgctctagaggcaggggctgggggacgtgagctacgggcttggggttgggcaaagggcaggtaagaatggacctggtcagtgtcagctcagcctcggttgtaggcagcagatggacgtgggcctggtggtgattgacattgtctgccaaacctcttagacatggggctcagccacctggctccacatccttgattagcacctgagtctctgtcccctgaggactctcatcatccacactcatcctcccaccaccagtggggtggggcagggccgatcagtgtcatccttgtttgcaagtaaggaaactgagcatggggctgtgtgacctggctgggcctcagagccggggcgtggttgtactaggcctttagctccctggcggaacaccgtccccaaccttactcccccagccttgtctgagcatctgtcacttacacttgggggcctctctctgggcagcggccgaggagactggcaggcgggaccgctcaagcagtgtgaggcggacccaggccattcggagacgccacaatgcaggcagcaaccccacccctccagcctctgtcatgggctcgccgcccaggtgagcaccttgccagctgtgccgaggggcaccgggggccggggagggcccgcaagctctagctggcgctgacctggggctgaccctctccagcagcctgcaggaagctcagcggggccgggctgcctcccactcccgggcgctgacgctgccctctgcgctgcatttcgcctcttcactgttgctcacccgggccggtgccaatgtgcatgaggcctgcacctttgatgacacttctgagggtgctgtgcactatttctacgatgagagcggtgagcctttcccaagcccggtggcccagtgcctccccgccttcccccaacagcctgagtcctcctagcagtggtgctcgctcggccctgtggcaggtacactgctaatgctgccagacatcatccttgcagcctctttgaggcacggtgtctctgtcatcttttgctctgctgatgaggaaacagaggctcagcttacagtacaggggagatctaaagctaggacaggtgactgccgcgcccaggctcttgacctgtaggccctttcctctccagaggctgggctgccctctcagaggacacagcacaaggttctgcctcatttgatgggtctggtgcccacgtgagccgggccttggtgcttctgtctctgccacgctgcctcatctcccataccctgccccaggtgtgcggcgttcctacacctttggcctggctggag

SEQ ID NO: 7857 - DNA, 1141 bp, Homo sapiens
cagagcgtgcagcctgatgcggcgtcccccatgcacgtgagtacccatggagcagcgcctctggccaggaggccccgggaggggctgagaccaggtggggaggagggtagggtatggagggctggggctccctcaccacccccatcacccccacctggccaggctctccagcttggacccagggccaggcctggggcccttgagtgtgtgcatgtgtcagaggtgtggccagtcggggagacccagctcctcatgggctgacccctcagggccacaactgggtgatcgcgtacagccgtcctgtctacttctgcatctgctgtctgctcatctggctgctggacgccctgggctcagctcagcccttcccacctgtctccctctacggcctcacgctcttctctgcctccttcttcttctgtgcccgagacgtggccactggtgaggctggggcagggatgaggtggcccaggagagtgagtccccgagggtgggccgcggaaagccagcaggctgaccaggccttcgtgtcccctccctgccagtgttcaccctgtgcttccccttcgtcttcctcctgggcctcctgccccaggtcaacacctgcctcatgtacctgctggagcaaatagatatgcacggcttcgggggcacaggtatgatgcccacaggtggctcagggatggggcccgtgtggaggcccaggagggccctcggattgggtccttggctccacccttgcggaaccttctcctgcgtctgtactgcagactcaaggtttctgccttctcccctctccttccctccccaggcaagtggtttatatctgagaatcttggaagctctaaaggccgcttggggcttggggcagcagagaacaatgggctgggggtgcctttccagggaggccagcctctgggagttgaggggaagcgcggctagggttgaggtggggtacctgcaagtgagagctgggctgtacttctcccttccacacagctgccaccagcccgctcacggcagtcttcagcctctcccgcagcctgctggctgctgccctgctctacggtttctgccttggggccatcaaggtaggggtggcttgcgaggtgggggcatgctgcagtgcgtaagggtggtt

SEQ ID NO: 7858 - DNA, 1184 bp, Homo sapiens
tcctcagggaaggcaggcatgtggaagccaggtgcagagtcctggcctctccacacaggtgccgcccaggtgatgtggtttgagaagctgtatgctggcctgcagtgcgtagagaagtacctcatctaccccgccgtggtgctcaacgccctcacggtggacgcccacacagtcgtcagccacccggacaagtactgcttctagtgaggaccaccccaccctcaacgatcccatcatccgctttcccttttgatccgtggggaaactgaggcctagagagggaatgaatcatgtctaaggttgtttagcaagctaaagcaggaccccagctcctgacacgccatcccaggaagtggttgcttcttcaaaggcaaatgtgttcccaccactccctttggaagagcagagactaagagtcacgggcccaaaagagcagggaccagcccagcagagcagaggccaggggttgctctccggccagagtaggcgagggatgggacacctatacccactgccccggtcccctaccaagcacccgatgcctgccccttgcccacagctgccgggcgctgctgatgaccgtggctgggctgaagctgctgcgctcagccttctgctgccccccacagcagtacctgacgttggccttcaccgtcctgctcttccactttgactacccgcgcctctcccagggctttctgcttgactacttcctcatgtccctgctttgcagcaaggtgagttggtggctgtggcccagaccccaggctgtccaatgggagcagagccaacttctgcctgggtgggaagagaatttcctgagggcctgtggccaccgctctgtatcagccccgtgggcctttgcagcagcctctcaaggaaggggttacttccaccctctacagagaggaagcaggctgaaggaggttgagggacttgcctcaggcttccagagaattggtggtcagccaggatttgaacccaggcctgtctgaccccacgaccacctcctcagaaatggttagggtaatcaggacctggccttatcctctggacgcagacctctgagttccacgctcttttgccaccctggatccagagcagtccgagctgagtttcagaagcccctagtgcctgggtgtgtataggtgctctgccggctgtggcattgccacggcttgggg

SEQ ID NO: 7859 - DNA, 1135 bp, Homo sapiens
cccgccaacctctcccccctcccccaggcgcctctagacctcagcctcagcctcagcctcagcctcagccccgatgtcagcactgaggcctcaccccccagagcttcccaggacattccttgcttggacagcagtgcccctgagagtggcacacctatgggtgccctgggcgactggcctgcccctattgaggagcgtgagagcccggcagcccagcccctgctggaacaccagtactgagctacctggcgcccactggaccacctcctaggattcagtaacggacctgctctgctgcctctctgctggaccacagaactgagtggctttggcctacatgtctgaaccctgacctttggctgccttggccagagtaccaaaactgagtgacccagacctctgaccttgacccctgatctctctcatccccagtccagggcctgggctccccagatggaggcagtcagcctcccagccaggccctaagagccaaaccatgggctggtcccacttggagcctgtggccaggaccacctcagcccctgggcctgcactgcctgcaggtgtggcccccttggcctggacctggggcctgaattgtgggaagggtggtttctttctttccttttttttcttttcttttttttttttttttttgtgcttcggagacatcagaattaataacactatttttgattttggttggcagtttctttttctacctgggaatgggtacatgatagtacaggcggctaagttgggatggacaagcacgcagaggggtgaaggatgtggggctgaagtctagtagagatcaagggcagaccaaggtggggttcaggtagaaccgggtcctcttcaccgcatggctgctcccttttcaagcctttatctgaagggtattgtctgccatttcccaccatatggtcagacttccaggtctggtggctcctacatttatcaggcttgttcttggccaaagcctttctctgcacctcagctgctccagggcgtaaagagatgacacctatctaaggtgtttttagaataaatgagagcgcgctagtggaatggttgcccagggcccagtgcttagcaagtgctccataaaatagtggcagactcttgagcacct

SEQ ID NO: 7860 - DNA, 1200 bp, Homo sapiens
gccccttcccaaagacagaaacaccctaggtcttcaccaggggcagtgggggagccattggtgccttggctttctcctgcctgaatgaggaggggtttggggcacagaagacctcatcacgagcccctactatccaacccctagctcctccggaagcgccacattggcaacgacattgtgaccatcgtgttccaggagcctggcagcaagcccttctgccccaccaccatccgctcgcacttccagcacgtgttcctagtggtgcgggcacacacaccctgcacgccacacaccacctacaggtgggcaccggagtggtcccaggtctcccgtgggcatggagtcctgccgcccctcactaacgcctccctccccgcagggtggccgtgagccgcacccaggacacccctgccttcgggccagctctgcctgctggcggaggccccttcgcagccaacgccgacttccgggccttcctgctggccaaagcgctgaatggtgagcaggcggccggccacgcgcgccagttccacgccatggccacgcgcacccgccagcagtacctgcaagacctggccaccaacgaggtgaccactacgtcgctggactcggcttcacgcttcggcctgccctccctgggtgggaggcgccgggcggcccctcggggcccaggcgccgagctgcaggcagcgggctcactggtgtggggagtgcgcgcggcgcccggggcgcgggtcgccgccggggctcaggcgagcggccccgaaggcatcgaggtgccctgcctgctgggcatctcggccgaggctctggtgctggtggcgccgcgcgacggccgcgtagtgttcaattgcgcctgtcgcgacgtgctggcctggaccttctccgagcagcagctggacctgtaccacggccgcggggaggcgatcacgctgcgcttcgacgggtcccccggccaagccgtgggcgaggtggtggcgcgcctgcaggtgagctggagtggtaaactggggcccctgcgcgcggcggggcggagcctgctttggacccctccctcccgccgcctttgtcccctactcctgcggaagggaaagtcgaggagggcagagccagccccggggcttggcaaggccggaactggtgccctcgggtaagcgacttctggtcttcatccctcgggcggtggcacacgcggccctc

SEQ ID NO: 7861 - DNA, 1195 bp, Homo sapiens
atcccagcactttgggagtccaaccaaggctggtggatcacctgaggtcaggagtttgagaccagcctggccaacatggtgaaaccttgtttctactagaaatacaaaaattagccaggcgtggtggcgggtgcctgtaatccagctcggaaagctgaggcaggagaactgcttgaaccccggaggtggagattgcagtgagccaagatcgcgctactgccctccagcctgggcgacagactgagactccatctaaaaaatggggtcattgggtgatcttttccacatcatcgatcctttagggtttcaggttttttatctggaaattggggatcatggtacctcccccttagggttgctgttaggcttgaaggaaacctgtcaaagggctgtgagctgtggtgtcctgctgagctgtctcttacaacctggtattttccactggccctgggcaggactcccaggacagctctgatggaataccgtcagcaccacgcatgactggcagcctggtgtctgatcgaagccacgacgacatcgtcacccggatgaagaacattgagtgcattgagctgggccggcaccgcctcaagccgtggtacttctccccgtacccacaggaactcaccacattgcctgtcctctacctgtgcgagttctgcctcaagtacggccgtagtctcaagtgtcttcagcgtcatttggtatgaggggtccagggaggctgccttcccagcaccctccacgttgcccttgttcctgatcctcctctcttccccagaccaagtgtgacctacgacatcctccaggcaatgagatttaccgcaagggcaccatctccttctttgagattgatggacgtaagaacaaggttagtgcttgagaggcagtgaggcgctggggtgaatcaaatgacagcttcttcttgctcaggtaaacactgaccagtcaagccagcagatcagtccagcccatttttattgagttcctgctgtctggcaggtgctggtagccaggaatgagacagtctctgttctctgacagcttagtccatgggagagacagtcataccaatgacctctagctcccagtgtcctaagtgtcatgaaacagagggtaggttagcaggacccaaaggaggtggtcagcagagcttcatagagggttacctttcagccttggtggatgacaaagt

SEQ ID NO: 7862 - DNA, 1450 bp, Homo sapiens
cgtgtttctgtccagggcccccgagtctgcgccccttaagagcaaaatgatttatgccagctccaaggacgccatcaagaagaagctgacaggtaagggccagcattggtgctgagtgcccttctgctctggccttggctgcagggcagggtgaatggcacgcagagggggtctgcccccttgtcttcgctgcctgcttgttccttccatctgctttgattggctccttcccagccacagaaactacccccaccccagtgcttcctgctcacagatgctcccctttcttctttatagggatcaagcatgaattgcaagcaaactgctacgaggaggtcaaggaccgctgcaccctggcagagaagctggggggcagtgccgtcatctccctggagggcaagcctttgtgagccccttctggccccctgcctggagcatctggcagccccacacctgcccttgggggttgcaggctgcccccttcctgccagaccggaggggctggggggatcccagcagggggagggcaatcccttcaccccagttgccaaacagaccccccaccccctggattttccttctccctccatcccttgacggttctggccttcccaaactgcttttgatcttttgattcctcttgggctgaagcagaccaagttccccccaggcaccccagttgtgggggagcctgtattttttttaacaacatccccattccccacctggtcctcccccttcccatgctgccaacttctaaccgcaatagtgactctgtgcttgtctgtttagttctgtgtataaatggaatgttgtggagatgacccctccctgtgccggctggttcctctcccttttcccctggtcacggctactcatggaagcaggaccagtaagggaccttcgattaaaaaaaaaaaagacaataataaaaaggctcattaatgggatgtgtttttcaaggttgggacacaggagacttcaggattgggggtgcactgggataatggtgctatctctctcctctgtactccacacccaaccagcccctgcacacccttatctggctccaatgactggctgagacgcctttctgatggtcaccattattctgttggtgctgtgattgacactggactggctgtttaaggagtgggtgctggctacaggggtcttccagcggaagtgatttatgcctgaactgggtgctctgtagccttgcctggatggacagtgaggtccatctgatattctgttctgtccctttctaggtgtgggctgataggcaagtcagaggtagctcaaaggttctgtttggtctgctgtcttccctggatggctgactcaagtttatgagggtcaggttcagtggctgctgtgagtcaggccaagttgagcctttgacctcctctagatgtggctggagtgcattcagggtggggccagccag

SEQ ID NO: 7863 - DNA, 1200 bp, Homo sapiens
aggaaggccctgtaggatgttgggtattcattcaaagggcatccaaacccattgatgggtttggagcagaagagtgaccccagtgaaagaggtgcagagtggagttaggcggcagatagcagctgggcctgcatgggctgtgggcgtggcctgtctggctgctgccagggaggacccttaggttcctgggtctcaatggcatcaccccagaaactgctgggtttgcccacagccgctccctcccccaggtggtggagattgtgaagaagctggagtctcgccagcggggctgggaggaggatgaggatcccgagcggaagggggccatcgtgttcaacgccacgtccgagttctgccgcaccttgggggagatccccacctacgggctggctggcaatcgcgaggagcaggaggagctcatggtgcgtctggggcggccccgccctctgcttccctcggctgggtgggctggctggggcctgggccgaccctggtcttttgtgccccaggactttgaacgggatgaggagcgctcagccaacggtggctccgaatctgacggggaggagaacatcggctggagcacggtgaacctggacgaggagaagcagcagcaggatgtgagggccgcgccgctggggggtgggcgtttgggggtgctcaagctggagatgagcaccgggctcggtgtccagagcctcagcctcctcatccagagtgggctctgcagacctcccagggcgatctgaggagtaaatgaggaaattaaatgttgtggagggctggtgcctggcaggtggtgaccagtgggtggggctgagaagagccggtatggcctgctaaccacccccgccacgtgtcccgtagttctctgcttcctccaccaccatcctggacgaggaaccgatcgtgaatagggggctggcagctgccctgctcctgtgtcagaacaaaggtagggagctcagggcagccatgacttgggtgggcttgggtgctgctgcaggtgcaggcagggccccctccggtcccctctgctgcccctttctctcagtcccaatgctggagccagctgtccggcccagagccactccttcccctccactgtggcatctgtccgtctgctctgcctttgaggctccacacctgcttggggaaggagaggggagttgaaactgttccagctgtggcacagagagc

SEQ ID NO: 7864 - DNA, 1186 bp, Homo sapiens
tccaggcccttccagcactctcgtaggccgcccgaccgtcctgccctaccactcagctgcccccttgctctctggggtttgtctccctgcagccccagccccagccccagcgtccaggcccagcccctgcgtggcaggtctccaggttccccatgctctgcccccatggcagcgcatccactagccaagctggtctcccggcctctgctggggccctgcagggtgccagcgtctgtgctcttttcccatccccttcccactgcaccccaggcctggcattggggtcaatcaacacccgccctgttattatacaccttgtgggcacaggtggctccggccccacccagggccctgcatctcctctcatgccccgcgtccccaggctttccggcagctgtcgcaccgcttccatggcaagggctcaggcaagatgaagacagagcggcggatgaagaagctggacgaggaggcggtgggtgcccttggggatgtggggggccctgtgcctgccggggcaggggtggctggtgtgtggggcctgctgcagccctttctgagtggccccgacccctcagctcctgaagaagatgagctccagcgacacgcccctgggcaccgtggccctgctccaggagaagcagaaggctcagaagaccccctacatcgtgctcagcggcagcggcaagagcatgaacgcgtgagtggctcgaggctggtggggtagggtgtggtggggaggggtggcgtggcctgtgcccgcctctgcagcctcacgcccctgttcttctctgcaggaacaccatcaccaagtgacagcgccctcccgccccggccctgcctcaaccttcatattaaataaagctccctccttattttttcctccctggtcgtggtacagattccagggttggatctttggttgggtgtggcacagagtctggctcctgctaggtgagacctggccatcaaatgacacaaacaactaaacgatggaagagagagcgagcccgggtcctctaaggctccttccttctcccctggctgtcggtcacacctctgcagggccggctctctgatagaaagtggaaggcggttttagaaactcatcaccctgctctctcctggcctcgggggctgcacaggtcactgtcctgtaatgtctcccggtcagggcagcccaggactg

SEQ ID NO: 7865 - DNA, 1315 bp, Homo sapiens
atgggggagaagccagtggggagcctggctgggattggtgaagtcctgggcaagaagctggaggaaaggggttttgacaaggtgtggggtggctgcgtgtacctagtgcaagcggggggtggaagggaagtgattccatctgctgggggatggacagtaaggtataatctgaagaggctgccagagcctgggcacctggtggagaggagaggggggcaaaacccgcgctgcttcctgggcttgtgtgctctgaatggcacaggaatggctgtcttgctcttatctctcactgagcactgagcagcacgctccttccttttccctgttttgcaggcctatgttgtccttggccagtttctggtgctaaagaaagatgaagacctcttccgggaatggctgaaagacacttgtggcgccaacgccaagcagtcccgggactgcttcggatgccttcgagagtggtgcgacgccttcttgtgatgctctctgggaagctctcaatccccagccctcatccagagtttgcagccgagtagggactcctcccctgtcctctacgaaggaaaagattgctattgtcgtactcacctccgacgtactccggggtcttttgggagttttctcccctaaccatttcaacttttttttggattctcgctcttgcatgcctcccccgtcctttttcccttgccagttccctggtgacagttaccagctttcctgaatggattcccggccccatccctcacccccaccctcactttcaatccgtttgataccatttggctccttttttggcagaacagtcactgtccttgtaaagttttttagatcaataaagtcagtggctttcatgactgggctttgtgcactgaaaagcaagtgggctgggagttgcctctccttcagggactgaccatgtttccctcactccttatcagtagagaccgaaactggcagcttcccttccactcccagagggcagccaccctagccatgtaggcctcaggcaggtgacttttgtctcaatccccgagtgatgtgggagagggtgtgggtggatcttttcctgggagccagatggactgtgctccagatgtcagttaagtcaacagctgggctaggcagcacctggtggaaaagtcagtgggagtcagaggtaccagacagggtgggccggatgtgggtgagagttcacctgccagtcatcatctgctctcccggcctctgtaagggtgggcagggtgcttgccatcttccatgatctcttagggaggagaaggagcacaggcatcacagctggaaggatgtgagg

SEQ ID NO: 7866 - DNA, 1549 bp, Homo sapiens
gtatgaggagcatgtgcgggagcagcaggctcaagtagagaaggaggacttcagtgacatggtggctgagcacgctgccaaacagaaggtaggcgcttccaggggcgctgggctgggtgagagccagggaccctggcctgccgttttcagtggcatggtgccctctagtggtgagagtgagggtggcctctgcttgctgctctgtgcttccttagatttggaagtcttagaaatcctccagtgggctgccctctttaaggacgatgagggggaggaactcagccaagtctgagagggagctcgaagagaattcagattcagcgcctttcccacagacttctatgtctatgtcaggctgcccacccttgttttgggggtccgggggtggttcaacctgtcttaacctgtgtctctttctccctatacagcaaaaaaaacggaaagctcagccccaggacagccgtgggggcagcaagaaatataaggagttcaagttttaggtcccctcacactagccctttttttggccctacgtctggatgcctgggcttcacacaagaaccacctctcccgcagttcccaaggacttgtcatttcatgttcttattttagacctgttttgtaaataaagctgtttcccaaggaaagagatgaatatttaacactcctgagcctccctcatctccttttagccccttcttgcaaaaggactaaaatagtctctttctacaatcactgggctgccccagtaaccacgaacataaactgggattagacggcgcatttgactggtggtgacgccaaccccaggctgaaatctgtgtttcaccactgccctgctttgtaggaaggcttgggggaagtacctctaggtctggtttgaccttactactttgtccttggggagtaaaaatagccagattagcgccctagcgcggcagaggaagtaacagtgggcttgggaagtaggccagggcaggccttcccaactgaccttgtgaccagaagttcaagtccttacctgtgcgacaacatagctcaaaagctaaattgtcttgagtccatatgaacccttgggttcaagcaacactagtcgctggggtttgggatttgtatgtgggatggggggacttactttctccaggttgtaatctggtcctgagcagcctttctgacagactagagcaggctggatcactggctcccatgggcatttgccagcctgtggggagggtagtcatgcgctgctgttgtactactgttggtgtttaagtgcaccagtggaggcgctcacttgccggagggttcaagatggtctcggggttgtggggggcatgatccagataggacgtggcagctgagctaggccttaggaggaatggaattttagaaatttggtaagcaacaaagcactggcactctaaagaggcatttggggggtagggaaagaagaggaaggttggctccagatgggccccggggtagcttgagaattcacttatgcgaagaaccttctggactccaggtccctgagcccccgcttgccctc

SEQ ID NO: 7867 - DNA, 1274 bp, Homo sapiens
aggggcctcccagtctccccccaccacccgtgcacgacttcctcaccacccccaggttccctgcagatgtcgtgtgtgtcctgagtgtttctttggttctttgcacgccaagtctcttggttgtaccatgtgacacaccctgtgcactggtcgctgtcttcgtggcttccacccttgttaatgatgctcctgcctctgcctcccagcccctcacccagcacagctctgcctggacttggagagatgggaggcagacccccaccaccatacatgctgtctgtggcccctcagacattctgtttcatctcccattcatctccctcctcccaccgtgtcagtttttctgcctttccctgctctgttcttccccctccttaggccccagcctgggcccagacccatcctcccagccaggtttccctccagcaggctccttccctccctgtcacctccctctcaccaacccggggtctgagcccctcattcctgaccgtccgtgttctcaggagtggttgaggacacagggccccagcccagccctctgcaccccccagcccggccatctgcgccccacagcccctttggagcttttctcttgtcctctcactccttcccagaagtttttgcacagaacttcattttgaaagtgtttttctcattctccatacctcccccaagctctcctccagcccttcccagggctcagccctgctgtcctgagcgtctcctgggccagagagaggagatgggggtgggagggactgagttgatgttgggtttttcattcaataaattggtgatttcttaccgactgccttgggcttctatgccccctcactgtgccacaggagctgcccaaccccttttccacagtgcagcccaactccagtgaaaatccaccaggaacgtaggtggaaagaagcgtactcccatgttctcaatcatggaaacaggcatgaaggtgtctcacctggcatgaggcaggcagaggtcggaaacaggaaagatgtcatttccacaccaaaagcccgtttttccccaggacccaccatccccaaatccacctcccaaggcagtgacgtgttgagtgtggcttccccatcttctgatcaaaggtcagaacttagcttctctcccctgctccaggttggtgaagtccgagccagtggggtctttgcctctgcaggtggagggaatagggctgagggacatctgtggagttccttttcctgcccgcccttgacttagagatggaaagcagtggtagccactgt

SEQ ID NO: 7868 - DNA, 1804 bp, Homo sapiens
tgaccatggctgctgaaatcaaaaagcggatggggcctggagcagcctctgggggcgagcggcccaatctcaagatcgacagcacccctgtaaagccggctggcggtggctgttgctaggaggggcacatggagtgggacaggagggggcaccttctccagatgatgtccctggagggggcaggaggtacctccctctccctctcctggggcatttgagtctgtggctttggggtgtcctgggctccccatctccttctggcccatctgcctgctgccctgagccccggttctgtcagggtccctaagggaggacactcagggcctgtggccaggcagggcggaggcctgctgtgctgttgcctctaggtgactttccaagatgcccccctacacacctttctttggaacgagggctcttctgtcggtgtccctcccacccccatgtatgctgcactgggttctctccttcttcttcctgctgtcctgcccaagaactgagggtctccccggcctctactgccctggctgcagtcagtgcccagggcgaggaatgtggccaggggatccaggacctgggatccagggccctgggctggacctcaggacaggcatggaggccacaggggcccagcagcccaccctttcctctccccactgcctcctctcccttcctacactcccagctcgagccgtccagctgcggtgggatctgagtatatctagggcgggtgggcgggtagcagtgctgggcctgtgtcttgagcctggagggagtctgctcctgccgccctctgccctgccagagacagacccatgcgctgcctgcccaccgtgcccctttgtccccatgtcaggcggaggcggaaggcccaccgtgccagaggctgggcaccagccttaaccctcactctgctagcacctcctccctttccccaaggtagcacatctggctcactccccactccgtctctggagcccaccagggaaggccctcatcccctgccgctacttctctggggaatgtgggttccatccaggattgggggcctctctgctcacccactctgcacccaggatcctagtcccctgccctctggcacagctgcttcctgcaagaaagcaagtctttggtctccctgagaagccatgtccctcgtgctgtctcttgcctgtcccacctgtgccctgccctccagcttgtatttaagtccctgggctgcccccttggggtgccccccgctcccaggttcccctctggtgtcatgtcaggcattttgcaaggaaaagccacttggggaaagatggaaaaggacaaaaaaaattaataaatttccattggccctcgggtgagctgagggtttttgcaaggaagttgtggtggccaagtgtggtctgtggtctaagcccagccttggggtggggggatggaactggaaccctgggcttggtggggtgcacgggggtcctggcttggtttctgtgtcctaaggctgctggcaaaagcccttgaccccgtttcctgaggccaggaaagctgcttgtgcttctgtggtctgtccccaagggcccagcaccgttctgtcagggaaagaggcaggcggccatcagctcatacctggcgtgccgccgccaactcccgcggggcacacggcagaggtgtggggtcgcgcagccgctgagagggcccccactgcacctggcccaacctccttcagcgccccccaaaaccccactgctcccattcagcccctgtcctggcgtcattgtgtgtcccagccaggtgcttctgccgtctccgacag

SEQ ID NO: 7869 - DNA, 1257 bp, Homo sapiens
cctttcacctgctggcctacagtggctacaaatacgtggggtgagcacttgtgggccagggggaggtggccttggatctgggcctgcatagctgtagcctcgaactgtgaccctggacatgtctcggcccctagtgacctctagcactgctctgttaagagggagcagctgtctccagcagtctcctgaggatctgcgtgccatgcagaggttggggaggtgttgagagtcactctgcgagtcttggggagagaagggggtctcagatccaggtcctggggctgagtcctgggccttccatatccctttggggtctgggtccctgtggggacagattgagagtaaaaggtgctgtgggaggtggggtctagctgggctctgggcgttgggggtagggccaatctcaggcctagacccctgggggtcaccaaccctttcctcctcccacccccagaatgatcctcagtgtgctcacggggctgctgttcggcagcgatggctactacgtggcgctggcctggacctcatcggcgctcatgtacttcattgtgagtctggtgcacccccccattcccctgccttcacttgagggcaaacctccccctcctggccaggcttcagttctcctttcttccaggtgcgctctttgcggacagcagccctgggccccgacagcatggggggccccgtcccccggcagcgtctccagctctacctgactctgggagctgcagccttccagcccctcatcatatactggctgactttccacctggtccggtgaccccctggccccagatggcactgagtttttcattcattgaagatttgatttccttgactttgtctgacccttgttcctggggcctgatggggagctacagatacctctgcgcctctgcattgcccaggggatcgggcttggggccgtctaggaagaaggtggacccagggagggcttcatgactttggtgaccttgatactgccttgtaagggtttcagcagcctcagctgggaaagagaagatggaaggaggctgctgaggggacctggaaggcgtctgatccctctggggggctccagcagggtctgtgggctagtggggtgagacaagccaggctggggattcagcttagggctgccccctatacagtccctgtaatcggcccccatctcctcttcaagctttccaggagcagaaccggggcccacatatttgcagtagtttattcatattttgtcacaaatggccgggg

SEQ ID NO: 7870 - DNA, 1226 bp, Homo sapiens
tcccctcttcgatgacacaagcggtggttattccagccagcccgggggatacccagccacaggagcagacgtggccttcagtgtcaaccacttgcttggggacccaatggccaatgtggctatggcctatggcagctccatcgcatcccatgggaaggacatggtgcacaaggaggtgtggcctgcccccggggcacgggtggcagaatttttggctagggctggggcatcatgggattccacccgattcctcacagtgccctcagggatggagcacacagaggggcaccctgaggcctggggtgcggcttgcccacagcttcctctctcccctcccagctgcaccgttttgtgtctgtgagcaaactcaagtatttttttgctgtggacacagcctacgtggccaagaagctagggctgctggtcttcccctacacacaccaggtgagcttcctaccaagggagctggtgggccttcctcattctgcccgagtctggcccccagacctcaacccccttctctcctcttttctcttcttcccctcctgatgtggccgctgctgccactgccactgccagaactgggaagtgcagtacagtcgtgatgctcctctgcccccccggcaagacctcaacgcccctgacctctatatccccagtgagtctccaacctgggctggggaacgtggtggggtggggtcgggggggacttgtgccttgagggatgaatgggaagagaggcgcagctactgagtcagcatctgttcttggtgctttgtgtatgtgtggcagttgcaagacaccaggcaggcagtgcagggtgaccagtaaggagcttcctgaatgcgccttcagtgtccccaggacacccttttgagaccttcctgtttcttgatttggactgtatccctccccagcctggagctctgggtttagacctggctttgcagactccagctatgggatttcaggctggttatttgtacttttcagtaaaacaggactaatgtagtccctaccccaaaggactgttggagagattcagcaaggtgatgtttgctcagcacctcacctggcacacaggaaggacgtaggaaacattaactcttatcatcgttattgcttgtcctccaaggcgtgctctgttatcccttcttccaagaagcctttcctgaccccctgagcaagtggtggctcccttctgggttcccacaactgcctgtcca

SEQ ID NO: 7871 - DNA, 1202 bp, Homo sapiens
ctgtgtcccctcagaagagaaaatcggatggtaagaaccatggctgttgcatggccttccctgcccccttgccatcacctttcctcagctcagcttccaggaaggagcccagagaaaggctgtgactgtgtcagaatcagtggctcaagaaagttaggatggtctagatttgaggggcttgtgggagtttgaggagcaggaaccaggatggggctggggaagctctgggttgatggagctcccactcaggaggggtcagggagggctgtggagctgcccaggaggcctgttctgggccagcccaaagccactcagtaagtggctgcctccttcctttcagcttcctaactggtgacagttttcttcttcccacatatgcacaggaccttgaccctgctgttcacagccagggggaccctcagagcagctggcactgcacccaggattctcgtcttcctcctgcagacaggcggacccacaggcccctcagggtctgcccagccaggctcctgtggtgctgctgggccctcccactccatctggcactggcctggactcctcctctgccctcctcgaggcctgcacagctgtggccgtggagctgacctgaccaggcaaggctgctgtctccatccctgagccgcctgccacctcccactcctgaagatccatctcttggggctcccctgacagagaagacagccgaagtcaaagccacatcctcttgctgatgttggatgcaggctgtccggcctcagggccagggagccagtttccactgtgcgggaactctgagtcagacgtgattatctgggggtctgtccaccctggctggatctggaggcaagatgccaggccccccaggtgttctcagggcagttcttggtgtctgcttctcagattccaaggactggaattaaaacctttcctgggactctggcgtgccctgtgtgtgtgtgtgatttaccttgcaagagaatcagggctcccgtggggagcacctgaaccaggccgacttctagggtgcctgcagattgccactcctcacactacccagcagaggctagagcactgtgcgtggggccaggctggggagggggaggtgggcgctgggctgcctggcgctgggcagagtcaacatatggcaccgggagagtgcctcggcggggagggtggatgcgtgtgcttggagcctgggtcat

SEQ ID NO: 7872 - DNA, 1116 bp, Homo sapiens
tcggagctaaaggagaagtgagcgtggggacaccttgggctgggtctgcgaggatctgggatgaggaggtggtgggcctggtactgggcaggcgtggttggtgcccaggaagtgcgcgcctaacaccgggcttgctgtggaatgggtgctgggtatgtgtttgcccaagagcgatgggtgagcaaatgggtgcacggctgcctttttaccacgcaggttgttcagggaacgactgagtcagctgcggttgcggctggaggaagtgggggctgagagagcccctgaatacacggagccccttggggggctgcagcggagcctcaagattcgcattcaggtggcaggtctgtgggtggttctgtaccctcttcccctcccagaacccgtggcaccctgtccccttcctctctcgttcctgcccggccttgccctttgctctcagccctcctatgtgggcaccgggctccccagccaagcagggaccctcctccctttctctgcagggatctacaagggcttctgtctggatgtgatcaggaataagtacgaatgtgagctgcagggagccaaacagcacctggaggtgggcctgattgggcacactgggggtgaggcagggcacaaagcctgaagtggcctcaccccatccgtcctgctgagctattgccccctcttccagagtgagaagctgctgctctatgacacgctgcagggggagctgcaggagcggatccagaggctggaggaggaccgccagagcctggacctcagctctggtaagcgcgagagcctgggcaccccggaactgggccccgctcagtccacgcccacccctctttgggcttcagatgtcctgaagtcaaggggacagccagaggacctgcctgttggggtcagtgtgagggctgaaggagaccaggcctggaaagggcctggcacataatgggggctcaagcagagtgggtctccctgcctcttctgcccctgctctttccaaaacaggtatcagtgtgacatgcagtcacatgcaatagctctagtcccctccatgttcatagtacctgtgttcacgtggagtcctggggtggcaggaattgtcgtcatcccactctccac

SEQ ID NO: 7873 - DNA, 1245 bp, Homo sapiens
gcggggtggaggcccctgggcctgaggctgccagcagcgggcaggagctgctcttcatccacttggagtgctgtggggaagaaatcaccaccggtcattctaaccctcacccaggaatgggggtgactcgcacaagacctcatggaaagggtgatgactagggaaaagagggtgcagggcacggctgctccccaccaccaggtctgcatttgttcatcatcatcaggagcagaggtgaccagagggttcagagtgggaggcggggccagcccaggccaggagcgcctcatcttcccaggcctcagccacccagggtaaaaggtgccagggaagttgtgggcacctgagaggaggaacagatgtggaggacctgagggtgctcaaagggccaggctcagcctcaagcagtgttttcattgccaacacttactgtacccactccgcagagcccagctgggcctgggccccagggccacagctagcctgcatgtgtgtactgcactttacagtttgcaaagctcttccatacccactctctcaccgaagcctaattgaggctcttggaaggagtcaggcaaggattgtgcttcccccattatacaggtgacaaaactgagtcctggggaaagtgactggtccgtggtagagccgggacccaatcccctctctctcctccctgttggtgctgttcttcctgcccaacacctgtttctcttttcctcaaggggtttggggcaggagcctgggcacttactccccgtttttgctgtttctccttctgaccctgctcttgggtctaataaccccatttatttgtatgatgcgttcaccaagtctttatttccgaagtgctgttggctctattggcctcagtgaactgggtggggtcggaaagattgtacccccttgacaggtgggatgactgaggccctgagaggggtagggattggtgggcatctctgtgctgggtcctctggaccacatgatagctggggggtactgacctgcaaggaatcctgagctcctgggcagagcacctagttggatggacaactattgctctcccactccatgagcccctgggctctcaccagcatcctctgcctccccaggatagctcctccttggaaatctggccttagagaggcagtcagtgtgggcagggctttggcgaccccaccaattctacacacggatggaggaaaggcctgcttcaccacacacctatactaccctgcccgtccc

SEQ ID NO: 7874 - DNA, 1307 bp, Homo sapiens
gtgggtggcaggctgggcctagcacttgctgatagccactatgggctcgactctgtgctaagtggtatctggggacacagaggcaatcagacctggttccccccctggtggagttcacagtctagtggaggacagactgttaacaaatggcaacacggcttcatgcgtgccaggatcagagtacaaatcaggctgtggcaggcctcactggtaatggaaaagtgagggaggcttcacggaggaggtgtcataggagctcagcctcaacggctgctcggaaccctccgagtccacaagatgggaagcaagtccacaagatgggaagcgtgctctatacagaagggagggcctgtgcacaggctcaggtgtcagtaagccagaaatccagggacagagtcaggatggctggagcatggactgcggggggaacagagaagggggtggagcaaaaggttgggaccatgtgaccagggaagatgctggatggaggattctgaacctcatttgtggacggtcaggagtcaacaaagggaggagagaggactcactggtcaagagtgtcggctgtgacacaagggccatcatccctgaatgcccaccatgtgccccgcactgtgctgatgatgataataataactacgtccattgagcactctccagacaccgggctctgcttcttggaggttttgttatttaatcctcatagtaacccaagaagggaggtgttgccatttttgtctctgaggagatgagggcagatgcaccaagtcacacaactagaaagtggccaagccaggatttgaatccacagctgctcctctccatcacagtgttgctttccttcaacagaggtgggggtgaaccaagcagggttttggatactagattggtggacacccacctgcttcgtgcccagccctgcgcagggcccctgcagtgggcaaggccgggcctcttgcagcccatggtctgcagagggacctacccgtgcttgtgttggaagctggcccccacacctgtgctggccacctgtaccccaggccaggatgcagtgggctattagccaggctggaagtgttcagaggagtgagaaccaggggctctagaaggcccagggaggacctggagcctgagccaagtcttgaatggcagagcatctccagaggcagagaggagttgggagggcagcccaggtgaggggaacagcatggtgtggcagggaacatgcctggtgtggaggggggcagcaaaaaggaatggggggtagggaaggttgctggggcctggtgggccttgattgccatgga

SEQ ID NO: 7875 - DNA, 1828 bp, Homo sapiens
gagattcctgacccctgctgtgtgggctgttgtgaggagtaaaggtgaagacagtaagccctaacacacagtaagccctgacagcaaacaggtgttagtgttgagagacagcgtccacggaggttgtgtgctctgactccagtgtggggctcttaggctctgagcctcagtttcctcatctgtgaagtggggtgatagtggcactgtcctcggaagatggttgtgaggattcaaaggatgctgcatgaaagacgcatggcatgcagtgggagggtgagaatgacaccgtggcctcctctggcagtgccaggagcccgtggtgggcacagctgggctgtctggcctacccattggggcatctcccactggggtctggagacaccagatctgggtcctcacaggacttggggcaagtccctcggctgtctggtcctcagttttcctctctgtgtggtggggtaggcagctcaggttctcaggctcccaatggctctgaggaggcagccagcgtcacagggctcagggctgtgcaggcgtcagtgtgtggacagacctgctgctcccgccgcccgctcctgcgctcccgcttgccttcctgagccactttccggcctgtggattctggggctggaggcctggatccagttgggggcgcctttccctcacccaccgtgtgttctgcaggacgaaaaaggagcattcaactttgaccaggaaacagtgatcaacccagagacgggcgagcaggtgagggaggcctcagcagagccccagggtactgggagggtgggcacaggtggggcagtggccaccttaagcccgacagtggagctccttttccagattcagagctggtatcggagcggggagacctgggatagcaagttcagcaccatcgcctccagctacgaagagtgccgggctgagagcgtgggtctctacctctgtctccacccgcaagtgctggagtaagagcagcagggccgaggggcgggctgtcccgctgcagtggccagccctgggggcgtggagggtgggtggtagtggccagtgggatggggacagggcagcctctgaccatcctgccacctgcctgcccctctcacaggatctttggctttgagggggctgatgcggaggacgtgatctacgtgaactggctcaacatggttcgggccgggctgctcgctctggagttctacacacctgaggccttcaactggcgacaggtagggcctaggtggagccccctggaggcggaagggagcctgcagtgggtgccaagatcagggtgcaaggatgggaccactgtacctttaaggcagatgaactgggtttaatgctagactccactgtttgggaggcaagtcacatcactcttgtgagccccagagttcctctctgtgaaatgggagtaggactctccccggccaccatttcacggtgaatcagatgaggtgactttattaggactcctcgcagttgacgcactctctgccacacacaattctaaacgccctccatgaattaactaccccaggaggtaggtgctattgttaccctcattttagagatgaggaagtcgaggcacaaggagatgaagcaacttgccactaagtggcagagccaggattcgcatccatacagtgcctacagggccattcagtgccacggctcagttatgtgtcctttggatatggggtaagcaatagaaacttttttgtttgttcgtttttgtttttttgagacaaagtctcgctctgtcaccaggctggagtgcagtggccggatctcggctcactgcaacctccgcctcccgggttcaagc

SEQ ID NO: 7876 - DNA, 1475 bp, Homo sapiens
tacaggctcatgccaccacgcccagctaatttttttgtatgtttagtataaacagtgtttcatcatgttggccaagctggtctcaaactcctgacctcaggtgatcctcccacctcagcctaccaaggtgctaggattacaggcatgagccaccatgcccagcctaaatctttatttgattgactgaatgaacgaaagcagcaatgcatttaatactccccctgtagtatttccttcctcacagggttactgtaaagagtaaattaagtaattaacctaaaacgtagagcacaggtttttttggcagagctcagtaagaaacagctgctgctgtaattgtgattattaagatttttatgatgattcagtttccctattcagacctttccctgctgttttctctccatctcctccccaggctcagacgtgcagcttctggaatacgaggcgtcagctgctggcctcatccgatccttctctgagcgtttcccagaggatggacccgagttggaggagatcctcacacagctggccacagccgatgcccgattctggaagggccccagtgaggccccatctggccaagcttgaggaagatgtgtggccttgcccccaattccatcagaccaaggctgcaagtggccctccattcgtgtgtgtatttaggggctggggagggggaggggcaggagcttggaccttggtactacctcagctgagggtggtgacacaaccccttccatttgtcagcactttccagcctgccaattgcttcccctctgtgatctcatttcatctgcactgccatacgtggagtgagcaagacagggcttaccatcctgtctaccagatgaggaaatggcagttctgagaagtcactggtctagatcccgcaggtggcacgtgacagctagggttcaaaacgttctcaccaaatccaatgctcctcacatattaattttataaccagacaaataaatattagagacaaccaccatctttgcggcgtgtgtggctcctccttgcctttgcctgtcttctcatttactcccagcagagtgatgggctcaaggcctggggagggggcaaggagggccatttttagcctcccttccacaacaggatgttgacattatctctagatgaggatacgcagtcacagagctgaacatagcacaatttttgcagctctcctttgtggcattccttgcatttttaaatgttctggggccgggcacggtggctcatgcctgtaatcccagcactttgggaggccgaggcgaggggatcacgaggtcaggagttcgagaccggcttggccaatatggtgaaacctcgtctctactaaaaaataaagtagctgggcatggtggcatgcgcctgtaatcccagctactcgggaggctgaggcaggagaatccctggaacccgggaggcggaggttgcggtgagccgaaatcgcgctactgcgctcc

SEQ ID NO: 7877 - DNA, 1212 bp, Homo sapiens
agcaaatctgcttcctgctgtgggtaggatgcagatttcagcctaccataaaggacttcctacagccagggctaaggtctctggaggaagggaactcccttgttactggggctctgctagctgaggttggacagtccccaggaggggacactgggagccctcctggctttagtgctcatgggcatagtgcctggcctctatccctgcagggggaagtggagtttgctcgcatcatgaccatggtggaccccaacgcagctggggtggtgaccttccaggccttcatagacttcatgacccgagagacagccgagactgacacgactgagcaagttgtagcttccttcaagatcttggcaggagacaaggtgagtcccaggcggtggaggggctggtgggctagggcagggcacgggacctgtgggtcctcaacgcctcttctccccagaactacatcacccccgaggagctgcggcgcgagctccctgccaagcaggccgagtactgcatccgccgtatggtgccctacaagggatccggggccccggctggagccctggactacgtggccttctccagtgccctctatggggagagcgacctttgaccccaaccactgaggttctctatgcaagatggagagaggatgcaccctgtggctgatcccatccgtccctcggagcaagggcctaagagaaaagccagccaagtgcttctgaataaagatccctctctgggtctctccccatctccttttagttcctgaagcagaagctggcccctcaggctcctgggcaggaccagctatcccaccttgacccgccaggagtccctgccatctctcctcacccccggggactgagcatttataccacactcgggacaaggacacctctttattgctgttagaaaagggtggttacaagtttcctggacatggagagggacactatccctaaatccaagggaaccagaaaatttatagtatcaaacagaggaaagcgggggcagaacagagctgggcttaagatcagaaaattttcttcctgctcattacccaagcccagagttcttgccccagcttcaactgccaagataccacccttcaccccgacatcctcctaagctaccacaattcaacaaaggtgcaggtgcagaacttcagggtgggaatggggtgcagggaagcaggggctgtgccccagcccagtg

SEQ ID NO: 7878 - DNA, 1194 bp, Homo sapiens
ccccatctctcccagcctcagatgtgtcatttctagaatgaagacattcttcagaggggatggcctgtggcctggggtggacgaggaatgtgaaacctcgcgtagagggcttagttcatttctggctgtgaatggcaaatgggagcctgcccttctctactcacccccaccgttccccaggagggctggagacagaggatgactacagctaccagggtcacatgcagtcctgcaacttctcagcagagaaggccaaggtctacatcaatgactccgtggagctgagccagaacgagcagagtgagtgaggggcagggtgaggtgaggtcaggtggggccggggcctgggtgcctactgatgccaccccttcccatctcagagctggcagcctggctggccaagagaggcccaatctccgtggccatcaatgcctttggcatgcaggtgaggccctagccccactgcccctgccccatctcttgttgacctccccgacctcttcttggagtcgatcccctactccttctccacctccagttttaccgccacgggatctcccgccctctccggcccctctgcagcccttggctcattgaccatgcggtgttgcttgtgggctacggcaaccgtgagttccgctgcctgtcctgcatccagccaggccacaggcaggggtgggatcacagcatctcaggtcctctagaggggaaatagggggaatgcctaggaaccctgtccttacccactgcctgggccatgaccagctgggcatcatctgtcctctctatggcagggaagctgagctgtgggagggtaaatattgatggcctaataacctgcaataggcgggtgggtgcgtgcttcctccctgccccagggcttctccctgaggctggtaggtgggcccctcgctttctgctcttttcctagtccctgtcacacagtaggcccagtgcaagtatttgaagggtgcaaagtgattaaggctctgcctggagaattaaggaccctgatccttgcgctctgcactgcaccccaggctctgacgttcccttttgggccatcaagaacagctggggcactgactggggtgagaaggtgagtcttgctggcttggcccctggccctccagccgccatcctaccctggtgccctcaccagctccccctctcccccagggttactactacttg

SEQ ID NO: 7879 - DNA, 2116 bp, Homo sapiens
gccttggaggtagctggcaacagctgggtgctgttgtgtgtccaatttgggacccatcaggtagcatgccctgcccccctaattgctaaccctctgtctgctgctttatcagactacgcgtttgttcacatggagaaggaagcagatgccaaagccgcaatcgcgcagctcaacggcaaagaagtgaagggcaagcgcatcaacgtggaactctccaccaagggtcagaagaaggggcctggcctggctgtccagtctggggacaagaccaagaaaccaggggctggggatacggccttccctggaactggtggcttctctgccaccttcgactaccagcaggcttttggcaacagcactggtggctttgatgggcaagcccgtcagcccacaccacccttctttggtcgcgaccgcagccctctgcgccgttcacctccccgagcctcttatgtggctcctctgacggcccagccagctacctaccgggcccagccgtccgtgtcactgggagctgcctacagggcccagccttctgcctctttgggtgttggctatcggactcagcccatgacagcccaggcagcctcttaccgcgctcagccctctgtctcccttggggcaccatacaggggccagctggctagtcctagctcccagtctgctgcagcttcttcactcggcccatatggtggagcccagccctcagcctcggccctttcctcctatgggggtcaggcagctgcagcttcttcgctcaactcctatggggctcagggttcctcccttgcctcctatggtaaccagccatcctcttacggcgcccaggctgcctcttcctatggggttcgtgcagctgcttcttcctacaacacccagggagcagcttcctccttaggctcctacggggctcaggcagcctcctatggggcccagtctgcagcctcctcactagcttatggagcccaggcagcttcatataatgcccagccctcggcctcttacaatgcccagtctgccccatatgctgcacagcaggctgcttcctactcttcccaacctgctgcctatgtggcacagccagccacagctgctgcctatgccagccagccagcagcctacgccgcacaagccactaccccaatggctggctcctatggggcccagccggttgtgcagacccagctgaatagttacggggcccaagcatcaatgggcctttcaggctcctatggggctcagtcggctgctgcggccactggctcctatggtgccgcagcagcctacggggcccaaccttctgccaccctggcagctccttaccgcactcagtcatcagcctcattggctgcttcctatgctgcccagcagcatccccaggctgctgcctcctaccgcggccagccaggcaatgcctacgatggggcaggtcagccgtctgcagcctacctgtccatgtcccagggggccgttgccaacgccaacagcaccccgccgccctatgagcgtacccgcctctccccaccccgggccagctacgacgatccctacaaaaaggctgtcgccatgtcgaaaaggtactgtatgcccccccgcctctgcccccagctggggcttagggcaaggggctgaggttggcatgggagggaaactggaggcatcggcccctccctcggtcttctcttctctatttttgtgggatgtccagaggccgaggggagcagtgtctatgaactttcctggtcaccagggttcaggtggagcatagtgctcagcctggggtggtacctgctagtcaggccaggcacagtgtcacctgtctaggctagcccaagtgtcattggagctactgcctgcaggactgtggcccatatcctttcccactgtctcaaggatccttaagcctattacgtggttgtcctggctttggcagggatgtgggttaaagagtagtccctttggcattcactggctaaaggcaagtttacgaggtgcgtccactctgggaagttggggacctcgctttcatccgccgttctgttgataaacaaccaaggtctttctctgcagggcccaggggcggagatagtttgctgtggtgtgggaatgtagacca

SEQ ID NO: 7880 - DNA, 2555 bp, Homo sapiens
agggagggagaaaagaggtgggtagggttacagatccaggttataactactctggcccatacctttcctggttgtggtttttcatgccctctaccatgtgggccttccccaggagatgatcctgttaagtgttcggcagtaacctactttgttccttcgcctcagcagcaaatcttgctactggctctagatctgcggtttcccctctaccctgcctcccgtctccccagaatgggaatttcttttatgtttttatttttttcctggctcccttttatttttgtgcgcgatatttaaggtcgtctggatggggaagcaacctgcagctgaggtcgccggcgcctttttctttttagatgggaaggaggccaggaaagggtcagcttaaccatttcctatgtgccaagctgtgccagcagtccagggtaccctgactgtccctctgtagactgttgagactgagttcctgttgggacagtcagttggtatgtatccaagtccctgctgaccactaatgttctagctgatggtgagcggcacagtcccacttccccatctccccaagtaggtggtgttagaaaaccttaattttttttcccttttgtatggactacaaataaaacttggggcaatttgcagtttggaaacctggttgtcattgtcttgattgcattcagtgtcaaaggagccaatttgacatccaggaagacatgatagctaaagggaaggcagtcagagaacccaggactggtgaggaaaggggtttgaatgtcggaattagaaggattgccctgtggcccagaaggatttagctcatcgtcgtcctgctagcctgccatctttcagactttccagggcaggtggcctggtcctcagccctcaacttgagttagtcacaccaaaatgcagtaaatgatgcccattttcctctgcctgtgcttgaccattttcactgacttttctccagttcaggaataacctgtgttccaatgggatggttctggggtttggcctcttaggaagtggggaatgggctgctgtggtatttacaggctagtagatcctttaggcagtaggctggaatgagtgctggggctgggacccagaaaggaaccagtagtggagtgggggtaatggcgttgcctgatactgccctatggttggaataaggaagggcagagaaaacttgaagcaggtatggggcattctggccatagagctcgtattttgcctgttgagctgtaccatggagcatcctcctgtgtcctgccaacccctgccattatagtcaccggagactcctttacctatccctatctgttagggttttcagatgtcctctcgctgggtttatatttgaaggtatagaatctgggaaagggtggggtgcaagctaaccaaatagggatgctagggttgggtggggaattgaggactcttctgtgcttttattgtagggctggggatcgaggatctgggcaaaaaatatgacatttccaaccagggacaaaatggaggcttgggcttagtgatgggtaaatggaagactggttgagtgggatgataatgggagaacttactgatgctcttttgggaaaaggtgctttaaagactcgatttgggagcctactggggcaaggcgactggggaggtgtacgtgttagtcaagtggaggtcaggtgggttatcttctgcctccttcactggcttcatgtgaacttgcctgtgacagaatatcttgccctagatgtcctcttccctcttgccatcgtgcaaaagcattcgatcttatgaccgtgagttcttatttgtggatgctaactggggtaatctcagggagtactggggccatggctctttcccttgcttctctttctgctcactgctttgctttcaggtgcttagctgctcctttttatttctttgcaggactgggaaagcatgggaggaggattttgataagtttcttgttctctgcgtggtgatggggtggtctgagggccaagttaataagcctacctttggttattaccctggaaaattgagggttgatggtagggttatgattgtggcctgtgtatttgcaatttttctttgtcagtgtggctttctgtcatcttcctttttctccagtgagggttctgccactgtctcaatcccttggttcctgcaaaaaacagctaaatgtgctctcagggccagtggtgatgttctgtgttgcagccccagctcttgaaagtgacctggcccagatgagctctgcctgcttgtcatctttaggtcctgctgcccctgctgcctcagccctcaggctcctaactgctcaagccagaaggagctacaaagccaaatcatttgtcatttttctctggcagattgttttaaaatctccctcccctcttttattttaattatgccacctgtgttaatcctatagcctgcttctttgctttgtggattactgatttcaagttctataacttggggaaagttaggttgagtgaatgggaggacagacactgaatgtgtgttttggaaaaatggactctctatct

SEQ ID NO: 7881 - DNA, 1229 bp, Homo sapiens
ctccgggactctcaaggctacagtgtggactgctggcccaaggagaaggttggtttcctgaagtggtgggtggtgggttggggggggtcttcgttgtttttcttccctggcatgtgcctgcataagctatttccacagcgtcctggccgcgagggggggtggtgcttgggaggttagagggagacacctagagtgaacggcaaaatggagcgcggaatactgtctggctgtgcacgtggaggtggcgaaatgtggaagcttaacgaagttggcgccatgaagctaaagactgctaccccggggctctagctcgctccgcctaatggcgggccgcaccccgccggcgaagcccacgtttgtaggtccgccctcacgctgatctcttgcccaatcagcgagttcggcttcgcgaggttggtgcccattggctttcgcataaaagctccgaggttacagacgtttccacctcttgccggcctcttaggtaattggcgtccgtggtaaccaatcaggaagaggatctgagggaacgccggccttttactttcttgagtggccaatccggttgtaggctcacctcccccttctactcagagcactgctgcggccgccgccattttagcgttttgtcagaagcgtccgcgccgcgaggaggaggccctgctggtttctgtgcgggtgagactccgagcctttccactgcctttcttgtactgtgttaaatcttctctcactcccttgggcttcgggggtgtcctggtaggtccgcagtctccacacccgtcactgagagccgacctcggtcctcggcattgcgcggtaagccgggagcagcccttcccccaccgccccctgagaataccttgctttttttcgcccaccctgtcccgcgcccgacatggctgctcttggagcctcgagatttccactgggataaccccctttcccttatatctgacagttacattctcgtttcgggaatttctcgggccgtgagacatcgtctggttaatgaatctgaagctcttttccgcggccgcgcatttcagtgttcggcaggagctaggacggtgccccgagagaggcgttcaccactccagtatttcctttatctcccactcctcgctgtctgatccgagtcgcgcgttcattacttccaaaggaaactcaaatgtagctattacaaggcccattttcccggaaatgatggctgctttggttcctacgtg

SEQ ID NO: 7882 - DNA, 1578 bp, Homo sapiens
ttttttgaggagggtggagaactggcctttacttatattcctttgcttaatgaaaatccatcttgctagtaaggattggaggtgtcagaaaagacttgggcactgtttcttactttgacttcttttgactttgagccgctgtttggagatgatttttacctgtttggagatgattggagcaagagtagtttatttcttaagcatttaaactgttgttatagctgaaatatttcttcatctaagtggtcttttcctgaaatcaggtcattatactgaatctatatgttgagtcttttttttttttcctttttatcttttcctaaagatgagtcctgcattagaattgtctagataaagccattgctatgaccagtgtctggggtaggggctggggctatgactaagagtgatagcaacccttcttgcgtctgtttcttcaaggcaaacgaatgcacgtgcagttgtccaccagccggcttaggactgcgcccgggatgggagaccagagcggctgctatcggtgcgggaaagaggggcactggtccaaagagtgtccgatagatcgttcaggccgcgtggcagacttgaccgagcaatataatgagcaatacggagcagtgcgtacgccttacaccatgagctatggggattcattgtattacaacaacgcgtacggagcgctcgatgcctactacaagcgctgccgtgctgcccggtcctatgaggcagtggcagctgcagctgcctccgtgtataattacgcagagcagaccctgtcccagctgccacaagtccagaatacagccatggccagtcacctcacctccacctctctcgatccctacgatagacacctgttgccgacctcaggagctgctgccacagctgctgctgcagcagcagccgctgctgctgttactgcagcttccacttcatattacgggcgggatcggagccccctgcgtcgcgctacagccccagtccccactgttggagagggctacggttacgggcatgagagtgagttgtcccaagcttcagcagccgcgcggaattctctgtacgacatggcccggtatgagcgggagcagtatgccgatcgggcgcggtactcagccttttaaagcttgaggtgagaggggtggggtgttccctcttctggttttgccatccctcctgcagcctaaagggctccaattaggctgccctgcttgcttgcttgcttttgcagggttaggggaaggttactaggatggctcacaggctagagagaagtcctaactgcttaactttaaaatacatagagttccttggccctcatggctatttttcagggcttctggtagtgggagtcaatttgattctatttgtgcctagaaaaataaagaatgatgtgctggtgaatcttgggtcacctatgtactatactataattgaaccttacctggggacccacacgttcaggctcaggtgttttgtttcttagagcctttgttaagtttcctacgtgtgcgacattcctaaggtcttcaagtttcctattctgttttgtgctgtgtgaaagttctgatatgaccc

SEQ ID NO: 7883 - DNA, 1578 bp, Homo sapiens; identical to SEQ ID NO: 7882

SEQ ID NO: 7884 - DNA, 1415 bp, Homo sapiens
cttaaaacttgtgcagttgatgctacttctatctagactttgaatgatttttaactcggaccttggcagtaactcctagatagaaaatactgttaattttttttttttaaacctcagggagctaattggaacctttccatttttcctatcctctgctgacagcttgtgatgtggaattaccttctctgaggaatgctaatgttaacatcatcaagagcaaggaatgtctctttgcctacttttatgaaacaagatttgctattaatttaagaccttagtctgaggttgtttagcctccccagttactctctggccttcaagctcttttcattgttagagattactgtgatactgggggagaagggtacaagtaaacttaaaaggagtgtcaagttatcagactttgtaaagatgttgaagttttaaatgggaaagcccttttgagctttgctgtaaagccgctgtattgtgctctctttcaggtgggatgtgtgtgggctgaaattccgagctgcggttgtgcatgagaatacacccttcgtggtaccccatctccgggacgttctcggctctgtgcgttcagtccctcaggaaccgtggaccttaatttaccttgctaagttcagaccttctcttcctttcctttcctttcctctcctgcccattttcctgttcttctgtccttcaatacttctgtagcttcccattcatgttctcttctcccagcaggcctcattgtgtgcagaaactgtggtgggggctgtgctgtctcctccctgcctcctgcctcctgcggctgttggatttgggaatgaccttggtgagagtctcactgctccagggtctctttttggtccaaaggctagacctatagagttggatcactttttttctttccggtgaaataaatggtttttcaacttagggtatgtgtgctttgcgagacttcttgcttgggcttgtttgggggttcatttgtaccttgaaggggagggtataaagttttaagacactcagctttgggtgaacgtcactgtagttattttgtttattgtaagtaggacttgtaggtgccagaggaaggaggttatacagaagcccaggcaggcagccttattccaatgaagacttttcccactggtccacctttgttataaaaccaactacttttagtttacagatgtaggtcttctcttctagagaaacagtcaccaccttcccttaagactaccattccaatcacccagtcagtgtatctagcttaacttaatttccagggaaaaggaggggtttaggggaagaggaagtcagttttcgctcttcgtgccatgtgaaaaaatgaagctgtggctccaagagtactttgctaactaggccagtgacatgtgttgatgcctttcaccatctatttgttt

SEQ ID NO: 7885 - DNA, 1415 bp, Homo sapiens; identical to SEQ ID NO: 7884

SEQ ID NO: 7886 - DNA, 1329 bp, Homo sapiens
atagcatgaaacagtcagctcactttctgcctcctcctcttacacttccctgctgtccactgcggccaactcagcacagtgtccttgaagctgattgagggtctttccatccacaggcagagatgagctcgtggctacgggtggtgaatgcagccattgccacagcgtcttctgcctctggagagcctgaagagccggtggtgcccagcaccacccggggcatgacccgggccatgaccatgcccccagtgtcacccgtcggggctgaggggcctgttgtgctccgcagcaaagacggcagagaacgagagcgagaaaaacgcttcagcttctttaagaagaacaagtagttgggggcaaggtcccaggccaactccctccctccgttcaggaaactgccagggacagtcgacagggaccgccctcttgtcaggacaactgcctgctgctagggtctgttgccaaggtcaacccatcaccaggaactgtcactggggacgagtccatgttcccaagggcagcccttctcttctgctgtttaattccagactggtggtgggacccaggtaaccccctctcccacccccgccgacttctcccctttccccagcctcgtgcctctgtccctcaccacggtgtggacagtgccgcaccctcaacataggccatgtggggagtggctgcccctgcctcagggtcattctcctgccatgcgagggcactcgccttctgccttctggttcctcacccctcagaccagccaggaacctctcagagctgaagcaggccctgggggcagaagtgccagatgacagtcagaggcgcaggagccctccctccccacccccaccctgtaactccagctgccactccatctccagctgctctcaatggcttccaggtgtgttgttcggggacagccaccgccttgagtctggccaaggaggtgattaaacagctcagcttctctcaccgcctctgggtgtctttgctttcctgaccacagcctctctgcccaagcctgtgtcctctccttccgttctggtctccttcatctcacgtttccccagcctccaagctcttgaagagccgtgtcacactgagagcttccctgacctggtctcatttccctctgacagtgacctccagtgtgctgggttgaccaatgccaagcctctttttaaaccaaagtagttcaccatgggttgggatgatgtcaacaagcagtattcatgttaaaaagcaatgagggactccttccctggtgcacaattttcttcacttgtgatctctaaactgttttcaaattggaagactgggaagcattgc

SEQ ID NO: 7887 - DNA, 1112 bp, Homo sapiens
gcctgaatccccttttcaggctaagtagcacgttctagcaatctccaaggtctatcacatcctagacaggcctctgaaagttcaactggccaatggctcttttccagatcctcccccagttaagcccaggtgtctagatgagacccaacagggcagagtgtggccagcccctgccttcatctttcccagcacccccactccctggctcctccccctgcttctttggctgtgagacaggcaggaggtgagagtggcagccaggactgaggcaggctgcggctccttggagtcccccgctctgcctgactctgacccggggctccgcaggtccagcaggtgcaggacgacggccaccggctccagaaggcctacgctggagacaaggctgaggagatcggccgccacatgcaggccgtggccgaggcctgggcccagcttcagggaagctctgccgcccgccggcagctgctgctggacaccacagacaagttccgcttcttcaaggctgtccgggaactgatgctctggatggatgaggtcaacctgcagatggatgcccaggagcgtccccggtgagaatcccagggctcagggcctccacgggttgtgtggctgggctgtgatggggctgtgggcagcaggtgatgctgtttctgcctccccccagggatgtgtcctccgcggatctagtcatcaagaaccagcaaggcatcaaggcagagatagaggcccgggcagaccgcttctcctcctgcatcgacatggggaaggagctgctggccaggagccactatgcggccgaggaggtgggtgaggcctgggtggccgggccattctcactgtgcagtgctgaacgctgacttcttggtggctttctgcttcctctcattctctctttgcaagaaacctttcattctctcccctcagtgccattcacgggtttctcgcattctggaaatctctccccagaaccgtctgcctcttgacatcagaaatcactggtcctgggccaggcatggtggctcacgcctgtaatcccagcactttgggaggcccaggcgggcagatcacctgaggtcacgagttcgagaccagcctggcctccatgggtt

SEQ ID NO: 7888 - DNA, 1190 bp, Homo sapiens
atgtcccctctgccctgtgtcttcaggagatgcacttccaccccaaggccctaaaggacgtgaagggccagatcggggcgcccatgcctgggaaggtgatagacatcaaagtggtggcaggggccaaggtggccaagggccagcccctgtgtgtgctcagtgccatgaagatggagactgtggtgacctcacccatggagggtactgtccgcaaggttcatgtgaccaaggacatgacactggaaggtgacgacctcatcctggagatcgagtgatcttgccccagaccggcagcctggccatccccaagccttcaacagaagctgtgctgccacggcaggcccaggccagccagtgcccgaggccaggaaggccgggccgtggaggtcctgtccacagctggacaggagagacaccgcctgcggtggttcattcctttcagccatcgtcctttcctccggcggacagctgcttacatgttcatctcttgccaaataagggtcccctcctcactggagactacaagtggtgggtcaggtggtcctaggacccaggggaggtttaggggtcctatctcctgggggaaggggagatctaagatgtcccaggtcctgggaagtttactcaataaagctggctttcccctgccctccatgctggatcctgtgcagcccccagcctgcaccactcagcagtggggggctgcctttcaagctccccatgggtgggcaggtcagttgtgtcgttctcctcagagggtagtgagaatgaccatcgtggccctgttttaagtcactattgggtgcctactgtgtatactccccaaacaggactagtagtactgaacttgcttgaggggtggggcctgttctaagtatttaacacctattaacacagggaattaaccttcatcctcttatggacacagaaatcaagtcacaggaagattaaataatttgtccaggacttcacaagtagtaagagagagagatgaaacccaggccgttggcagactcgcctcccaaccccgctgctttattttctaaaacccaaggccagcgtcccacctcagttagcaggtaaatgcaagcaggtaccaccttgtgggcagtgggtaagaccctcgggaatggtgatccgggagtcttgtgtgtgctctggatgtgagaatgttggtgggaggtgagggg

SEQ ID NO: 7889 - DNA, 1139 bp, Homo sapiens
tacaggcgtgagccaccgcacccggcctggaatgctgttatttagattaactttcttcctttatctgagacaagggtttttgatccattcattcaaatgtgtttttgagattgctttaccaagctaattttaaatacagctctccctgtgaaaaaattatattttgtatcctggcttgaaatttctatgaagacagtttgtgcccactctgataaacagtgatagacaaatgaaatatttagtagaccctctttggtcctgtttttattgtgaatttatatctctaggctcaaagaattagcaagggtaaaattcatagaggacccagtggctcattgaaacttcattatattctgtggattctgagaatatcagctatcttgagagaaagaaaagatccataaggcaaggaaaatagcaactgagtttgaaagtagcactttgcacatgtagggaaatctatgaccacttgtaggtaggcatgaaaaagtgcatgatttcatcagtatgttcctttctttcctagcgtggtaccatgcgacgacgctatgaagatgatggcatttcagatgatgaaattgaaggaaaaagaacttttgacttggaagagaaactgcacaccaacaaatataatgccaattttgttacttttatggaaggaaaaggtcagtattgttttggttccagcttacagtcctttgatgtgggaagccatagactctgagcattgggggtttagcctttatccagctaaaatattgcctgttgatgttatctatctattttctcttgttatacaatgccatttgcatgcacttatcccccagtcctcccaccctgtgagtcattctctcctatattagaagtaatctttttattagggcaggagtattgttggatttttttgcctaacggcctcttcctccttcttctatcccttggtttaaatttaattaaaaatagtacaatagaaatccttttatgtatatatctaccccaccaaaactgagggtgggattccatgcgcaccgtgcatctttgatccttggcaaactgacaaggatgtcatatatgtattgtagtggtcaaaattaatgttttgtttacttttttttttggagacggagtcttgctgtgtc

SEQ ID NO: 7890 - DNA, 1197 bp, Homo sapiens
agtagctgggattacaggcacgtgccaccacacccggctaattttttttttttttatacttttagtagagacggggtttcgccatgttggccaggctggtctcgaactcctgacctgaggtgatctgcccaccttggcctcccaaagtgctgggattacaggtatgagccaccacacctggcccttttttttttttttttaactcttcagagacagggtgatgataatttctgtttagcatttataagatgactcactattagtagtcctatccccatattatttaagctctaaatttcctgtggaaatttagacttggaatatagacttggaaaacccctcaagcgttgcttctcaatgtgctctccatattttctaagagatgcttcttactaagcatatattttattgactaacagcataactatatacacagaataacaaacaccatttatactgtattacttaggatcctttttatggtccttttatcgtttttaattataccacttatctttctaatattttcctatggtgacagattttaatgtagagtatattcagcggggtggcttgagagatcctctgattttcaagaattctgatggactcggaataaagtaagtgttttcagcctggctggatgtagttgcaaaatggcctcgttacacccagggcaataaacagtggtggtattgataacccaaaacaatagtaattgaaaataatttcccactttgttttaaaagtatatgcttttcttttgatacacaagtgtttcatattagaggtaaatgagaaaatatagatgaaccaaaaaaaaaaaaacaacaaatttaaatctcctgaaatctaccacccttaggtagatcattaacattttattatgtattcttttttcctgtgcatatgtgtaaatatataatcacctatatttttaaaataatttcaaacctgattgtgaatattactgtgtctggggagtactcagtactttaagaaaaaaaactcacatttactagagcaattgtgttttccatatatacttactggtgtttgtttcatagaatgccggatccagacttcactgtgaatgatgtcaaaatgtgtgtgggtaagtgtcgagcttttggcctctgtctttaaggcaaagatttaagacttaggactgaattaaatctctgactgagatttaag

SEQ ID NO: 7891 - DNA, 1119 bp, Homo sapiens
cattcaaattatgagatagattaggtcaacctgcatcaaatcagtatagatcagtaagtaagagcttgactctagagtgagcctgccccggttcttttcctgctttgttctgtaagttacctaacatctgctttctcatgtatgaagtggagattagtatttagcatttagaattgttaggattaaatgagacattagataaaagagtcaacaactgactgtatagtaaacatgccttagggaataattattattaacattatccattgtctttcccattctttgtgatttgattatgattgttgagtgagaactttttccttgtgtattattgaaaataagaaaggacagtattttttcttctactttttaaaaaatattcttactatatttaaggatattagtggctcgatagagatgatcgatgcatcttttatggcagggagtcgtcgcatggtggatgtcatggacgtgaacacacagaaaggcattgaaatgaccatggctcagtggacacgctactatgagaccccagaggaggagcgagagaaactctataatgtcatcagcctcgagtttagccacaccaggctggagaatatggtgcagaggccctccacggttagtgtaatcattttcttcatattgtcattgtcaccaaaagggttgttttcggctggacgttggtaactgatgcttgttatcccagcactttgggaggccaagggaggcagatcgcttgagctgaggagtttgagagcagccggggcaacatggtgaaaccacatctctacaaaaagtacaaaaaaaaaaattagctgggtgtgatggcacatgtctgtagttccagctactcaagaggctgaggtgggaggatcacctgagcccaggaggttgaggctgcagtgaccggtgattgcaccactgcattccagcctgggtgacagaacaagaccctgtctcaaaaatttaaaataaaatgcgttgtttttatactgggaaattttataactttttgcacatatcaagattaagctgaaggtaaacaagactatttgacaagaataatttgtatttttataaagatatattgatattgtattttgataagaataactg

SEQ ID NO: 7892 - DNA, 1182 bp, Homo sapiens
tttaaaattatctttgaccccaacctttcccttggagcccaagtgtttcctccttctatttaaaggtggatttcattgactgggtagacaacatgtggccaaggcacttgaaggaaagccagactgaatcaacaaatgccatcttggagatgcagtaccctaaagtgcagaagtaagtgatgcgccctgcatcttcctccgtgtgctgtgggagaccaaagcaatagcaaggattggcttctcccttacgagctttgctctgtgtcttgaatgattaaaaagatgaattatttaaagatgagactttacagttccacaaggaagagtgtatgtgagcataccatagcacacaaccacacagttaaaggaaaaaaaacttacattttagtcaatacggtagaaaaaaaaaaaacctttttctgataatgtgatgacttgaaaatgcattgctttttctccttctggaacttaagattaagtggaagataaagggagtatataagaggagagtatggcattttggtggggcagatgtacttttttccatcagtacactaatgctgctgctttttttgggtcaggtactgtctaatgagtgttcgaggctgctatactgacttccatgtggactttggtggtacctctgtttggtatcacatccatcaagggggaaaggtatggtcatagttgtgataggggttggaatctgaagttggttgtatgactttgcttcagttcatgtatacttaatataccctggaaatgaatctgttagggaattgtccccattcgtatctggaaagaattatagattaagttcaccttcttggctagtgttcagtagaaattagtattcatctagttcactgtcattacaccattggcacagcacttagtaaatctcaatagtcctgtttctagattcctgaatcagagttctccaaatgaagccaaagaagtgattttagaaggacaagataatttctgtacttggaagtataataaatagtggaagggaacacgaattttggatagattcactgtgaaatcagcaaattaagatctaaaccaactttccctctatgtagccattggtctgaaatatggccaaaggaagcctttaagtcctttttgaggatgtaaacaggttttgaaggattatctttattcattcagttatat

SEQ ID NO: 7893 - DNA, 1236 bp, Homo sapiens
ttcaaagactaggtcctacccaaactttaaaaaatccaattgactattacctaggtgtcctcctaggtcaggatcctgtttctacctgttaactgtgattttgaacagtggacaaatgggttggaataaagatagaccatttttttaaatgtggtaattttgtcatttatagcctcaaggcccctatcatgccacctatttctcttgctgatcacatggcagagtgaaatgttcttactgcattttttcttcatattggtagatttggagttaaatgggttggagtctgggaatggggatgaggaagcagtggatcgagaaccccgacgcttgagcagcaggcgttctgtcctcactagccctgtagcgaatggagtcaacctggattatgatggactgggcaaaacctgccgaagtcttccaagtctgaagaaaactttggctggggactcatcttctgactgtagccggggctcccacaatggacaagtgtgggatccccagtgtgctccccgaaaggacaggcaagtgcatctgacccattttgagcttgaaggccttcgctgccttgtagataagttggagtctctgccactgcacaagaaatgtgtccccacagggatagaagatgaagatgctctcattgctgatgtaaaggtaagggtttgatgtgttacatgacagctactgatccagctatggcagtcagcttccagattcagagggagaaaatataggaattttgggtgatctctggttcagtcagagagaagttaatatgcatgtgtgtttgttattgctgctcagtgttttcattactagaatgaggttatgtccctgttttgaaaatactaacatttatgtgttcattgaagacttataaatttagtcttaaacataggtttcaggctgaccccaaaaataaagtgacccaaagaaaatatttatataagaaatgttacattaaacttaagttaccttgagataaaactcaggacaaaagtgactgataggagtctcatcctaagcagattgagagaaatgaaattgttctatgctgggttaacgttgagtagctttagcctctttagattcaaatttatctagcatcaagacttaaatacattgggaaaagcatcattttaaaataattcatcccattgctttatcaagttttatgtttatttattttttaattatactttaagttctagggtacatgtgcacaacgtgcag

SEQ ID NO: 7894 - DNA, 1258 bp, Homo sapiens
agacccagaggcccaagccctgctctgcctggagaaaggggaggaggttggggcggctttgtggaacccacaagctgcctggtgtgggcatccccattccctgctgggctctagatgacctgcaggaatcctgtcctccagatcaagaagtacgagaagctggagacggaggaggagcgtgtggcccgcagccgggagatcttcgactcatacatcatgaaggagctgctggcctgctcgcatgtgagtgtcctcagctggccctgtgtgctggcccagagtcacctgcagattgggaggggaagagaggaccctgctgagaattcatggccacctctgtcttccccagcccttctcgaagagtgccactgagcatgtccaaggccacctggggaagaagcaggtgcctccggatctcttccaggtgtgtgcctcccggtccctccccaggcaaggtcaccttggacagcccctggtcaacaagcctggtcagccaggggtggggcctgggcaaccacggtctctcggggctcagtcaccaacttccagcttcctcccttagccatacatcgaagagatttgtcaaaacctccgaggggacgtgttccagaaattcattgagaggtgagagcagggaagtgtgggagaggaagggggagggaggggccgctctcagaaggggtatggctggcgtggagggcagaagccagccttcattaggccctgagcaggcaggtggctggcccgtcagcggcccccttgcaaggactcctgagaagtcagacaggctgcaggtcatctcccaccctgccctcctcagcaccaggcagctcaaagcccatcccaggcagtctcctagctccagggagctaggagagctgtgccacctgtgcctctttctctcccgtgggctgtatagcaccttgctggcccacctggactgagaagcatcagagtcctggtaggggtaggcccagtagagcgcatggcccccgtgaccctcacagccagagttggcgcggtgggtgggaattgtaggtagatttcagccagctttagggagcagctgttttagggtcactgctgcccagccatggagtgagctctgtgtcactgggggtatgcaagcagggacaggagacgtacttgtcaaggatatggtagcaggaagtctgggttagactggaagacctcctttctgtgcggatctgattccagcaggaagccacggccaggtggccgagggccatgctgggca

SEQ ID NO: 7895 - DNA, 1197 bp, Homo sapiens
taagcccgggactcagggtggggctgagcccagatgactggcctctccccacagggctcaggaggtgaaagagagcccctttttccgctccctggactggcagatggtcttcttgcagaaggtaacagtctgcggcagggactgggggtgctctgcagccccacccccgagctaatgcccatgacccctgttctgctgcagtaccctcccccgctgatccccccacgaggggaggtgaacgcggccgacgccttcgacattggctccttcgatgaggaggacacaaaaggaatcaaggtactgggccttgcctggcctcttgtacctaggctgtgatcctggcctggggaaggatccctctcccttcttatcacctgtgagaccctgtgccagccctgccagcttgtaggcctcagttcctccttggccaacttccctggggggtggcagttgcactgaccatccctacccagggccctgggtctgggcagcctgtggctgatggtattccggcatctctgtccacccatgtgcccctgccccatccacctggtaaagttactggacagtgatcaggagctctaccgcaacttccccctcaccatctcggagcggtggcagcaggaggtggcagagactgtcttcgacaccatcaacgctgagacagaccggctggaggctcgcaagaaagccaagaacaagcagctgggccatgaggaaggtgagggtcgccggctgctgcggcaccaggcccctgcctgcttagaagtgagcagctggctcgggtttaaggaactcaccctggatcacagccagaaagtggcggctctgggattcaaactcaggctggggccgggcatggtggctcacgcctgtaatcccagcactttgggaggccaaggagcgcagatcacttgaggtcaggagtttgagaccagcctggccaacatggtgaaaccctgtctctaccaaaaaataccaaaaaaattagccgggcatggtggcacgcgcctgtactcccagctacccgggaggctgaggcgggaggatcgtttgaacctgggaggtggaggttgcagtgagccaagattgtgccacagccctccagcctgggcaacagagtggagaccctgtctcaaaacaaaaaagaaacccaggtggggccggctgagtctcctctgtctctcgcctcagact

SEQ ID NO: 7896 - DNA, 1183 bp, Homo sapiens
cgggaggggcccgcttgcctcggctcctgctgcaccaacccagccgctgcccggcgccctctgtcctgacttcaggggctgcccgctcccagtgtcttcctgtgggggaagagcacagccctcccgccccttccccgagggatgatgccacaccaagctgtgccaccctgggctctgtgggctgcactctgtgcccatgggcactgctgggtggcccatcccccctcaccaggggcaggcacagcacagggatccgacttgaattttcccactgcaccccctcctgctgcagaggggcaggccctgcactgtcctgctccacagtgttggcgagaggaggggcccgttgtctccctggccctcaaggcctcccacagtgactcgggctcctgtgcccttattcaggaaaagcctctgtgtcactggctgcctccactcccacttccctgacactgcggggcttggctgagagagtggcattggcagcaggtgctgctaccctccctgctgtcccctcttgccccaacccccagcacccgggctcagggaccacagcaaggcacctgcaggttgggccatactggcctcgcctggcctgaggtctcgctgatgctgggctgggtgcgaccccatctgcccaggacggggccggccaggtgggcgggcagcacagcaaggaggctggctggggcctatcagtgtgccccccatcctggcccatcagtgtacccccgcccaggctggccagccccacagcccacgtcctgtcagtgccgccgcctcgcccaccgcatgccccctcgtgccagtcgcgctgcctgtgtggtgtcgcgccttctcccccccggggctgggttggcgcaccctcccctcccgtctactcattccccggggcgtttctttgccgatttttgaatgtgattttaaagagtgaaaaatgagactatgcgtttttataaaaaatggtgcctgattcggctgtctcagactctttttgtacctggtgaccccttttcagcttctgctgggctggggcctgatggggagggtctcggtggtaccaggtctcctccaccgccatggcttccaaggtggtctgctcgggcccaggccatcttccaggtggggtgaggcagtgggtcccacttcccctcctacccctcccagctgacagtcctctcca

SEQ ID NO: 7897 - DNA, 1198 bp, Homo sapiens
agggaggggatggctggggaggaggagcactggccgcatccctcagcacccggcagctctccttaggtctcatctgggaagtcactccttccaggaagtgtcccccataccccactgtgctgggctgcactcacttccttgatgtgtgtcctacatggagtgggcttgtctcctttctcccgggagctctgtgctcctgagggcagggatgcctttgtgcctgtttgggaacttgaaaaagctgaggggaaggggatgacttctgcctgtctaggcgcccaggagaccagtggcgggaccaggagggtggtgggaaaggtggggttcattggccaaggcttcctggagggaggatgtccttgtttgaggaagtgaccttcccccggccccccaggcctgtccccggacctgcagtctatggagcagattcggcggatcatgcggcccacagatgtgcctgaccagggcctgctgtgtgacctgctgtggtctgaccctgacaaggacgtgcagggctggggcgagaacgaccgtggcgtctcttttacctttggagccgaggtggtggccaagttcctccacaagcacgacttggacctcatctgccgagcacaccaggtgggctggtggctccggcctgcggcaggggaaggggagggccgtgcctgcgctcgggactgactgctcccatcctcgcccaggtggtagaagacggctacgagttctttgccaagcggcagctggtgacacttttctcagctcccaactactgtggcgagtttgacaatgctggcgccatgatgagtgtggacgagaccctcatgtgctctttccaggtgagtgtggggaagaaaggagccgctaggccctgtggctcagccccatgagcctgaccaacactgtctcttttagatcctcaagcccgccgacaagaacaaggggaagtacgggcagttcagtggcctgaaccctggaggccgacccatcaccccaccccgcaattccgccaaagccaagaaatagcccccgcacaccaccctgtgccccagatgatggattgattgtacagaaatcatgctgccatgctgggggggggtcaccccgacccctcaggcccacctgtcacggggaacatggagccttggtgtatttttcttttctttttttaatgaatcaatagcagcgtccagtcccccag

SEQ ID NO: 7898 - DNA, 1232 bp, Homo sapiens
tggctccattgaccaaaccttgaaagccctgagggtatccataggtgggagccacacccaaaagcattctctcccatgtcacctgacccctactccagctagccctgggacccggggacacatgagcagtacttgcccaggccctcaccctctctcctggtcccgcagtttctgaaacggaatcccagccagcggattgggggtggcccaggggatgctgctgatgtgcaggtgggtttgggaccaccaccaggggtagggctgagtctccaagggtgccgggaatgggggcagggccccagggcagagggagtgaccggggggcaagcagggtgagctgttagtgggtttggtgcattctctacctacagagacatccctttttccggcacatgaattgggacgaccttctggcctggcgtgtggacccccctttcaggccctgtctggtgagcagcagggctggtggccagtggccggtggcgggtggcaagtggagaacctgcatcttggtgccctctgacccctccccactctggtcggcccacagcagtcagaggaggacgtgagccagtttgatacccgcttcacacggcagacgccggtggacagtcctgatgacacagccctcagcgagagtgccaaccaggccttcctggtgagtgcgggggcctgaggcctgtgggaccagggcacggatcgtgactaaggatggcaggcactgagtgtcgcatggccctgcctccgccccccagggcttcacatacgtggcgccgtctgtcctggacagcatcaaggagggcttctccttccagcccaagctgcgctcacccaggcgcctcaacagtagcccccgggcccccgtcaggtactgagggacgtgggggtgtgtggctgggttagggacgctggcaggcaggatgccagctccagccttgggtgccttggccacgtctgtcggccagtgttggcttcggttgctgtgtctatcatggggacctcagttcctacaccccttgtggccaggctgcctggatgggagtttgtggagcccgcggcctgtgtgcctgggcaggtgggaaaggctgccttccctgactgagtgctgggagcctctggcagggcctaggaggctcttattctgccttggtttcccctgcagccccctcaagttctccccttttgaggggtttcggcccagccccagcctgccggagcccacggagctacct

SEQ ID NO: 7899 - DNA, 1273 bp, Homo sapiens
ggaaggccgaggagagctcccggactttcaagatgggaccaaggttcgtgtctaccctacccttctccccctctgcggcgtggtgcgcatgcgaggcgggaggaggccttaggcgagaggttgcgcatgcccagagggcagcgtccactgcccctaccgctcacatgcagaactcgacgctgattgggctgaatttaagtagggggtgaattcgggcctgtctgccccgccccctggctcggccttgtagcagcattggtgggggaggccgtcagtcatcacaagcgggttggggttgggggttgatctcagtgcttgggcagaccccacgctggaggaaacccagggccgggagtggtcctcgggtatctgggtttcaaggctcatgatcctttgtagatggaagggccttctgaaaacacttagaccaactgccgctgtttagagtggaaaaccaagaccctgggacgtgcaaagccggagaacgggcccagaggtcaggtctcccagacagggactctttagcagccttcctgctgcactaggggcttgttgggacagatgagggttgggaagtaaagaacctcccacttttctcctttttgccaggcccccagatccagcccctctgcccgcttctcccccaacctacaactccaggcttccctgcttctcctgtagttgcctcctcccggagtgcttttcccagctgccacttgtttgcagagtagggaacctcccaggggcagcccctgtgcccagcagagcagtcaggcaggacatgcacattgagcaaatgagcacatgccccctggccagcaccgtgccgaatcgggcagctaagcatcctagcccagtgcagtataagtgccctgagagcagaggggagctgcatggctggagtgatccgctgtatgaaaagatatcttctctaagaagagacaggatgtgtggtgtgggttcatgcccccatgtgctggggggttggtggcgttggaagaaggggctggcaagggggatcctggatggaacagacatcagaaggagagatgtgaacaatggcaccccaagatcagaaacaggtggtgttaaataaccaatcgccagcactgattgagtgctcactattcgaacattgtgctacatgcttcacacgtttatttcctacaatgtgagataggtactgttgttgattccgttttaccgatgtggaaactgacttcagagatgcagcatggtgcggcagttaagagcgtgggctcctctaaccata

SEQ ID NO: 7900 - DNA, 1174 bp, Homo sapiens
gctcatcgagtccattgagggcaagcagggcaagccccgcctgaagccccccttccccgcagacgtgggtaaggcctggcgtaaccctgggtcagactgtgtcctgtgacacccgggatctggctaggctccctttggattgttcttagggatttctgagtggcttcccggctggggccagatagagagtaggctggcaacaacacacaggctcccccagggccgcctgctgtccctcctcctgcctcggtcccctccgcaccagtgctgctctgtggctccaccttcacagtgcctgttctgaggctaagggcatggggtgaacaaggcaatgggcatctctggagtttggggtccagcagggataagaatgataaggggatattagagcaggggctctgccatgggtgcaggaccctgggacacacctccctgccaggaaacttgccccaccccctagcagccaccagttctcttcccatttccctgaaggagtgtttggctgccccacaactgtggccaacgtggagacagtggcagtgtcccccacaatctgccgccgtggaggtacctggtttgctggctttggcagagaacgcaactcaggcaccaaactattcaacatctctggccatgtcaaccacccttgcactgtggaggaggagatgtctgtgcccttgaaagaactgattgagaagcatgctggtaaggcctggggccagccaggtggtgggggggtgcgcagtgggggcaggtgtccacaaagagagcctgggcgggagggctcaggagacggggctgggtctaggggctgactaagggcctgggctcaggactaggcaggtgtgccggccccagccctgaccatgcatccctttggggaccgacttggggccccagggggtgtcacgggcggctgggacaacctccttgctgtgatccctggcggctcgtctaccccactgatccccaagtctgtgtgtgagacggtgctgatggacttcgatgcgctggtgcaggcacagacaggcctgggcacagctgcggtgatcgtcatggaccgctcggtaagggttcacacaccagccctggtccctgccctcctggttgctgtctccctccctgggcctcccagaaaaccctcttgccagcactcaggtctcagttcctgcag

SEQ ID NO: 7901 - DNA, 1228 bp, Homo sapiens
ttattgtcttccccttctggccaagatttgccagaggcaagatcaatggccaccaaaacttttattttattccctggcattgccagggcagcaaggctgcctgccccaggtccatcctgtcccttggtgggactacatatggccaagagacatagagtcaaagatttatagccaatttaaatgttctaggaaagatggatgtgaacaggcattcattaactttttttgttttggtttggttttttgagacgaggtctcactctgccacccaggctggagtgcagtggcatgatctcggctcactgcaacttctgcctcccgggctcaagaaatcctcccacttcagcctcccaagtacctgggaccataggtgtgcaccaccgtgcctggaaaatttttgtgtacaaacaaaaagccactttctggtctcggccgcagaagcgagatgacgaagggagcatcatcgtttggaaagcatcgcaataagacacacacgttgtgccgctgctgtggctctgaggcctaccaccttcagaagtcgacctgtggcaaatgtggctactctgccaagcgcaagagaaagtataactggagtgccaaggctaaaagatgaaaaaccaccagaactggtcgaatgaggcacctaaaaattgtataacacagattcaggcatggattccgtgaaggaacaacacctaaacccaagagggcagctgttgcagcatccagttcatcttaagaatgtcaacaattagtcatgcaataaatgttctggttttaaaaaataaaaaaataaaataaaataaaataaaagccaaaggtgaggttataaaattgactttatgtaaggagaccccttgaaactattgctacagaataaaagatgaaatgctcctgattattgtaaacacaaagttgcatgcaggattgtgtaaagacaatgccaggttggactgccagaatgagccaacagcgcgtgatgtgcttcccccggcagagagcctatgaatggatatgcagtcagggaggtttcacatcaccaagattcctatcccagaaaagcagatgttcatagctctgggaatggaatgcgacccttgtagagagcctataaatggacacatgaggggcccctgtccatatggataagatagggctaaaaatgccctcatcttgccatggctcttctaggcctctttagggttaaggcacactcccttctgagaat

SEQ ID NO: 7902 - DNA, 1230 bp, Homo sapiens
tagaccagtggctgccctctctgggcctcactcccagctgagacctacaggctcagcccctgcccagccctgcctggcacccgctcaatctggctgagctccagagaatggcagggctgggctgtcacatgctgagccacgtgactggcagtggctgggggctccatcccacacagaggacaggggctctgcagtccttcacccccaccctaactatctaatcacgggccaccggtgtgggcatggtccagaagacctcaccgccctcccaggtaggcagggagctggcgggtggggggggccatgatgagcacctcccaggtgccacgttggcccagaggccccggggccgggagctacggaggcccagggcaccagggagatggtagcagcggcaggcccaggaaggggcatagaggaggctcttcctccacacctgtcaccctgtcccctgcctgtccacacccacagcagcttgcacatcatccccacagcacgctggctctgacaggtgtatccggggcgggctgggggcaggcagggacaggcttaggcacagctgcctgtgccgaacttgaggaagatcgggactacaggaaccaccaaggcgacacgtggcatcatgaccacggtcctaagcagagaggcaggcactcctcctgggaggcagaggggacatccgaaacgggtgcagccccagctctggagcaagaagctctgccacacacacgccccatgttcacatcccaccccctctctgcccccacttcctcgtttgtaaaatgttagatctgcagaaagacaggctctatgaatggggcggcccatggggtggtgtggaggaacacggaagcacagggcgctgggagaggagcaggcatgaggtatggtccctaagatggtatttctagactccagccacctttgggtctgacctctttgttttgcagaaggggaaactgagtcttgggtagggtgtagcaagacaagccacagacaaaacacctcagacactggattaaagaaggaagaggtttattcagctgggagcatcagcagacttgcgtcaagagccgagctccctgaaaaagacattcttggcctttttaaaggcttacaactttaaggggtccacgtgaaagggtcgtgataaatcgagcaagctcggggaacgtgaccgggggctgcatgcgtcagctaacagaacagaaagttttgcagtgctttctc

SEQ ID NO: 7903 - DNA, 1158 bp, Homo sapiens
ttaattttataatatagatacttaatttcctttgtgagttctagtcttcggtttccagtggtgattaaggcctcagcagctcatcacatctgttaacctgtagccaagtaccctcagcagttaagcttattataagaaagtgtgttctatttgtttaacctgtgctattttctctttcagacggggcactggtgcttttaaatccagagtgggactgcctgcgcctgctcctgttatcaatagcaaatatggactcagagaaacagataaacgtttaaataggcttaaaaagttaggtgacagcagcaaaaattcagacagtcaatctgtcagctctaacactgatgcagataccactcaggaaaaaaacaatgcaagtaagtaagggagatttgataagcatatcttttaaaagtattttcacacaatttgctttataaagtgtgcttcagtagttttaaacttttaaatactcagagagactgggacttgtgagctttggctgcacttcaaggctctagacgtgatttgagtagaggcacagtctgtatcccatctctaacttcagtaccgtcctctagactatttttcttgaataccttggtaactggatatgagttcttcatcatatgttccaaggtcatcatatgttttaaacattttcaaggtgttagagactgtgatgatgtcgctaagtcctgcaagaagacaaaaggactgagtagaattaaattagactctatacattccagtgcctagccagtttgttagaaaagatgatggacttggggaattcatagcttctggccttaaggcttccaccttttcattgcttgctgacctttttcaaaacgaactgactcagttcagcagaccaccagtaccagactcagaattgtgatagaggagcattttgaacagtgccgtattgtgacatgctgtattggctactccagaaagtaggagtaaagatggaaaggagaaagaagcaacctctgagattccagtggtgtgtgggggcaagatctgatggaaactgaaaaagagaacgaagactaaacaaagagaaaggaaagagaagaaaccctaaatgggcaaaggaaagcacatcctgtttgcggagctttgaaatattggaaccatttctaattgctcctg

SEQ ID NO: 7904 - DNA, 1126 bp, Homo sapiens
ctcacagttcctgagggctgaagcccgagatcgaggtgtgggcagggccctgcgccctctgaaggctctgagggaacctttgggcttctggtggctccaggcaccccttgacttgtggtcctgtcactccagtctctctgtctggctgcacatggcgtggcctcttctgtaccattgaaggacacttcagttggatttagggcctaccctcacccattgtggtcgtatcttgatccttcatgacatttgtaaagaccctgcttccaaataagctcacattctgaggttctggggtgagcgggaatttggagagcattgttcaactagtatagaatgtgacctgtcagcctcgggcagccctgagaggcaggggctttccacagcccagctgggtgccctgggctccgtgctgtccgaggagacgccatccccacacccgtccttcacccgccaccctcccgcaggtacctgtacttcaccaacatgcaggaccgggcagccaagatcgaacgcgcagccctggacggcaccgagcgcgaggtcctcttcaccaccggcctcatccgccctgtggccctggtggtggacaacacactgggcaagctgttctgggtggacgcggacctgaagcgcattgagagctgtgacctgtcaggtacgcgccccggggcctgccctaaccgcagacacccggccttcattgtcagtaatggcagcagctgccacattgtccgagacctgccgtgagcccagtgccgcgccaggggctttgtgtgtagcgtgttttgtcctcacactgacagctgtaggctggggttctgagtgagccccacagggcagaggcagaaaatgagtctcagagagggtgagcgagctgcttggggccccacagcaggagatggagcaggactgcagcctagcctctgcccccagcacctgcgcaagaagctgctctgctctggactgtgttaggctgcgagggctggagagaaatgagagttggtgcttagagagggggcgcaggtccccatggcttttcctcttatgatgaggtagatgggtgaagggaggggccatgcttgcaggggccagtgaccgaggcccgccgttggaactgatggccttc

SEQ ID NO: 7905 - DNA, 2709 bp, Homo sapiens
atgcctgtctgttgctccttaggactggccaaccaagcgcaccaggtgacacttcagtgaatggccctgtatgacgggtgacgtctgctgctgctgactgaggactgcagaccgccaccactcaggggctctggaggggtcagctggagcccaccaagctgtcactgctgcactcactctgcaagggatcaggaccagcaacctttatattctagattctaagacattgtacagagaaattcagaagtgtaaaaatattgcacattgacaaataccaagaatttttgcgtatgtttatattgtattgttctaaataatgggtagcctgtgaaataagatcttgccacccatgtaataatagtagtaatactatagttaaaatggctgtaagaatagttttataaaagtgaatacacagatctattgtatttgaaacataactttgacaattattagtgtgaccaaagtattaggcggttttcatacatttttcaccttgtacaaaattatgaattcatttttcctccaggccgacaaggagttgtagaatgaaaatgccctctaagtgttattttggttgttctaacttacaaaagtgattttgaataagaaatatttggtgttctttttataaccagtttttgattggtaattgttttctgtattgtttaaaacggatcaaaaatgtaagtctattggtagagattaagtaaagtatttattgctacatcatagttgataaattgatgttatcgtaaagccatatgttctgttcaagtcttgtttgcttgaaatgattattcctacaagtgaaacactagactatttggagtgtatatggcttgtgttttgggattttttttttttttttttggcttttgtttttgtttgtttttttgtttcatttggtagttcatctgccttttaacccattcaccaaaatttaccttgttaacaagcatcaccaatgaacatttcagagcaatctgcatatttaacagacctaaaataaatcctattaggcaagtcagttgaaaatgctcgtgctgctaatggaattagagtgcgttcattttacaggctagtattttaaaagtagaaatcaaaatctggcaccgaagcatgctaattgtttactgtaccttgtgaggttttcactcataaatttaaaccagtgtatttttttagaactggtttgtgtatatatatagtgattatggatactaattcaatgtaatttataattttctatgtcaatacaaaaatacatcacagccttctcaaacagctcaagcaatatattgtatattgccatatcgtctggtgaaagggttaaattacttcacctcttgcacttttagatgcaaatcagtttttcatttctgtaatagaaaattattcacgtatttttacatcatttgtttttcctgaccagtatttaaaaccaaaaggatattctgaaaaatggccaacaatttttttagaagtagcatcccaagcagcgtgcctaaacattacattgcatatggaaataaaagaatcaaacgtctaatgccttattatttctgatttcctttttcattttaagtggtgtggagattccagcactcccaggacagtggagtcagcagtaagccctgggacaggtggcaagggtgggtcccttgacctttgcacgcctcctcaggaaccccctttcccgggtgagcccctctctgaagagactgtccttgggcctcctctggaagcagcacccccagaggacagggctcctcctgcttgcctcagggctgcctgacttgaatggcgttggacctcggggattactggtagataatatgctctggtctcgcctggtggtgagttttgccagccatggccagggtttggctccactggtggcacacgtggcctccgtggtatggacctggtggcttctccatcccactgtggcctctgtggtatggacctggtggcttctccatcctacccaaggtaacagtgtcttgcttcatcccactgactgctgggagagagcctctgggacttttctttggggcatcattttgttttgtctttcgtagcagggaaaggatatgacaatggggaggacagttcttttggaggttggaggggccaagccaaggacaggagcaagtgtgccctcattttgtttctacttttaatttctgtgtgttggccatactgaattatgagactaacagatgtctacaatacaatacctgtattcaaaataacaaaaataaagcctgattctttgtttctagaaatctcttgtaccttgcttggatttttaatgggttgatgtgtcctgccattaggtcccgtgttacactaggtcctgtgtgagaaagactgcactgcactgtgtgagagagtggcctctgggatcaggggctcatcctccccactgccatagcccaggtgcccagaagaggtggtgcctgacaccggctctcagtcttgggacggctccaagggttcctctggacctccagcttgttacttttatgtgcagcgtgtcccacctatgttgtttggctcccagcccaacaagtcacagttaggtgctccataatgattcttaagatgtgatgcttatgtagctccttattttgcattttcccttcacctgtttgcttaaaaacatgttctctagtcattacctcctagcaggtcctctgcaca

SEQ ID NO: 7906 - DNA, 1178 bp, Homo sapiens
taagttaagctttaagacgttggtcagatcttagagaactggcagaaaggaatttcaatgaaacattgggtcagattgcaaatgaaaaagcttgaaatgtggggatggccacgttttaataggtttttggtttttgtttttacatgaaaggattctcatcgctttggaaggcacctgaaagaagcaatgactgacatcatcactttgtttggtctcagttctaattccaaaaagtaattccactggagctgctgggaaggaaaacgagctcttctgatgcaaaccaaatgaaaaataggcattaatcctgaccttagctcgggatgaaacactgctcttaaaaaaactcagttttccttccagaaaatgtgggtgtttttttttcctagaacagtatctctcccctgtgaagcataaccccactacttccagacttgccctcccttgggggacatctgataaagtctcccctgatgtctccgcatcggcttggatttattaagggatgcaaatcttgttgagttaatgaaggaattagtagggttgtggcttcacacacagtggaatggaaatggtgtgctttctcagtggcaaccgaaggcctagtgcttaagggcatttagcatcatccaagcagggtaaacttttgttttgttaaaagaaaaatgtgttattcaagttggtgtccccagttgtagctaacacatctggaatgcactaaccaaaatgctgtgctttggagacctgcttttgtcaccgtgggtaaccgttcccgtctggtccagtagcctgtgtttgcctctccacatttgaagcaagcaggatgcaaggtcttcagttttactgaccttgtatgtcttcaagtcttcacaacccagtgccttaaaaatgaaaggccctaaatgtaagggagatggagagaaagatttattttgtagagtctttgggtggaattgtgggtatactgttcccttcacaattgactgagtatggataaccgtacataagcatttgctacaccccaccagccccctccccctcagaaacaccagttccttcccaagggcagctgtgccagactcccctcccgggactgccttcttgtcatcataagcaacaaaagaaataacaggcacatgtcataaaaggggagcaagggccgtgatggtcagataatt

SEQ ID NO: 7907 - DNA, 1342 bp, Homo sapiens
ctgccccctgcatagccacatcgtgactctcaggatggtggccagtgactctgggtttacacctcctggaggtcgttggtgtgtttggggcttctgaggaattccatgggggtgggggagccccgggaaggctgagtgaacgagatagttcagctctgagcttgaagagctcagactggccccagctgatggtcctgggttttaatcccagcaccgcctcctgctggcttagctacctcggcagcttgttgcacgtttctaggcctcagttgggttgtttctgagatggaaatagtaacgcgctctgcatcatggtgtgtgtgggccggctgcccgagagctgtcctggccacgcagcagtggtgtttgtatcgagtgctcttgctttgctcatcgtggttcacagggtgggtctctgtcctccgcaggtggtccaagatctattttgtattgtggtggctggtgtcgtctgtcatctgggtcaacctgtttctggccctgattctggaggtatcagagatccccacccaggctgttctccatggtcgtttgtttctaattcactctcgatgggcctgaggccaccggccgggcctgcctggaactttgatgggagagtcgtgctgggttaggcgggtcctgagtgaggctgagcccctcccgtggggctcagtgctgcccgccctggctgctggggccttggggagtgctcctgacatctgggctgctggggccttggggggtgctcctgacatctgggctgctggggccttggggggtgctcctgacatctgggctgtggggattctcaggcccccaggtcgggctgaaggagggacttggacattggctccaggaggagccagcagcctcgtggggcctgtgcctgggtgtccagggtgaatggctcagccccctcagcgggtgccctgtggctgaccctggaggggccggggatggggcaaggctgctttcattcggggcccacactcactggccactcctcctgcttgccagaacttccttcacaagtgggacccccgcagccacctgcagccccttgctgggaccccagaggccacctaccagatgactgtggagctcctgttcaggtgtgtgggtggggaaggcgcttctgtctggccccctgggatgggaagccaagagctggggggtggaggggttgaggcggcgggcaggccctgatgactgtcctccccctccgcccggttatctggctttggtcctgtgctctaggagagcagctcagagccgggatcggggcggcttcttcttcctgccactggcgtcatagcctttgtcctgctctcctgctcttgga

SEQ ID NO: 7908 - DNA, 1197 bp, Homo sapiens
ccccggcctgggtaaagggtcgcccgagggtcattttcagggtttttttatgcacttagttatttttttaatatttttaaatattttttgaaaagatgacgtctggggaaatgcggcgcggcggcctgggacgccacctttgtgtctcgcaggcgcggcgcccaaccccgcggcccgttccgcggccccgcaccccagttggtgtcgacccccagtcagagggaccacggagctccagggcgggccagggtcccgggggccggcagcccgcgccgccgcgcacgccgcccagctgtgcccgctcccgcccccaccgtgccagcctcgcggggactttccctttcagtttcggggagggtgggtactggggacgcgcgggggagggggcgcatcacgggaagctcctgccgcccccagccccgacccctcggcgccctccagacctggcggccctgccaagcgcgatggggggtgcgggggcgtgcgggggggcggcgcgacctggcggcggcggtcacgggccccgtgcctccgtaggtctgcgaggaacagaagtgcgaggaggaggtcttcccgctggccatgaactacctggaccgcttcctgtcgctggagcccgtgaaaaagagccgcctgcagctgctgggggccacttgcatgttcgtggcctctaagatgaaggagaccatccccctgacggccgagaagctgtgcatctacaccgacaactccatccggcccgaggagctgctggtaaccactggaccccgccgccccccgccccccgcgagccgcacgcaggaccacggggccggggaaggtgcaggcggtggcggccggcccgcctctgacatatctgctcctccgagggagggcggccccgccgccgggcgtccctgtccggggagcgggcgggatcctagccgccctcgtcccgccgccctgtgtgcgcttgcctgcgactcccaccgcgttcgcgccccgcggtgtggccgaaaagtgggcggcgcgcgccctccagcggctgcacgaggagcgccgcgctcggcgctgagcctccagttccaggtggtgggaggtctttttgtttccacttgcagagtcttttcacgcggcgggcgccttttctgttttgatctgggattgcgtgttgccccagctcccttgagtccccagcattcgccagccctcccctcc

SEQ ID NO: 7909 - DNA, 1753 bp, Homo sapiens
gtgaggaggaggctcccgaggggaaggggcggtgcccacaccggggacaggccgcagctccattttcttattgcgctgctaccgttgacttccaggcacggtttggaaatattcacatcgcttctgtgtatctctttcacattgtttgctgctattggaggatcagttttttgttttacaatgtcatatactgccatgtactagttttagttttctcttagaacattgtattacagatgccttttttgtagttttttttttttttatgtgatcaattttgacttaatgtgattactgctctattccaaaaaggttgctgtttcacaatacctcatgcttcacttagccatggtggacccagcgggcaggttctgcctgctttggcgggcagacacgcgggcgcgatcccacacaggctggcgggggccggccccgaggccgcgtgcgtgagaaccgcgccggtgtccccagagaccaggctgtgtccctcttctcttccctgcgcctgtgatgctgggcacttcatctgatcgggggcgtagcatcatagtagtttttacagctgtgttattctttgcgtgtagctatggaagttgcataattattattattattattataacaagtgtgtcttacgtgccaccacggcgttgtacctgtaggactctcattcgggatgattggaatagcttctggaatttgttcaagttttgggtatgtttaatctgttatgtactagtgttctgtttgttattgttttgttaattacaccataatgctaatttaaagagactccaaatctcaatgaagccagctcacagtgctgtgtgccccggtcacctagcaagctgccgaaccaaaagaatttgcaccccgctgcgggcccacgtggttggggccctgccctggcagggtcatcctgtgctcggaggccatctcgggcacaggcccaccccgccccacccctccagaacacggctcacgcttacctcaaccatcctggctgcggcgtctgtctgaaccacgcgggggccttgagggacgctttgtctgtcgtgatggggcaagggcacaagtcctggatgttgtgtgtatcgagaggccaaaggctggtggcaagtgcacggggcacagcggagtctgtcctgtgacgcgcaagtctgagggtctgggcggcgggcggctgggtctgtgcatttctggttgcaccgcggcgcttcccagcaccaacatgtaaccggcatgtttccagcagaagacaaaaagacaaacatgaaagtctagaaataaaactggtaaaaccccagcgtggtgcctgcctctttgcttcctgggctggccgtgagccagggacgcgtgtcctggtgccctagaaccagggcagggtggcaggcttggcggatgtgggaggccgcagcctgtcctgtgcgctgtgggaagttcagcagcatcctgacctccatccccgggatgacagtcacgccacccgccgtgacaaccaagaatgtctcctgacactgccacatccccgggggtggggacagaatccagccaggagcaggcacacccctcccaactgggaggaagccctcagcacaggtgtgtgaggtgggaggcggtgtcctgtccccgggaggctccagagaataatttgcaggctgcctggctgggtgagcccacctccaaccacgcgagacaacagctccggcctgggtgacgtgagcggtgcccattgatggggaacatcttcccc

SEQ ID NO: 7910 - DNA, 2765 bp, Homo sapiens
ggtcacccacttcctccccaggctgtgaccctccagaggacccttgcctcagcctcgggaagcccctgggagggcagtgccgagggtcaccttggtgcactttcttcggatgaagagtttaatgcaagagtaggtgtaagatatttaaattaattatttaaatgtgtatatattgccaccaaattatttatagttctgcgggtgtgttttttaattttctggggggaaaaaaagacaaaacaaaaaaccaactctgacttttctggtgcaacagtggagaatcttaccattggatttctttaacttgtcaaaagttgtcacgagtgtgctgctattctgtgttttaaaaaaaggtgacattggattccgatgtcatcccctgtagtatggcgtggagcatctctgtctggaaaggcccgcctgaggcttgggcagccagttcagggagctcccaggcttggctctcggctagcatcctcagaggcccactccctttgtgccctgttgctattaatcgggacatatcggtttacttcgggtacagaaagtgcggtgttgaagtcctcgctgccactctgtttttagatctgccaagactgacctttgaactttcctgtagtcaatcttcctcgatctaccagatgggagagacccttggacaactttataaactcctgtttgccttttttggatcagcgacagcccccatcgctgtgactattggggaaaagacgaagctctttcataaattccatggagaggaatcaatatcccactggaaggctagaaatggacaagatagtgtatttgcaatcacaaacaaaaccctagtgatgaaaaataatttgtgatggcagatgcttctgatggtgtgatagaatatgtttttgaaaacaaaccatcgaaccccccgccccacccccaaaacgggcttccctgtgtttagggagctttgggctagaactagctacgatttttaggtgaaatgtccttgtaattgtacaaagcacttggtgcagtgtttgcgtggagcagcctgctgctttctgatgcattccctgtttaagtgcgtttaacatctacctcacaagccctgaaaccccaggcaaaacccacagaaagctcatacccggtgcaggagtttgccatcccaagtggctttttttccatatgtagccaaaaaggattgcagatagcgtcggtgcgtcccattcgaaccttgtcacgtttgagctatctttaccctgtgatttacttttagtaagggtgatcatggtgaaaatatttgcagacagctgttacagtacactatatggtcaccaagtaaccttatatttttctttatatattttacaaatgtaacccctgtcattgaagcaaccgtggaagaggcagggtcggtgatgtttaaaaaaagttccgaggtgatggcaaacatttaattttaatgaatgactttttagagtttatacaaaatgaccttagcttgctaccagaaatgctccgaatgtttcgtcaagactttaatactctcctaggatgtttctgaactgtctcccgaattaactttatgggagtctacagacagcaagactggaaaatctgattggagtttttgtctttcacattccttttgaaaactctttgttcgaatgcaaatcatcgacttaaaatactattcttaaccaaggcctggaagaaagaagacacttgcaaagccgctaagacaggaccacacatcttaaactgctgttcctaccatgcactaaactgtttttaagttttaaaccacaccctaggctccaggagtgttcaggaaagatggtgtttgtaggtctccatgctgtttggcgttggggggtgtggagggatcatccgtcgactttctgaattttaatgtattcacttagtaacaaaccatgattgtcttaaatgccttaaattattatgagatttcttgtctcagagcccaatcagattgtcaggaattaacatgtgttaggtttgatcacccttgaccacttcttatagatatttcttcaacaaatcatgtgtgatgcctgtaggaacacaactgtacctttaaaatattgttttcatattgctgtgatggggattcgaggttcctgtatgtgccactgttttcagaatctgtagttttatacaggtgccgaccctcgttgtgatgtatgtgctgtgcacattgacatgctgaccgacaatgataagcgtttatcgtgtataaaaagacaccactggactggatgtacacaactgggaaaggaattaaaagctattaaaattgtgccttgaaatgccaagacctggttccctccccctgtcttccaggggtctttctatttgaggcctgagcctcacatggctgggggttggggtgggggcaggagagacgaattttagccagctgtgtccacacaaatgtagccttgaaaacaggagcctggggggtgtgagtgtcacaaagttttgccatgacagagtcttgcagtttattctcattctcctgatggggctaattcacgccattcccgcactgtaactggccctaaactctgtgcccctcccattggcctcctgttctctaaagcaatttgcacttccctagggggagccgtgaagctccagagctggtcattaggaggcagactcgagaatatttttcaaaatctgagtagacaccatccatgggtattgaactcaatataatgaactgcagctagtcttttatttttaattaactaatt

SEQ ID NO: 7911 - DNA, 1128 bp, Homo sapiens
tgggtggcgctgcccaagcaggctgcaggcccaaggaggaacaaagatcctctcaaggggtgcggagctgaggttccggtcctgccaaagccacttgatgacccccaagtgcccccctttctgcacctcagagaagagccctcaagcctcccaggtcccctccaggggcacgaataagccccagcagggttctgaaggggtcccaggaatctccctgtggggatgcggtggaggtggaggaggctgcggtggcctggggacatctctggtcacaggtgctggtggtatgagagatggggtaggcaccaagccccctgcagctgtggctaggcgggcctgcaggaagggccaggcaggctcctcagggaccacaaagaacaggggttttcacacctaggtgggcctgcatctagctaggacagtccccatcaggccataatgggcacagtgggaggtagaaccatgagtgagagaggggaggcttccagaggcctggcctgggtccctgctagattgagggctctggctatggtacatggatatttctgctgtggaatcaaaggagcaggggatgctgaatatcccctctggccctatgccctgctacctgtcctttcacggaagggtgtgtgtgtagggggtgcaggaccaggcctccctgggtgcatctctgccaccttgccctttggctcaggtggacctccaccaggtattcagaactccagcccagaaacgcgccaagcctgtggggccaagacctagggggtgggggtggcctccctcccgcctgtagccaaagggtcctcccttgcccagccaggccccggtgtcgcttactgctcttatccacccctccttcccaggccggtcctcaaggccccagcaaaggaaccaagttcccgtgagcctccgaaaggcgaagggcaggcagcagccgctggcttctgcgcccactaggagcttcggatgcccgagttagggctgcgccaaggcggccggagcagagagggagacggggacggggacaggcagggacaaagtgcaagaggcaaaactggctgaaaagcagaagtgtaggagccgccaaggggcgggacgaacaggtccgtgggccgggcggagccaagg

SEQ ID NO: 7912 - DNA, 1295 bp, Homo sapiens
tcatcctgaaataagcatacctaatttcaagcaattgttgtattttcatgactgaccttaactgtactttttctagcaagagatgctttattctgcagcatgaacagatttaaaatggctggtgttaaatatcagctcctaataagatgtggactgaaaacactatcacaacactatgagaagcccctagcactggttaacgctttcctagcctagtctctggatttggggagcttgtcttcagtggctgagactgtgagctgggagcagttctctcagctggagagactcgggatggggtaacctggggaccagtctagcccctgcaccctcttccctgcctctgctccttgggagcgggtggagagacacccatgtggctccccttagggccagcaccaagcaccacgctctcatcctgcaagtcggcgcacacagtggatgaaggcaggagacccagaaagcagtgcagtgcagctctaataaaggccttatttttcttatgtaaatcatctttttacatttgtttgtaaacatgtttaaagaacgaacctagtgggacatttttagactttgatgctctagccattttggattgtgtaagttgcagatgtggcttttactttttaaatggcatattaacaagccagcaaagtgtgtcagaccatggcgtggtatttattgtgcagcagatccagagacagaggcagcctgtcttttcagttggtttctgcttttaatttacttgtacaattcattgttactgttctgtttttctattaatcttttgtcaacttcctgattatgtaacaaagtatgtacagtctacttttgaactatttttatcacagtattatttattgctttctttcaataaagtactgaagcattttccactgccaatgaagaatactgagaataagctctaactgttttggaaggcagtgtcaccatatggaaattgtattacagaagtcaattgacagaataaagcagccaggagatgaagtgcaggttcagggcgtcatcctgcccgctgctctggaggtcccgagcctgcatcactgcaggagacaggtgcctggtgttaaattgttaaatgcaaatgtgggggctcacatacacagtcggtgggtagggcccaaaggcagagcctaggccgtggaccgcgcgcatgcacgcatgtcccttaacaccgtttcccagctctgcttccttcctcggtgctggcttcacactcccacctgctctccctgcctgctcacaaaggtggctcccaggcctgcacccttcca

SEQ ID NO: 7913 - DNA, 1768 bp, Homo sapiens
tgttaaattctgaaacgctttcctctcatctttgaatgtataaaaaagctggagtacttcaagtacagacgaatcatctgaatgttcagcaccactggacttctgccagtggccgaggaagggaccatagcctcgtgtttccccctctacctctggatgattacagactagctttcctattttctgcgtgtgaaataaaggtcaggcttcagtagagccatctttagcggggatttgggatgatcccagtgtctgccttcagattcgtgttctgtctcccacagagcatgcgtctgatactgcagactgccgaagtgggtgtaccagccggcagaatagtcaggaaggcacagtgcagggagagaatcggtgaacatcagataagcagatttacaaatttacaaagataatgtcacctgttcttatttatcataccaggaggcaaagctgcacgtctgttttattgatctgttcctattttcatctcttccatcaagcatacacaagctgagggagaatgtctttcaagagcatcagacccttaaggagaaggaacttgaaacaggaccaaaagcttcccatggctatggagggaaatttggtgtggaacaagaccgaatggataaggtaagtggcccgcggctgcctatgccaggctcctggtgtgcttggaccactagactgggtggcagagtcgtccctcagtctttccttagatcagcagttttgagtccatctgctgaggttgcgatttgcccggagtagacccctgttgattggacttactcatgaagtactctagctttcttcaaagctctttaggaatcctcagaggtgctggagcacgggtgttagtggggaggcccagagagggagattggccctcagaggcagccttgtgataggacagaagtccagaagcatcctggctctaggtgtcatcactgtcaatgcctgtggttccagtctgtagcctaagtcatgccagtccgaagaccaaagtcaaatctgtaggtccccatggttcacagcacacacggaatccagccaaaggcctggctaacatccttcatgcgttcagtgaccatcagagcagtctccctcgtgtaaattcggcgcgtaccaggctggggacagtgctcactctattcgagaggtctgggcaagcctcccagcagctgtcattgatgggatgcagactgccacgcagacgttgattgaggacgttggccaaatgcatccggctgcacccgtgctttaggtcctctctaccttaagaaagggagccacgttagctcaggagggctaccttttccttcctggagagaagatggaagagatcgcagtgtgtttgcatgtttcttcagtaaaacagacatcctggaggtgaacttttgagtctgagcaacataagcttgttctgacctgacagatgcttgcctttactctgtggaaagaagtgtgttagccagtgtcggattccagccggtaattccatacccctctcccacctcatgcaccagccagatgaacatttgagctgggcacgggatgatgttgccgtgtcacagtgagctgcaccttgctctgtcccccgcagagtagatgatgtggtgggccggcagggcaccccaaaccacgaccataaatagcctgggggaggagtggggtgagggaccttctgcaggaaagagacatggatgttgctgcgtcactaccacagagatgccctgacaccgagaagagcaatgtgtgcagaatcatcatc

SEQ ID NO: 7914 - DNA, 1374 bp, Homo sapiens
cgggacctcccaggacaagcacgaggcctcaggtcggccctgtggcgggtaggcaggaaggactgtcccagacgaggggcttcctctagagtctcactgctggggaggagaggactgggcctgatggaagttaacccggagctaagtcacccagagcacaggagctgccatgtcagatgggaaatctgcctatgtcataccgtgacagcccgcaggatcaggtgacttctagcagagaccctggtttttttcctgtgcccactccggcttgtcctcatctctacccatcccctgatgcccaggtcaccgggagggctgctgggagcctctcctgtccccgccgggcagtgtcactgagtccttgaaatcctcccctgccccgcgggtctctggattgggacgcacagtgcagttgaggtctgcgtcgggcttggcttttcacaaaggctgatgtcttaactgtcacccatatggtccctgggccaccgggcagcctggggcggtgtgtgtgccatgtcacagcatggcctctcggccttgggaaggaaggcagtgcctgctctgctgtgagccgccaggaaccctcctcctgtcaatgggggtgtagtatttttgccaaaatatcatgttcaatttcagtagtttgatcagttgaaggctagaagtgtgaagtgcagatgagtgtgtgttcttccccaaggtccccccacagctccaggacaccgctgtcctggcatttgtggccactcactttgtaggaaactcatctccttcctgaggagccgggaggctggaccagtcccgtcgtgcagtcaggtgggcggtgtgtctttccagaaggtcacgtggaaatgtctcgggacttgggtcccggagtgcccgtgaagcgtgtttttgctcctgaggtgcattttctcatcatccttgctttaccacaatgagcaatgaggtcgggttttatatgcaacttattgtatctgaattcctgtagcacacctcataggtatgatttttttaaattaaagaattcagaataaacattttttgatccacttgcgtgatttgctttggtctgtggtcactccgttctgcagtggaagctgcgtcgacactctcggtgtcctgcgccccggacctgggctggcggaggctctcctgccgtccagtgcgtctcacgcgttctgttctggctttagaccgaaccgtacgttcccttttcagtgttcattcaaaggtgctgcttatgaactgaaatgtgtttactctggcagatgattcagttttttgcacaaaggttccaagcaaaataaaacactctgtgcttaaaagtcatttctgaattacagttctcaaatcctgagggggattttgctc

SEQ ID NO: 7915 - DNA, 1168 bp, Homo sapiens
gcgtttgtcattctctacgttggcgtgatttataatgtcactcacccatgagggcccacgtgccctgcgtcggcttcaaaccgtgtgcttgggccccagaacgtaatctcagtgcaatcaagccagttcttcagctcacctgtgccatgcgtcaagggcatctggagaagggtagagagaaacccaggtaccagcccagggccggtctcccacccttcccgggtgcagagcaggtgcccctgggcttctgcctaaggaagtctctgctgagcagcagctgaatgcaaagcaaagtgaatgagggcgccaggaaccagccgacaagcattccagccgtgggggtcccagcggctcatggccagcttctgcctgcgccgtctcacgttaccctttaggaccctgggccagtgctgggctctcgctaagtaaggtggcttcatcttgtgagatatgctcatccactaaatgtatcttttatttatatttttaagcaaattcacaggcaatttcttttacaactacatgatgggcatcgagtttaaccctcggatcgggaagtggtttgacttcaagctgttcttcaatgggcgccccgggatcgtcgcctggaccctcatcaacctgtccttcgcagcgaagcagcgggagctccacagccatgtgaccaatgccatggtcctggtcaacgtcctgcaggtgcctgtcatggctggagagggtgaaacgccgatgccggcaggctctgggggaacccgcaagccagagcgtattcccatgaccttaatctactgcttgtaaaagagagtcagctgccctccccaggtgtcaccaggaagcagccggcgagcacttggtgaaggaagccatccttgggtgcctgtctctgccagccctgggaggggaggaggcaggttctacgcagccaggcgtggtccaggaaggtctcccttggggattacacctgggtagaatctgggggtgtgtgggagttaacctggtagagtggaggcaagagtgcatgctccaggaaccccctgtagggagagagggtggcaagtctgggacactcagaaacatcccgcatcctgaccagagagcgttcaggagctcagagccaggtgaggctggaggcctcatggaagtcttcctctttatcttaaaagcagca

SEQ ID NO: 7916 - DNA, 1318 bp, Homo sapiens
aagtggggcagacccagggagccccaccacccatgctagatcactcctggcagctcttgcacagagtctcttttctttaacacactgacagctgggagaggcctcacgtcatgtatgggcaactgctggactggcttcgatacttggtagcctggcagcctgtcatcattggtgtagtccaaggcatcaactacatcctgggcctggaatagtgatgaagagcatcagtggaaaacccaccccacacgccatggacctcagggcactctcctccctgcccacaaagacctcctgggtgggaaagactcaaaggggtgcttgggccactcaggacccctctggctgtgtcggactggggagggatatgatggagagccagccagtggggctgtcagcagtggggggctttttaaaagaaaactattttgatgaatatatttaaaaaacctttttttattgtggagcataggaattgcccccctccaggcttcaccctccctgcctaagcagggtgggggcagagccatgacatttttggtttaaaggagccttctcatctctggccgagaacactgctgggctcccaggtagctgaaggcctcagcccacccactcccttcttccctgtgtggggctcaagcctggtgcacttagtatagaagagctaacgtactcaggcttgtgccacgggtgagcactgaggccccaggtgtcctccctcccccactgtctgggacacaggacaggtgttgcgtctgactctgtctccccctgtccaagagctataggctggttgaggcaagtggaaccttatcagtgacttggccaacaagggaagccttggggcctcagaattcattgaagatttgttttgggacaactggaagaatcagcaccatggatactcgcccgtgggcagggctgtggtcagccaagaatagaggtcatatagttgggccatggggcaattgttggcagccatgactgacggccccttgtgcaagctcattcttcagtggatccttcagtggagtggtgacacgtgccagcggtcactctgccacatcacttccttcttgaaagcctaagagtgcgtatgcgtgtgtgtgtgtgtgtgtgtgtgtacgtgaggcagaagaatatgacagatgtcagcttctccctgtgtcagatgatatgtccttgaagctggcaggggattcccagtccagggaatatccctacatgatttttgtcattcatgggtcctccctgggcctgacaacgggagtggtgggtgggtgagaacaggttctgagagggggcttctaggaaggcc

SEQ ID NO: 7917 - DNA, 1137 bp, Homo sapiens
agtgagtggccccacctgtgtccccgatgctgacctcacctggtcctccgcctactgtccctctcagtgccttctctcagctcccaggccaacagtagccaaacccctagagacagtgatgcctgcccgcaccctggcctggtccctggtccttcactggcgccttctcggagctggcccagggggcctggagcatggacagtgtgggcgctctccctaccttgcctccttttttcttaaagcaaagtcacttctccatcacaaccagatttgaggctggttttgatggctgggtccttgggcctggccagtcttcctcttagcctctggatctagaagggaccataagaggagtaggccctggttcctgctgtcctggtggctgggcccagcaggggccctcactcttgaagtccaggactgggtctgacctggtgggagcacctgccagaggatgctctttcccaggacggatgggccctatgtctcaggagtggggttgggggacagccttcagcagcagctcacaccctaccttccccagacttgcactggggtgggatttggagtgatgggaaggtttttaagggccggggatggatcttttctaaatgttattacttgtaaataaagtctatttttctcccgtgagtactgagttgacttgatcggtgtgggaaaaagaggaatataggctctttgaagcctaccttgttcctgctgagtcttccataccacctcctttctctcatcccttttcctgaggccacatctttccaggctcttcccactctccattagtggcctctgctcccggggagcattatgggctgttctctcttttctttttcaagcgcctgtgttcccctgaagcaggtgttgtcttcagcttctgtgtggcagtccctctctcccatactccctcgtgggacaggcaaagttcctgggagtggaactgaagcctaaatgaacagatgtcaggatgcctccattgaataatcctttatgaggacccatgtggggatgacacagatacagtgtggatccgaagcagctgctgcccccatcccttccctggaacagtccattagagtgaagggggaaaaaaaaaacatacagcacgaagataggaagtct

SEQ ID NO: 7918 - DNA, 1189 bp, Homo sapiens
tgggcgcaaggggctggaggctcgattacagcagcttggggaggcccatcaggctgagactgaagtcctgcggcgggagctggcagaggccatggctgcccagcacacagctgagagtgagtgtgagcagctcgtcaaagaagtagctgcctggcgtgagcggtatgaggatagccagcaagaggaggcacagtatggcgccatgttccaggaacagctgatgactttgaaggaggaatgtgagaaggcccgccaggagctgcaggaggcaaaggagaaggtggcaggcatagaatcccacagcgagctccagataagccggcagcagaacgaactagctgagctccatgccaacctggccagagcactccagcaggtccaagagaaggaagtcagggcccagaagcttgcagatgacctctccactctgcaggaaaagatggctgccaccagcaaagaggtggcccgcttggagaccttggtgcgcaaggcaggtgagcagcaggaaacagcctcccgggagttagtcaaggagcctgcgagggcaggagacagacagcccgagtggctggaagagcaacagggacgccagttctgcagcacacaggcagcgctgcaggctatggagcgggaggcagagcagatgggcaatgagctggaacggctgcgggccgcgctgatggagagccaggggcagcagcaggaggagcgtgggcagcaggaaagggaggtggcgcggctgacccaggagcggggccgtgcccaggctgaccttgccctggagaaggcggccagagcagagcttgagatgcggctgcagaacgccctcaacgagcagcgtgtggagttcgctaccctgcaagaggcactggctcatgccctgacggaaaaggaaggcaaggaccaggagttggccaagcttcgtggtctggaggcagcccagataaaagagctggaggaacttcggcaaaccgtgaagcaactgaaggaacagctggctaagaaagaaaaggagcacgcatctggctcaggagcccaatctgaggctgctggcaggacagagccaacaggccccaagctggaggcactgcgggcagaggtgagcaagctggaacagcaatgccagaagcagcaggagcaggctgacagcctggaacgcagcctcgaggctgagcgggcctcccgggct

SEQ ID NO: 7919 - DNA, 1150 bp, Homo sapiens
ggtgctgggtgatgtcttgcaggtaggaatgcacagaaagacctgtgtgctgctggttggtgtggactcacattcagtacatttgggttcctggtgttcctccatttccagaggagtcttgatgactgaggagtcatgctgatcccagtttgtctctttataccaccagctggaaaccttgaagcaagaggcagccactcttgctgcaaacaacacacagctccaagccagggtagagatgctggagactgagcgaggccagcaggaagccaagctgcttgctgagcggggccacttcgaagaagaaaagcagcagctgtctagcctgatcactgacctgcagagctccatctccaacctcagccaggccaaggaagagctggagcaggcctcccaggctcatggggcccggttgactgcccaggtggcctctctgacctctgagctcaccacactcaatgccaccatccagcaacaggatcaagaactggctggcctgaagcagcaggccaaagagaagcaggcccagctagcacagaccctccaacagcaagaacaggcctcccagggcctccgccaccaggtggagcagctaagcagtagcctgaagcagaaggagcagcagttgaaggaggtagcggagaagcaggaggcaactaggcaggaccatgcccagcaactggccactgctgcagaggagcgagaggcctccttaagggagcgggatgcggctctcaagcagctggaggcactggagaaggagaaggctgccaagctggagattctgcagcagcaacttcaggtggctaatgaagcccgggacagtgcccagacctcagtgacacaggcccagcgggagaaggcagagctgagccggaaggtggaggaactccaggcctgtgttgagacagcccgccaggaacagcatgaggcccaggcccaggttgcagagctagagttgcagctgcggtctgagcagcaaaaagcaactgagaaagaaagggtggcccaggagaaggaccagctccaggagcagctccaggccctcaaagagtccttgaaggtcaccaagggcagccttgaagaggagaagcgcagggctgcagatgccctggaagagcagcagcgttgtatctctgagctgaaggca

SEQ ID NO: 7920 - DNA, 1880 bp, Homo sapiens
atcagccacacctaattggctaggtgggccagagttagggaaggccagggcatccctggccctgggtccagggttctgtgccattttctctggcccagcttgcatccagctattcctgcagggcgtctaactcattgccacttcctctgatcccacccagaatggcatgggctgaggatgggaggctttctgaggccgagaactgggaggcccctggagctctcccatccagcttccttcgtgttaagagagaagattaaatctcagagcaaggtggggattcccttggagtcactcagcaaatcagtgacagagctgggtcgggagctcaggcttcttgctgtcagtccatggttctctctggaaagagggggcctagtgagaccaagcagcctgatagaacttgacacttgaggtcagtgtagaggctgaaagaggtcagaggtgggaagagagactccctagccctgagcccagcgtgtgtcaaggccccaaacaggaaagggaggggattttgaggtccctgcttgggtgggggtgggggtgggcatcagtaagtacccctgggcctggacctcagcctggtccagcataggtgagctgagctattccatccttgatggcagggaagtctggaaggccagtgtggtggaggcggcagcggtagcggccacagctcttagcatactgcaagaagcggggtgcaccagggaagagcacatggtcagccagcacggtggcacctgctggcagtagggcatgggcctccagcagctgcaggtccctcaggtaacatcgtggccggtgtgccaggagcaccaggtctgcccgactcagctgatactgggtgcgtaggcacgggatcacgtcctctgagctgcccacgatgagctccacctgtggggatagggggagctggaggtgagggtggggggaattgttctcccagtcaagaccccaccaggatctggcttacttcatgccaggtcctggcttagcttcccatgagtgttctcacatttcctctgacctcagaacctaagaagtcaggatcagtattgtgatttccattctgaagaagctaaggttcagaggatgcatgctttgctcaaggtcacgtagctaacaagaggcagagtaagagctggacccaaatttgctgggttccagagaccttcctcttagctgtttctttcgtcatccggcagaaaataatgtgcagatgacttgggacaggagggcaggagctcacacaccatccagcatcacagtccccagagtggaggtgcttccttctccttagatgggagtccttcacaagggatgtctgggggcaaggcctggggtgacaaaaatctgggttggggagatgggaggctgaccatgtgctcatcaaagccggccaggcggatgagtttttcagccactgctgccgtgcgtgggtcccgctccacagtaagaaggcgacccccagggggcagggctcgggcaataagcagggtagagtatccacagtaggttcccaattccagcacacaagcaggggccttctcctccaccagccgcatcaggatctgacctatgaggggagatggctgttgcagaagacatgggagatggatgcagggcccctgataaaagatatctcaaatgcctacctgcctcactgcagctcccaaccagccggggtctcatctgtctcttgtaccatagccccagctgccctcctggtccccgtctcctacagtgtagtcttcacaccagccctggaatctttccaacaaatctgaccttattactccttggctcctgtgagctgaaggcctttgggattgaacttgggattctcagcctggcattcaggaccttggacctgatcc

SEQ ID NO: 7921 - DNA, 1298 bp, Homo sapiens
agcgcagtcctgcgagctagctgttattagccccaattggcaaatgagaaagctgaggctcaggctcaaaggaggtctctgagttgccctagcagtaagtgatggaggccgacctccaagctgggtccaggccgagggagtgaccacttcacctccccaccgacaggtagaacgccgtgtggtgaaccagctggcagcagcctatgagcaggacctgctgccagggggctgtactttgcgcatcacggtggaggactcagacaagcagctactcaaaagcccagaactgccctcaccccaggctgagaagcgcctccccaagctgcgtctggagatcatcgacaaggacagcaagactcgcagactggacatccgggcaccactgcaccctgagaaggtgtgcaacaccatctagcagccacctgcctgctcctatgtgccctcaccatccaataaaggccccttggctgtggcatggcaactgacttaccttcccctcatgccgctcccatctctacccagtctcaggcctgcttacctcctcacagcccatgaagaccccttctcagccccaaaacctgaaggaggaatttcgccctactctggcccctttgttgtgggcccataacctgctaacaagccttcaggagaggagctgcctttccacccccttcaaggcaaggagggatggaggtcccttatttccttcagaatgatccccatcccccatagtcgccagactttctcatgttcccaggaagctcagaagtatggcagctaagaacacagctggctggaagaagacagggaccagactgaactgccaccctctgctagtcctcatgcaactcagtccccagaatggctccactgggagtggaggaagagctcagaggcccaggtgcagatagttctgcaatttagtctgtagcctcctcgttccctaccctaaaattctaaggggaagggacccatagaggcttgcctgtttccgctactatattatgcccagtgttcctcctcaccccacgtcctggggtcaggccagaccatgtttcgtcagccttggggactaggccagtgttgggcacctccaggaggaggcctgactggttcattaccctcccctactcagactgagcagcagtcccagataaccaagcaagctcagctctgtgggggcctccttcaaaagaccaacatcgcagacattaggaagctgtaggaagagagatcatgggtttgacctctgcccacatggccatggagtcagcctcagccctgtctgtactgctcgt

SEQ ID NO: 7922 - DNA, 1107 bp, Homo sapiens
ctccacaggcccagcatccccagatcatcttctcattggcctctgggaacttcccaggaacacgcacgtaatcttgccactttctgtcagccacagccatgctagcttaaaacccaggcctggcctgtatccccaagcctacaagggacctgccccagagcagccagaatatgctttgttctagggcacagccactgaagggcaggactacttgtggatgtggcagcagttcttgggatgactgatgcttctggagcgagaacttgctgttctcagaagcagagacttagaaaacatccccaagcagaaagcttcttcctttgtccgttggaaaactctgtggcaagacatttgtagctaagaattggagtgttcaccaaggacattatctctgccgtgccttaaaatcaatcaatactcccagctattgtccagtagtttacattctctgcttcccccaacccccagacaagagaattcactttataaggagcccctcttcctagccttctagatcgaacacctttgaaatgaaaagacgagggccttttatgaaactccctctatcctcacccccaggccaaggctggccctttgagccgttccaggggcatggttcctgcctgttgacttggaacagatgcccttagcccccacctttacatttctcccacctgcctttttagccagcatacatttacaccccttgccctagcctcccagcctcaagggccaaaaccattaacccactatttctccctcccaaccctgaacaagttgccgtcactcagggcctgcaggctgccaacttctgacctcccttcccccttgacctcccttggtctgcctgtgtgtgtgaccagccaaccgagaggcaggatcctgctctatcattctaggggctgttgccagtaatatttccagagtcttttgacctcagctgaccctctccaaagggtttcaggaaaggcaagggagcctaccttcctgcccatctggctggcttttttttttttttttaattgagacagattttcgctcttattgcccaggctggagtgcaatggcgcgatctcggcttgccacaacctccgccttcaagcgatt

SEQ ID NO: 7923 - DNA, 1176 bp, Homo sapiens
ctggggaatggcgctgggaaccgcttctgggcagccaacgtgccccccagtgaggccctgcagcccagcagcagccccagcacccggcggtgccacctggaggccaagtaccgtgagggcaagtaccgccgctaccacccgctctttggcaaccaggaggagctggacaaggtcagggcactgcagctctggggccccttgggaccacccccgtctttctgctgccctgttcctcatgctgtcttaacccatctcatctaccagctcagggagatgtcttggcatatggggaaactgatgtttggagggcagaagggccctgcctaagccatgtgaaaagttctggccatgcagggaggagccaggcctgacccttgggccaagggcacatccccagcatctgtctgtctctctcccaattcctcagtctcctgcaccccgtccggttgcttctgaatcctgccaaaaagagtgaacttgatggggatgctatttcctgtcaggctcatgaaaaacagctgggctgctctgacccatccccatccacaccccactcaagatgaggccccgcatgggccccaggccctgacaggctgggagccaagtcttaggccctgatctggctctgcctgagtgggaggcagccagctccgaggcaggggtatgccatttgtgacctctggttggccttcagcccctcccccaaaccgcccctcccaggcagactcagtccagctagaagcccggtgggagtcaggcctccacctcccagggacccaggcgtcctgctcccagcccaacccagtctagcctgcaagccaggagggcggcaactcccattggttgggagggctgggcaggcggtgaggaattcaaatgtgggaggaattagctacaaagcacaccccccccccggctcctccacaaggcagaaggagcttgagatcctctggaggctctggctgactgggcagctgtgtccaggcagccagcaggggtgaggccccgggcagctgggatcccctggcctctgctaggcagcccctgctcacccctcctccccttggcctctctcttccctctccttctctctttcttccttcctattctctctttcagtctgaggatggactgctccaggcctgggtgactccttccttttctttcctctcctcc

SEQ ID NO: 7924 - DNA, 1293 bp, Homo sapiens
gggtaagaaaggcacttcggaagtgcagggggaacagcgtgtgcaaagctcggaggacaggattgctgtctggtgactcaggaggaggggagagctgtgcaggtactcagcgcagtgcctgggctgctgggcgtgtgccagtgaggcctccaggtttctgtcttgggtggctgggtggacagtcgtgccatcactgatccagagacccaaggacagaagtgactttgggaggaagtcgagttcagcttgggacctggcaactgtgagatactgcagggtatcggggtccatgccggcatcaagaggcaacatgtgtaggaaacggaaagctgcggggtagggttgggggtgaggggactgcccaggtcctggtggtgtgctctttcacaccctgtccccttctcccactgccaaatgtcagcaaatcctgggacacttctcaggcctcatctggcatgccctccctcctcagaactgtttcccctctggggcttctggtaccctgtgttttcttgagtttcctctggctcctgtggatattccatgttaatctccttcacagacgccctcccttcctgccatctgctgggatgcccggctgtcagggagcatccccagacagggtagatatgtgtttggggtgagggagatttggtggagcacttgggcgaagtgaggctaatcttggaaggcttcttggaggaggaaggggtgtgcggagagaggtctcctggtccctgtttgtttattgctgggcactctgctgggctctgtgtttctatggtctccatgatccctgcagcagaccttctgggagatttgtgtactggctttacgagcaggacatgaacaaatcagagggagagcagggagggggccctggctggatccatgccaaggacatactcagggggccttgtggggagggtctgggagattctttccacccagggaggagcattaagtcagggggccttgaagaccaagctagtgctgtggtgttttgagggttgattggtagaagcacaaaaagggtacatgctcttcctgggttcacacaactcgtaacaggtatagggtctctccaggaacctggagggaagctcagattgaaggttcctggtgcccttgcgccctctagtgaccattcttctgcatgcaggagcgttttctatttcaaccccatcagcttgtgggggggagagagagagagaaaaagagagagagagagagagagagaggttagaagagagaagaggatagagaagagaaagtctgtctgtctgtctctgg

SEQ ID NO: 7925 - DNA, 2381 bp, Homo sapiens
ggatgcttcagatactgagtcaggaactgactgacaaactacgtaattgtttcctgctcaggtccgggcagctccccctccacctacacagaatcaccgaaggccagcagagaagattgaagatgtggaaatcacactggtgtgatgatgggcttgcccatccattactgctacaatcaaggccaggcttggagtttggccagtcttgttttttaggcacctttgcatgatgatgactcttgaacagagcaaaaaacaaggaggattatgtgtgactgggtggcctggtagactcctcccacgttttgaatatttcgtgccttttttttttgttgtcattttctatgtcatttctcctaccatagcacaaatcctagcggaccctaggagcaaagaggggggcagccctcatgcctaacagtggtctgtttttatatgagactcaagaacaggcctcattccagggcacagtccctaaattactgatcatgtgcactcgtacagtatattactgtgaccacaaggatgtggcaaagattctcatctttcttcaagtggcttttgctcatctgattgagaattaatcagatcatgttggctacataaggaaacagaaggagggatttcaggagaggctggctcctccccaaggttagtccccagactgagaaagtgaaaccttattgggaaaaattggactgccctgaatttagcaccaattgcattaacgcacatctcttccacaactaacagacttaaaataacagtgtccttcgtattaatatctgtgccattcatttagaattagcagagctaatatggaggggctgaactagtagccacatcttgttcatcacatagactaatagaaaggaggctgtggctaaagcagaaatggaacttccggatctgaaattagccaatataatgttcttttgtatttgggtatttttcatcttaatttttacagcatatactcttcttaccagtatccttagaatccaaatgtctagataagttgaggacacatacctgcattgttgagcttctctactggggacgccccggcattattttattcccaagccagcagaccggcccagacagccaggctgtggctggtccagaccaactgctatggtggaaaatgcagcttccaggtcccactaccctgacatttccgtggaaggaagaacctggtggctcgtggaggaaaccagctttctatgagaaaggactgaaggattgcgcaccctgcacaagtacagattgaccaggaaaagacaagtgtcttctgtgtgtcacagggaaagccaggagtggccttctctgcaggccagcaagcctgcagcagcaggtgcccccacgtcaggtgctgactgtctgctgtccgctcctgtagaaggtagggagcacaatacctagggactaagggatgttcgccggttgtggtttgttttttttttttttccttggttaagaaatcaaatttgcagaatttaatctacaagttgtattatgctttgaaaactccatccctcctaagaatcttaaaaaacttgaaatgctcgccaaatgtccccatgggatttttgaccaaaagtaaggtgataactgaagaaatttttagttctttgatcacttcagtgacaatacccattaatgaatcttctccatgatttggggttttttttcgttgttgttttttacacttcttaacctgttgatctatttgaggtcttttgtgtttatcaaacttattcttaagtttaaaaaagaaattaaaagggtggtttttttaagattttaaagtttgctaacatattaaaaatcttcaaatgcttattaaatagagcagttcttgccacccagtcttgtattctgtctttagctagccaaattgtccttgaatttgggttttccacaacctcaaagggttatttgaaatcttttgttgtattttaaaatattttttggaagagctgctaattttattttaaaaaacaaagttgtgaaaacatgcctcctttttaaaaaataacccctccatccaggatatggaatccagcaccacagtgcacaggtcagggctcggagggagcctctgtgcagatgtgctttctttacagtggctgtaaaaagtttgtatttattatgtataaaatgttgaataataaaaaaaatggaattatgttttctaagttttaatatagaaaggtttgggtaaacagacctttccaaaaggcccatgcttcttataaaaacattcctgggccctcctttaaaccagctaacagacagagagaggagaaagtaaattaatccatctatgagacagacagtccctgaagcccccatgtgctaggtgtaatatcctgggt

SEQ ID NO: 7926 - DNA, 1232 bp, Homo sapiens
cgtgcgttgggaaaatcacgccgcgagggggcgcaagagccgcgtactccagagcaagaagaaaaggctcggggatccaggcggagagtccaggagaagagccgccagactgcaggggcaggtggaaggcgtggcagctggaaaagtaggggtgggggcgcggtcgtgaagggtgggacttctggagcaacgctgggcgggttgggggccggtcggagccggacaggcggctgggaggtgggatgggcggggcgcttgggagcgagatggggggacaagggcgtggctacagctaaattcgccgcagagggcgggcggggagggggagggaaggggaggaggcgtggcctgggcggggagtagggcgcgacggacccttcagttagcccgcggctccccgggctctccctggcgccgagtcccacccctttcccggcccagagagtgtgcgtctgcgtgcacctgagtgtcagtgtgtacgagagtttgtgagtccgaggttgccatgttggagcccctgggcaggaggtgtttccgcgcggaggctggtggcccgcggtggacgcggcgccctggctgcgagtctgcggagctgagcacgctcagcggttgtgtgtgtctcagcgactccctgggggcagctcggcctgctgggctcccgagggacctctctggagggccagagggtcgcctcagtctgcaagtcctccagcaggctttttcttcttcggctcctccctgattccctcccaccacgcggttcccaggctcgcgcacgcccggagcccaccccctcttttgggcgcgaggccccgccccccgcccccttgcctctgccgcaaagtttatttgcaacaaaagggtgccaggagcgagcagccaagggcgttgggcaggcggacgcagagtcgaggaaccaagcgctgggatcccgcccaggcggtgccgcggtgcccctggtcgctccagccgcggcgggggctgggcctgggggtcggcgctgaggcgggaggggccgcccgggatggagacgttgcggccggtggccacagaaacttgagccgcggcagagaaacctctgctccggtctctgcgtcctcttcccacactcccgtgcgctgctttcggcgtgggccgctgcgctcctagggagtgggggcgcagggggggttggccgcggctgcccgaggccagcccccccggagtgagttacgccactatggcggacgggg

SEQ ID NO: 7927 - DNA, 1122 bp, Homo sapiens
tgcctattgtggtgcctgagccaccaacttctgttggtccccctgtggctgtgccagaacccataggcttccctacccgagcccatcccacgttgcaggcaccatcgctcgaggacgtcaccaagcagtacatgctgaacctgcactccggtgaggtccctgccccagtgccagtggacatgccctgcttgcctctggctgcaccgccctctgctgaggccaagccccctgaggcagctcggcctgcagatgagcctacccctgccagcaagtgctgcagcaagccacaggtggtgagtcctttgtaggggccttcagattggggccaaagaagggccatgggcaccgacttcggttggagccttttgcattgtattcactggtcaggtgcccaggtgccaagggtgcttttctggtcctggaagtgcctgtgcagttttaagagttgttaatgacacagggctcctgtctactcaggccctgtagaagcttcagttttctgctggtgctaatggcaaagggtcttgtctgctccaggtgttctgggtggtaattacaaaggattcttatcttgtcctttggatgtttctcagggactggttttggaaatccctgtgtggttctttgttggagggatgagtgtgatggcacccagcgcaggctcagtcctttctctgaggcttgctactctgttggccagacccttgataggatgtttggctcaggggccacagttgacatgggtttgcccttcttcgtgtggctttcctgtgacaggtcagaatatagatgtgttcctgggcctgggagaattggggaggtacaaggctttactttatggaggagcagagggggctcagggttctaactgcagttctgttcttgctgtgtgacattggcctttctctgtgacttaatctccccaatcaggggagataggtggacaaactagtgcctatgtttccatccagctggtactgtgcagatttgggggagcctgcggttttgagttggggactcttggggcctgagttctgccagagcctcctcagatgaaaaaagcttctagatgggggcttctaggggaggatagaggcagggagggggctgcagaggctgggc

SEQ ID NO: 7928 - DNA, 1213 bp, Homo sapiens
ccgctgtagccagaagaagtggcccgaggtgctgctgtcccctgaggctgtagccgccactactcctgttcccagccttctgcctaacccgaccagggttcccaaggccggggccaaggcagggcgtcagggcgagatcaccatcttgtctgtgggcaggtgagatgggcacagatgcagcaggggcaggtaaagacgtgacagcctgggggccgggagggggaggcagggccccagcttgggccctgagcaccctgctcaatgggagccctgcccttattgggcctctctgggcagtggaggcggccagagagatcaggactttccggttatgttgtgtctcacatggagcccttgcatccctagggcagcatcttggcccccatggcacccgggcctctcaggctaaggctctggtccatgaacttgctgtgtgaccccgggcacgtgctgccttctctgtgccccgggatccccgctaacggggatgattgccccactctcctcacaggttccgcgtggctcgaattcctgagcagcggacaagttcaatggtgtctgaggtgaagaccatcacggaggctgggccctcgtggggtgatctccctgactccccacagcctggcctcccccctgagcagcaggccctgctaggaagtggcggaagccgtacaaagtggctgaagcccccagcagagaacaaggccgaggtgagagtcaaggagaaaggcatctgttggcacctgggccaaccctgaccgaagacggggcaggggtggaagtgcagcgggccctaggcaggggccactttcctggagccagaagccagcccctgactcagctctgacccctcacccctgcccaccaggagaaccgctatgtggtccggctaagtgagagcaacctggtcatctgaggggcggtctagtctaaggacactgcggccctgccctgggaggttccgaaggcttcctggaggaggtggagctgcagctgggactgtgaggaccgagaagcaatggcccagcagacgagacagcaaagaccaaggcctggaggtgggagcgtctgccccagtgaggaggcaggtggccggcgggcactgtgtacaggagcaggctgagccccgcccctggccctgctgccatgttgctcccctgaaggatgccccgacccccgtgcctgccctggctggatcctaggagcccacggg

SEQ ID NO: 7929 - DNA, 1299 bp, Homo sapiens
cctttcctagaaaactcctcgtttctgaaattaggcattatatggttccaggacccagccttcaaaattcctggcaggccagcttcaacattccatggccagccctgcctaagccagacttgggtcccagtccctcagtctctccagtggatatcttctgtggtgcatgctgttgagtccaacccaaaggccaaccgaggcacacaggagttgggactggctgccacaaagctagaaagggacaaaacagcacttgcttccctatggccacatggatagtccctggatatccttgctgtggtagaggtcctctacccattccagccactgatagcagggggattttccttcctaaggagaacagatgtaacagctttgcaaagtaccggcccataggaatcaaatgggtgagatcagctttgggcctgaccccagcaagaccagcatctccagaccccagcctttctcctcaggcctaagagagtcagggaaagagaggagactgtcccagagaccttctcctcgggtcagccagatagtctggatctatggtgtgactcaagctcctccttacccagggggggtaaggccaggcctctagctacttggagttgtctgtaataatcttgaaaggcccaagggcctgtccccatcctgacttaaaggcatctgcttccctgtttcatatcacatgacagagaaacctgttctcatggcatgtaacatccctgtgaagagagcgttgtatatgattttgtattttttaattcattttaatctacaggttggaatctaatttttaaattttattggaactcacattttaaaaagaaataaaatttaaaataataataataataataataataataataaacctttgaccagtgtcttccaagtagtttgatcaaagaatttataggtgttttcaaaacacagtccggagtgtaaagattggaaagccccatggccttgcctgtgtgtatgaagtgtaaatctggttttgttttgttgttttggattcttttgggtttttgttttgttttgaagatcagacagtgatcactctgaaagattgaagccaagaatttgtaactatggtatttactgtaagctgtagaacactcaataactattaaaaaaaaaaattcccccccaaaaaaaagtcttaggtgactagactgagtggttcttggggagggaggcacagaggactgtcctgggccagtgagtcccttgggcgtctccccaagttgatgctaaatttgttctcagtagtcaagaaaaacctatggtaca

SEQ ID NO: 7930 - DNA, 1275 bp, Homo sapiens
cttcgagttccccaggcgctgtagacacaacatgaatcgggctctctgctctctccttagggagctcgagtcctggtggggagaacaggagtaaacaaggacttgacaaagctgaagagttatcagtcctttgacaaggacaggtggggcagggagcaagacaggtaggctggaagaacagttattggcaagtatgcagagccgtgaacgtcatggcatgtccaaggaattaaatgggagttcatttgggctggggtggaggctgggatcagaccgtggtgggccttcaagctaaggagcttcctaggtgaaaggggagatgtgagccttctctggagggaagtttcatgattgcatctataatgaatatattgcctgttttgtgaatactgacacatgtccatacctaaaacactcctgagtcaagtcccatccttcccacaaacagcttcctggctggtacccatgataacaattgagctgaacctggggacccctggttggggaacaggtgagttctatttgagacttccagccctagaaagctgcctccgtccagaaatgcctctcacaccaggagctcggccctctctttgtagctgtgactgtcaccctctcaggctttgtctcatccttcattctgaataagatggcagtgttctcctctggggcctgatccacctctacaccagcccaggaagccccatctgtgcctgccctcaggtggtccaccagtctccccctttggttcccttccagtctcttccccctttctatcccaatcaccaatagaaatgctaacatccctgcctggtagccagactagcccactaaagctcccctgtaaatgggggctccattagttctgctgccgagactaataaagatttggttggctctagcagtaactgtggcttgctttgttcccccagaaggccctgtttccctctccatgatccagcagctactagtgccttcactggtctagtgaaaaagagtgtggattctgagatcagttggaactggtgacagcatattagctgagtcatttggggcaagtcacttaacctttctggattttgttttccctacacttaaggtagctggttgaagttgaccattcctgagggctcaagaggagggactgccttggagtctctgttgtctgagctgatggatgatccaagccaggtcctgcctgctttctgagaatcctgttcatgttggagtcttttccagtaggttcccatccttctagagttgaatcaatgaatt

SEQ ID NO: 7931 - DNA, 1126 bp, Homo sapiens
atttatattttacaaaaagccaaaatatttcagcatattccagtgataactttaaaaattagatacattttcttaacatttttttcttttttaatgttatgataatgtacttcaaaatgatggaaatctcaacagtatgagtatggcttggttaacgagcggtatgttcacagcctactttatctctccttgcttttctcacctctcacttacccccattccctattaccctattcttacctagcctcccccgacttcctcaaaacaaacaagagatggcaaagcagcagttctaccaagcccattggaattatcctttaattttacagataccacttgctgtaggctacggaccaagatgtccaaaattattcttgagcactgatataaattacggtcttctttgaggtcaaaattcagccatcatggtaggcagtgcttgaatgagaaaaggctcctggtgcatcttcaaaatgagtcctaaagaacatactgagtacttagaagtagaagaacataagatgtatttctgactaaaacaaatggctctttcacatgtgctttattagactctgggagagaaaattaaccaagtgcttcagaacaggtttttagtatttaattcttcacggtaagaaaatgaagttctaatgaactgtttctcccaaggttttaaaattgtcaagagttattctgtttgtttaaaaaataagaaacctctttaagcaatagattttgcttgggttttcttttttaaaaacataatactgtgcaggcaaggcactgtaaaagttttaattccttccagaagaaccagtggaagaatttaaatttggcgctacgatcaaaactactgaattagtagaaataatgatgtctaaagcttaccaacaaaagaaccctcagcagaataacaaaaactttgctcaggacatttgaggtcaaattgaagacggaaaccggaaaccgttttcttgtaagcccctagaggcagatcaggtaaagcatacatagtagagggaaaggagagaatggaaataaaactcaatattatgcagatttatgccttattttttagcattttttaaggttgggtctttcaggctggttttggtttgtattagat

SEQ ID NO: 7932 - DNA, 1107 bp, Homo sapiens
gcggagacttcgggaatccgctgaggaaattcaagctggtgttcctgggggagcaaagcggtgagtgcgtggctcccctactcctggcagctggccgcagcgtccccgcaccgcccccggtgcggcccttccgtccgcggaggctccctgcccgcctcgcgtccgcgctcgttgccaccgcagcccttcccgatgtgccccccggtgccactggctcttcgccagtggccgagtttttaccctgttccccgggttcttcaatcctcgactccccggctccgttccccgcagtccggccatctccggtcgatctgccctccctccccagacctcaccccgcccagcctcttgtccatccctttcttcctccggtctcggtcattgcccgtaccccggccccctttcttgagccccacccttattccttgctcttttcccagttcctcagctctgtgaggcccactcagggaagccccactcccgagagcgggccctcttcaaccttggccaaggagggtgggatctgggcgttgttttccccagaggcttggccctgcgaagtgctgatgtcgtggaaggtgggaaggggtggtagtagaaaaaattaaatgattttcacctgggtgggaaattagtctgggccatagaggaaacatctgaattggagacgacttgagcatggggtggttgggggtgaaaggggtagcgtcggcagtggagatttttgccccttaggttagatggggctgtggcttgtcggaaaacctcattttgttctcttgactttcatcactgacaattcttttggcaatgttgatgatttttcaatctctgccagatgctatgtcatgatcattttacttggaatttttctcatctcacctcccctttttctcttttcaacatgaagcagcgtctgagtctcatggtggtacaaaagggaattactggggaaatgttaattattcattccttcttgagtattttccaatgatatattgaggattcatgtgagagaaggcttggaataacaaacatctttgttttgtcggatttcctttggaaaatggagtagagtaggaacagactcatcatctagttacctaa

SEQ ID NO: 7933 - DNA, 1161 bp, Homo sapiens
actcctggcctcaagtgatctgcccaccttggcctcccaatgtgctgggattacaggtgtgagcctctgcgccccatcctcttgtttgttttttgagacagggtcttgctcggttgcccaggctggagtgcagtggggtgattaatggctcattgcagcctcgacctccctgactcaagcaatcctcccacctcagcctcctgagtagctggggctgactacaggcatgcacactgtgcctggctaatttttgtattttgtagagacagggtttttgccatgttacccagtctggtcttgaactcctgggctcaagtgatccacccacctcggcctccaaaagaagtcctggattacaggcatgagacattgtgcccagcctctctgtctctttaaaatcatgaaaactcgtagctacttaagtaattctcctgccttctggaatgatgggtgaagatcttgactgccttgcctgctcctccttggcagatgacctcccttgccacttcacttctgcctttggggcaggcttctgcaccactgtcatcgcctcccctgtagacgtggtcaagacgagatacatgaactctgccctgggccagtacagtagcgctggccactgtgcccttaccatgctccagaaggaggggccccgagccttctacaaagggtgagcctctggtcctccccacccagttcaggcctcttggctatgcatgtctattgtgggtgggagagaaccacctggaagtgagtagcagccaagtgtgactatttctgatcctggtcctggcatttcaccagcattcacctatccccttaattccttcctcccagaattgctaccatcactgtttattaggtgttaaatggagactcaaagggaattcatgcttatagccaagcagctgtgagctcagttcattgagtcctcccagcctcctttgggacagagcaactgggttggattgaataccaggcccagtgagggaagtgggaggtggaggtgcccccatgacctgtgatttttctcctctaggttcatgccctcctttctccgcttgggttcctggaacgtggtgatgttcgtcacctatgagcagctgaaacgagccctcatggctgcctgcacttcccgagaggctcccttctgagcctctc

SEQ ID NO: 7934 - DNA, 1118 bp, Homo sapiens
tcgtcttgttgctgattaaaggtgcccctgtctccagtttttctccatctcctgggacgtagcaggaaatcagcatcatggttgggttcaaggccacagatgtgccccctactgccactgtgaagtttcttggggctggcacagctgcctgcatcgcagatctcatcacctttcctctggatactgctaaagtccggttacaggtgaggggatgaagcctgggagtcttgatggtgtctactctgttccctccccaaagacacagacccctcaagggccagtgtttggagcatcgagatgactggaggtgggaagggcaacatgcttatccctgtagctaccctgtcttggccttgcagatccaaggagaaagtcaggggccagtgcgcgctacagccagcgcccagtaccgcggtgtgatgggcaccattctgaccatggtgcgtactgagggcccccgaagcctctacaatgggctggttgccggcctgcagcgccaaatgagctttgcctctgtccgcatcggcctgtatgattctgtcaaacagttctacaccaagggctctgagcgtgagtatggagcaagggtgtaggccccttggcccttttttctcagtgatgattgatcttagttcattcagccatatagttttttaggccccacgatccctaggaagatcaggggaacagagaactggaaggggccctggtcctccacatagttcctaagcacctgggctataccaggctctgagcagggcgtcatcccatcacagtcttcaacaccaccttgggagtaggtagtatcatcccagtgttatagaagaagagactgaggtgggaaggcagtgggtagagtggggacttggccaggggcacacagtagagagccagaaaacacacagtagagagccaggacactcgtctctaaggccagcgttcttccctttcacctccttagtatgccatgccaaccctccattttacacatgacgaaacagagccccagacaaaaggttgtctttcccagatcacatggcaggaagaagtaaagctgacctgagatcccaagtcttaggaatcccagtcctcagaaagccacttctctctgagccttg

SEQ ID NO: 7935 - DNA, 1123 bp, Homo sapiens
tcccacgttgagtgtggcccaaccggtcacgactcgctcccctaacgacgccctgtcgcctttggacagcacccagctacccgtagcaccgcctaccgcccaccggctccgtaaactccacccactcgcttcagcgcttccaccggaagtgcgcaacagcactcatacaaaggaagctgggtaacagagtatgagaactccgcagactcccggctgggaacccgacgactttcaccggaaggaggagcgctcttcagggcaatgcaccctgcgcaatggagtccacaaagggcgcatccctatgcgcttgcgcagctggaggcgccccccagccaaccccggagaggtattgtagcaaagcgtcctgggtattgtagtgtattggagggaaggcgtcttggcgccttctcttcgcaccgttttccggagactgttagaggaagagtcgctttttcctgcctcccaggctgcccagcggcgccggttgccggggaacgcaggcgccgtggggagggatggcgggaggatactgcttaggtgctggagacggagttgagctggtgaagaagagctcgggctcatcatgaaacaacgaaaaggccaagggtctgggggcagccgtgggcgcaaaaaaagaggtaacctgagcgatcaaagattgaggaaagcgtaataggagagcagggtgtaaggaattttagggagacccgcacccccgctggataaacaagaaaagggacgtaagaaggaagtagccagggaaccagaaggttaaaaggaagggcaattggccctccagagaatagaaaggaattaggggctggggtaggggccacagacaggcgattaatgagatgaaggttaccggtaggatgactgtagaggagaagaacaaacaatgatgggattggttttgataacgaagtgaaatgtatgtgtgtgtgtagctttcgaggtccacagggacaggaagaaacataaattggcaaagggattatatcatttgttgtgtgattgtgggcaagaatcacgttttatacattactgaatgaccaaggattagtacaaagcaggactcggtaaatgttagttgaatgaatgaagtatgaagggctgactatga

SEQ ID NO: 7936 - DNA, 1464 bp, Homo sapiens
tccctgtactggggtagctcctgcctgctctccctgcgttgcctagggtaaagcctccagatttgccatactgagcccctcttcctagcatcaggcgatacatctgagttcaaatgtcttcccaggctcagggacctccattccttgagattgtcttggcatggcccagccctgcctcatgggatggacaatgcatggggtggtctttatttttccctttcaaataaaacactagtcaggtaccgttttatcccagtcgtactcttccaggtttggaagacccagagaggccaagatcccatccttagccatagcgagcggtggtggtggatagcatcacaagaaacgagcctgaaaatcaggtccagccggtccaagcacatggcctcccatctgggagagcccactgtcccactcccacatgtctgggcacctgccctgggctgaggccaggctgctccaggggcctcctgcgccctcacctgccacagagcaacccaggttaaatacagcccatgcacaaagccacaggccaaagcctatggaattgtttttaatcatcaaatttaaccattttcataactggttcctggaggtgtgcagtgcccccttgcctcttcaaacctacagcttctctttgccatttgtggatttcacatcactccacacagaaacattacagcctggcatccccagtctttgccttcttccagctgcctcgacacagcactgtggcctgtccctattgcccaggcacgccatttccaagggcaggaaggggcagtgtcctgaagcccatcttttctgtgactgtcttaggtgatgtgtagccccctccacctttccactcaacaacctcccacccctgtcctgctgcatggtccggagtctgggacctactttgttttttgttatttatgaccttgtttaaagaaaataaatatctcccaacctttattggtctggtctttctctgtggaattgtccttatttctgctgatatgggggcaggggacagctcattggacttagttgtcatggaactccagaaacccctttccctatagcccttcagtgtgttatgctctgcctgtcccctgatccagaatgcccagtgggatggtcagagccaccctcctctgcagccaggatgggattccagtcccatctctcctaattatcggctgtgtcgactttggtccagagcaggacaatctgtgcactgtccacatgatctcagtcaccatagcttcacttatgtgaaacttcatctacaacccaaatcatttcctgagctctgaacaggtaggcccaggttcctcctcctgtctctcccagatgaccaaaagccacttcatattgactgtttctaaagctgaatccaccttcccccggaaacttgctccccatgaaacttgctcttcctccagcgtttcctggctcaataagtgataggtatcacca

SEQ ID NO: 7937 - DNA, 1176 bp, Homo sapiens
gttttcgttttgaatatatatgttgttattttgatgtagatacgttagcagatggagaggttctaagagattggatactttggaatgtctttatataggaaatagacctcccatttcttaagcaagttgcttctggaattgatgcaacagggatattagctgtagtttaatggataagttgttctatgagctgctgctatcagtacttttttccacattttccattgatatttgtgatgcttgaaaaatccaaacttcacttggatacatttaattttatgcctttttctctctacctcccacttttcctaggcacccttgcacattttgttactgtgaaggactattgccctgttacctcactgataagaaatctcaactgtattcattcagaatgctttaagcttagtcataaactacatttgcctatggacctttggttattttgttaatgttgtcattatatttaagacttattgtaggaagtaattttaaatctatttcataacctgttttgatctgtctgcatactgctatatgttaatttattacggccttttacaattcacttgtcatctgagattgttctagaaactgatgaggaaagagtcgtactaaccaaaatgaatgggcaattgacataacattctatttcaggtttccttgtacttggggagccaaagcacaagatctaaggaaatcttattcacatttgtccctcagagcatcttaccctaagccatagaggtataaatagtaagatgagaattgctcattgtctgactccttgcacagcatgaatttaattctagttggaaacaaagttagtgttgactactggttaccttaaagtattcaccatactatatatttattagaccatctttcctctttgtttattcaagactatgtacttataaaagagaacctataagaatgtgtagagtgaccaaatagggacaaagtgacatacctagagtttgctgctcaaatttttccactagcgtaaccctaaagcagaggggcatgatgaagggggaaggggttctgagagcaaaatcagaatcagcctaccactgacatgaagtgtgttctgtctttaaaatgtaagtgaattttgcattctttataataaaacttttaatataaaaatgatatgtttaatctttactgaaa

SEQ ID NO: 7938 - DNA, 1094 bp, Homo sapiens
gcctgtcatgagtctgtctgagcatgatacttaacatgaacttgatgtagtaggtgcacatttgcctaacaggataaattcagtgatagcccaagctggtcaggagagacagaagtgctggctaggaggtctcagcctcgggcactacaatgtttatctttttctttttgaacaatattgtgaaaatgattgcattctcattgagcatgaaagtcaaaactggaattttctaaagctttggagaaaaggagagaattagtagggcaagatcaaagcatacattggaaataaacagtagaaataagcaaacaatataaagagacacgggaaatgcttctcgtgaagggcaaatgtaacaccataacagtagggaataaactgtgtcccacctgtttacttgtgtttatttgttgttatgatgagtatgcacctaccattttcctttattgtgatcactaaaatgaggccaaggtttaggaggtgagaaaaagtatcccttttacggattcagttcctgctaggatgttgtatcagaatcatgtgagaactcaggaagaggtagagcagaaataaaaaggaagaaaatgtagattagaaaataagacttctgagaaaaagttcaaggaataaagattgtttgactctggagaggagaaagctgttgagatagtttgctaagtttgctaataaagctttattgagtcttttattgaagggttcaaagtaagaaatactatgccatagtgttctccatctctagtgaagacagaaccagagggaataaggatcttttttttaaagacagcatggaaagtttaagatttaggaacttcttgagaaatcttcataatatcttctattcaaaatcttttttttatttttaagggaataaaaattttaaaaattaagagatatacagatgactttttaagggtccttctttccagcacattttttttaaaaactcaggttagaacaaaaatgtcataaagggcactaaaagtaacatttgggtttcactccatatctagaagaatttagctcacaaaacaatttttgtgtgttttgagtaactgatgcataagtgcaatgaa

SEQ ID NO: 7939 - DNA, 1300 bp, Homo sapiens
gactttagcaaaaaaatacaaatgtaagttcatctgaatggagaatatgtgataattatggctgcatagatagttttttaggttatatttttaaaagtttataacatcaacatctaaattaatgtctcactgttaaataggggagaaatctgagtgtaaagtagatttcaaatgccagttgtcataattatttagctttttttgccatacaaatgtatttattatgtctagtatatcatgattttttattcatttttatttttctctaacttaccagtttttcaacaaccaggaattaggttagtactggttgtgaagtctgtaactgggaatggaatttttaggccctactctagtagctgtgcagttaaacattaggaagtatactcagtaaccaacagcatttatgtctgctggatcatttatatatgtgtgtgtgtatacatacgtatatatacatacatatatgcataatgtgtatatacacatatatactcattagatatatatacatactacatatatacatatatacatactgtatatatacacacatatatactatatacacattatactatatatacatactatatatatatacacacacactatacttgttataaaaaggaatatcgttttgctttgtaactggagttaaattgttatcagaagcattattaacaccccaacacaattattttgtttgtctgtagtgagatggtgtaggctttagagccagcccagcctaggttcccatcctgtctaaatttccaatgccacctcagtgatactaggctccctctctaaatcttagtttcttcgtctacacaatagtaatattaataataatactatccatacagatgctgcagtgaacattcttatatgaataaatgttattgttcatgtgaaggtatttttgtggacagaaatctatgggccaaaaggcatgtgcaatttaaaatttgatacttgctgtaaaagcactgtaaaaagactatcccagtttacattcctactagcagggtattacagtgctatgtaccctctaaacgtgaagagtctattcaatttttgccattcttatgcccatctttaaatgttagccctcttcaactctctttggcctctctatgaaatatcatggtatcttagacatgataatatcccagatattgttattcatatttttccataatagctattcatatttttatgtaggttatttgttagtgtgtgccatttatgaaacagaaactgcttgagtctggattttatatatcatccattagtttta

SEQ ID NO: 7940 - DNA, 2678 bp, Homo sapiens
aggcaattcactgataaagggccatttaaaggcatgggatatagctgtgagggagaaaagtgaacgttaattctaagcatcaaatagagactgtgtgagctcaggatcccacatagttcctaccttaggctagatctgatctcccagtgggagaaagattgagtcctaagtaagcatatttgccttgatcagagtctgaaatgattggggttagcaagacatcccattttcttcatagagtaaatgattcagcccacccatgttccatttttttctcatcctaccagtgactgaaaaagtctacgagagtgaatcctgcacagatagtgaagaggagcttaacatgaagacatcctcagtacacagaccccctgccatgactgtgaaaaaagaacccagagaggaacgaaagggccccaagaaagggactgctgctctgggcaaagccaacagacaggtgtccattactggcttcttccagaggaaataaactgccatctctggtagatcagagacttggagtggtcaagggagaagaccaagaaatgtactcctcacttactatgtaagttcatctagatctccacctcacctgtatcaaaagactgttctttcatcctgtgaggtttatactatttctggtttttaaccaaaaggaaatcatctggaagcaggaggcaaaaagctgttaccttctaatgacatttaaaaagcacagtctttgacctgtccaggagaaggatttactccaaaattatactggaacagttttcagaattctcactgaagccatttagtggctaacccactgtgctccactcaccctatgccctggtccgcatatggcacaggaattattccttcttgttcctctgtattctaagaattcatgtgggtgtttcttatccttacattctgctggatacgtttacccctcttgtcttcctgcagtaccacacttctgtcccctaacctcctgaggctgttctctgtaagtcttttaagttttggttggactaaaggctgaagtgaaaatctccctgtaatcctcttcctccattatgcagtacacggacacctggctacagaccaggacgtggcttgtgttctgttcctttcacaaaagctctctgggaccttcacttgcaattagtggttagggaaaagcctcaggcagaacacaaatagaaatttaatgatgtgttcaactccaccagaaattacctcgagtcagcattgacgatattggaggagctgccgtgctgctgatacggggtgtgctttatgctgctctttgcggtttgttgatcccctcctcccccactctcaatacctagagagtgaaacccgtacaatgagataaagactaaaaagagaaatcccttcctatatacagtgtgctacatttacaaaaaatttctccttaagaaaacagaatattcaaaaacagcacttttccaggaagttagtgaggaagataaggcacacatttatttataaatggatgttgctcctttgtatttttagcttccctatttgcttaaaagtacaggctccctaagagaggatggagagggagagactgaattgttagtaggtctaaacatcaaagaaaacatttttattagttacttatggaaaatcatctattacaatgataaccttcaagtgacttccattatggctggacaggcggtgagctcagtggattgcagtggtgtgctggtgattttgcacagtgagctctgcggaaggggtcaggctcaactgctgatgtgtctcacacgtagcagacaaggggtgtctgactggcttcttttgcctcaagatggtgtatgtcgtaagtgatgcaatcagctgtctgctttttaaggttgggattgtgctgactttgggattaacatgagcttctttagcaaccaagcatgaacttgattaagaccagaagtttgggagatgagtcctggcattatgtctaggactaaagcagtggctttgtatagcaagctgagtaaaggttgacatattccaaaacccttctttttaaaaggaaaaaggatggagagaaggatggaaagcctggacttaaacctttagaaaaaacttctggagagaaatcccttttaaacagttacttttgtcattgcctctggtcatttgtctaaataggaatggaaaattaaaagaaaagcaacaatccaatcttttttctaaaaattatgctggggtctcgactaaaactgaatttgaattggaaaattctggtgttggttggagttccatcttgcaagggataatacaaatcctatgatctctatgcccaatatgctgcctcaactctgagctgtctgcaaggcttagtaagtattgagtggtgttttttttttctttttatacaataccatgttaaccacatgagttaaataaatttgagaagttgttttaaaacagtgcttcaaactgagtatctgatgagtctcttatttgatggatggtaacagtgttgcaattatttaagctctgaatgggaagaaggctggttttcagttgatattgttaaaactgcatacccacagtctgagatgaacaagttatttgctgccttcatcgtttttttcagcactggggaaatgttagtttcagccaacctcattttttagttcatctagaagaaaatc

SEQ ID NO: 7941 - DNA, 1136 bp, Homo sapiens
tgtttgccttccaaacctagggtctaacaattccgtagtggttggaaaaggtttatgttactgttttctatatttgccttaggtccagtgtttctatctaaatatcttctaccttactcagtatattaattaagagtctttctaaaatagttgattcctctgtgagggaaatgcagggaaaaaaataagatagttgagacaactgaaaaaggacaaaaggcaactttttggggagactattttctataacaagcatttatcaacctcagtgggatgtagatttattagtaagtcttaaaaattaatatatatttagaccaccaaatatacattgagggtataaagaagtgtcagaaggagacagaagtgtatactttcctctacctttttgatagtatttaagacttagcgtttattctgttcttagctttgatttttatcatctatttatataacccacatgtattgtgcctcctgtgggtcttcctagaaagtcatcttaaaaagtattttcttttccctttctttcagactttatattcagagcaccaatcaaattaagcaagcctggggaacttcgtgaggaatatgaaagcttgagaaaggtatagtattatcatgtcattcattttcttaaagtagattgaaataatgacattaaagaatgcttagtgggagttttgaccaggttttaaaaaatttataatgcagagcctttcttcacactgccttataccagcctagttagatttggagctataatggcagcagagcaaaccttaacccaagattccctttttagttgtcttttcaaagatgaagacgtagttcacagagcctgtcacatgccagctgcagtaactggccaccagagaagtattcttggtacttttaacaggtgcccttgctaataattgcttgtattatttttctttatctcacaagtttcttctaattacatgtagctggtgttatccattattgctcactccattaaatactccaaaagaactgtcttgtaggtcagtaaggagatagtgaaataatttcctagttagaaaacaattaccattgggaaagcttttatctgtgtccatatcatcttatttatgatgttttcaaactaattgtctggg

SEQ ID NO: 7942 - DNA, 1223 bp, Homo sapiens
cctaggcaggcggattgcttgagccctggagttcaagaccagcctgggcaacatagtgagaccccatctctactattataaaattagaacaaaatttctttgtagaccgtgtatcttgacttatcctgtaactgcaggataagagcataaaaatgtaggacattagaactgcgttaagtcactcttttgttgccaaggaggcctcgtccagcttctctggctttctgtggccatctctgctcttcttctagtccaatgcagttacatctggcttatgggaataaggaagattttcaggcttagccctttttggctatgtgactatactttattttttgataatgtgtattatcttagcttttatgatttcatattgcttaagaatgcagagcagttaaatctttagccctgaagagtatgtttggcaagagccaagtaaaagtagatttacttagaaatcaagagggctctatagctgataagaaaaacagtctcaaaactgccatgtgatctgtttgttctaataaactacagagtaaaatatgtttttaagtttagagttgcctaaaactactgtgtttgcataatttatatttttagctgagagaagaaaagttacaagaggaaaaaccctctgaagatcaaatccacaagctgttaccagaggatacagaaacagggaaaaggaaaatggatgaacagaaaaaaagagatgaaccattagtactgaaaacaaatctggaacgtgtaagtaaatcacctttttaatggatacctgcctcaaaaatcagtggttagcccaggtgacctggacctgaaagacctatgttggtaaattgtgagaccagtaacagtcagtgactgtgcagcttaagagtagtgaagaacttacgtccaggccagagcttgagaaaataatttttgaatgggatattaagacttgtgggaagattaaggaacagtgggaaaagcaggtgagtgagaggaaaaacctagtatagtttactacttgtgattagatttatatgtatgttgttatttggacttatgtgttatttgacatttaagatttgtacattgtcttctgtcctcaactagattttcttaaagcatgtattttactttcctttatttgttgtaataccctaagcagcacagtgtagatataaggtaggtttagatacttagtctatattcaattagacttctaattgggccaaatc

SEQ ID NO: 7943 - DNA, 1105 bp, Homo sapiens
taacatctcttcagaagctgcttttagcttaagccccaagaagtgaggtgggttgtggatcactgacatggtcaggggaggcccacacctcaattcagtaaccacctaatctctcccccaacctgatctctcatcagagctggcagcaacttgggattcctttcctttttcctgcctaacttttcattgaaatgtctagtaggagagtgagaaaagagaacaaaggctgggtcacagtcatagaatgttacagctggaatgggcatggaaatcatccaagttaaacttcttctctgccccccgcccccacttttttttttttttttttttaaccaaacgaacttgtgatccagtgccctattttatagtgtggttttccagggtctgaataaataatcattaaagtttgacacacgcagacacacgcaccaatgatggggatacccccaaatgatttaggaggttattttattttaatagttttttcttcctgatttttttcagttagttagagttaaatgtacctatagcccctgaatacatgctcaggtagagaaagtctccatagtataagtaagtaatatgaatgtggaatcttggaaagtgatatattttgattggaataattttaattaaatttaatgattttaattaagaattaaaagccagctagccaaattttctttaaaaattggaaactcattatggtcttaaattgtcctcaggcagccttttcctcatcaacccatagagtggtcttttgaactggtatctaaacatacctggttatgaattctcaaaagagaaagcaggtctggggcggggtggtcaggagacagattctagggaaagtgctgaagagattttcttctgaagatgatctaggaaatgcatctttatacatgattgttagctgctgtagctttctgaagaagattgtagaaaagagactaagatatatgcaagggtcaccagtttagagatcagtcaaattggaaaaagtgccaagactggatgtgcagattgttctatgtattatcagtatttttttcctcttaagaaaaaaatttactctctctcctttgtgagtaaatgcctccttaat

SEQ ID NO: 7944 - DNA, 1099 bp, Homo sapiens
aaaatgggtaaagtaagaaatgttaaaaagtccctgttttgtcctgaaattttagtctattctgggtaaataggattttctgacacagatatgagaagttgtagctctgatgtctagctgtagtctccttgatctgctgattgcattattttaatttgcttttctgggaaagcagttttgctaaaagctgtacagactttttcttttgtacctagcagtactttatatagtatagctttgggccatgtagcattttaagactcaattttaaaaaattattaatctgttgctgactcttaattcctatttcaatatgtgtttccttgaagaattcaggatacaacttcttgtgtatgacagctttccttcacacactatttttgtgggtgtgtatatatctgatttgggaagaatttaaaaaacacatagctttttaatttgtttgaaacagactttctgcctgttacatttttgcttttaaccaattaaagaagccaatggcattttagttttatattgtgttttccactagtatatccctgttgatttgtttgtgccttttattaactgccattttctaaaatttttttcaataaaaggaaggaagatgtgaaaaaaatggagtcatagttttgatggagagaacagagaaacaagtgttaacatctttctactataggtttttttcatttttaggctattttacttgtcaaaggcccctgagaacctgtagctaaggaactcttagctttccagtgataataacaataataacaacattctgtacttactttgtgccagaaatgctccaagtactttacatgtgttaataatgctcacagcaatcctaagaggcaggtgctgttattatccccattttacacatgaggaaactgagatacaaaagttaaataattgtcacacagctagtgatagaactgggattcaaacctggggagtccggcttcagagtttgtggtcctgcagagacaaaacagccgcttttccagtattttcccagtatggtcagagaagacctgggtgcttgccaagatcctttgacctttaggaatatttccctacagccttacaaaacatc

SEQ ID NO: 7945 - DNA, 1339 bp, Homo sapiens
caaagatgcacccaccattcagcagagctctccaggcagttcactgaggctggaggaggaagctggaacaccgtcagaatcatggctcttgtactcacacccaaccagtaggaaacagagggttgacctaggtatctatctcaaccagacccccttggaggctgcctgctggtcccgcccctggatcttgcactgtgggccctgtggctactctgatctggctgctctggaggaggagggcttgtttgggtgtttgtttgaatgtgggaccaagcaagagtgtgagcagattgccttccgcctgtttacacaccgggagatcctgagtcacctgcagggggactgcaccagccctggtaggaacccaagccaattcaaaagcaattaattggcttaggacccaatttccatagatgcaaatggcagttacagacaggttaacagaagctactgaagtctacagataatcaaaaaacttaatattctgttccctaccttttttcacttttcctcctccaaagagcaaaatgaaaattttgccttagctactgcagtggaaagagcactgaactaggagttggaagacaaggatgtggtcctggctctgccactggcttgcttttggaccttggatgtgtcacctgaactctctggacctcaggtttccatctgtaaaatgagagtattggttctaagatttctcatcttctcatccctaggacaagcatagtgcctgcatgcttcatgatcagtaagtcctggctgcataaaggactctgatgtcaaaatggaaaccaggggacttaccttttcacatgacttacccctcatccgagtgtgaggttacaagcaggtgtcatggcaggaaggaagaccagatctgtatgatttgttccatttttaataacaaaaatatccacacccttttaataatgctcagttctgtaggctctctatcctagaggaattgagcaaaacagaagaatcatgaagtctcctaccttctacagccttgtagttctgcttaccttctcttcctcatccagaaagcatcattttctagggagaacaatgagaatctcaatgccagtagtactggataatagtgcgtattgcttctggtggcattaccctgatgatgggctgaagttcatttattagggtggttcctgatgggaaaaggacatggattaggactttaaaacactggacagaatttcccacagtctttgccctcaaggagttcaccagtttatggggctagaagagcgagaaaattcaagaaaataaatgtagctggtgggagactttgtagatgttgggctatatgttggggtga

SEQ ID NO: 7946 - DNA, 1119 bp, Homo sapiens
cggatggatggaaatcttggctcacataaaagacagactcagggaggattttatgacaaaagtccctcctttgagggcaggattcccccaggaatcctggacactttagtgagaactggaccagcccttggcacaaaaccctgcctgccctgtcccccactcccaccccccagggaattctaggtgaaaatgtgaagctcagggcacagcaagcgcatgacacgggtgtattacattcggtccgagtgtgtccttagtttccctgtgtgcaaaatggggctagtccaggctcttcccacctcactgggacaattgcaagggtcataggagaggtgggtatgataggtggtcatatgaggtggtgagtatgagaggtgggtgcctcacaaactcggggtatggtcctgacctgcatggcagatgagcagagcacttgggaacgagcataggaagtgccatcttcccgggcatctctgctcagtgttaaggtctagccacagacactgtgggacctgcctcttcctatggaatgggggcctgcatgggttgtgtcctggggcaggagtgagggatggctgggaagaatctccaggtctgtggcccttgtgttgagtgattattttgtgacactctcattcctggaccacctgccaggtttatctgttatacctgtggcattcttattatgtcagacaagttattatagttcattcaactctaacaaatgaacaaaagaacaataaataggaggccattaaaggtcttttgtggcagaggatgctggctgtgctttcatttctgtctcataagcccatggcaggtcaaagaccaagaaatgcctccctgctgccctggactggcagatggggctcatgactgggtgaggtgctctcttcccttgtctgtggccccagctccagcctggtccttgtaccaacttctggagactgccaaaaacttttctcctgtccctcttctgccacttttcagccttatggccttgggaagctggcatacctctcatccctctcagataccacaggattttgtgacccatggtttgctcctggggtgaagccatcctatcttctatctttggcaccactgaccacatcagtg

SEQ ID NO: 7947 - DNA, 3054 bp, Homo sapiens
cagcagtgtattcttgccttaactggtcgtttctgggtacagtccgctggccccaggacctcaacttgaagggttgctgacggttgcttgctccgtctggggaccccgggaggaagctgcctcggatttaacgccttgtcattacatgggatagaactgtgtaaaaatcattagctttaaaaatagacagtttgtcatttcgtatatacacttcgatgtcaaaattaaatccacaacttctcgagagttaggatttgccagctctgttggtaccgtaaagccaaataacatggctgggattctttagacggtgcaggttgtgtctacaagtgagagagcttatatgttaagtctactatctattccttaacagtgacaagtacagtgtctttgctgtgctgaatgaagtgtaaataggccattagagcagtttcttgttttgcatgtggaactgttttaaacccttcgatgaagagatgatgacgagtctgacttggggatgttctctttgcccaggtggcctactctgtgctgcgttctgtggcacagtttaaagagccctggttgaagtaatttcctaaagatgacttagaggcatttgtctgagaagggttgctgcactcctgttggaacaagggtttggaaccattggttggaggtatttagttttggtgagggatgcattgactaataagactagactggctcaggcgaaagtgagcctacaccgatctcctaattttgaactttgctttgtttggattagtttgtcgctgatggcatcttcaaagctgaactgaatgagtttcttactcgggagctggctgaagatggctactctggagttgaggtgcgagttacaccaaccaggacagaaatcattatcttagccaccaggtaaaactcatttgactggccatcacctataattgttataaatgctaagttggtttatttatttatttatttttttgagacggagtcttgctctgtccccaaagctggagtgcagtggcgcgatctcggctcactgcaagctccgcctcccgggttcacgccattctcctgcgtcagcctcccgagtagctgggactataggcgcccgccaccataccttgctaattttttgtgtttttagtagagttggggtttcaccgtgttagccaggacggtctggatctcctgacctcgtgatccgcctgcctcagcctcccaaagtgctgggattacaggcgtgagccaccgcgcccggcaggtttatcctttatgaacttaaggggacagacggaacagtgaatctgggcttagtgaatgtaattgcttcttaaaagctagattttaaggccaggcgtaggatcacttaagctcaggaattcaagatcagccggggcaacatggggaaacccccgctctacaaaaaataaaaaagggtgtggtggtgcatgcatgtggtcccacctattccagaggctgaagcaggcgatggcttgagctcaagaggttcaggctgcagtgagccattggtgtgatccagcctgggtgacagagtgagaccctgtctcaaaaaaaaaagctgcgttttaaaaattttagtttttgtcaatgaaaattatatgctttgtggcagagattttgctaccacacatatatgcaagatttaaagttacatctagcatttgtgagaatcttgaattgtcacttttcccccccagaacacagaatgttcttggtgagaagggccggcggattcgggaactgactgctgtagttcagaagaggtttggctttccagagggcagtgtagaggtgagtgattctggcatatgccagaggtaatggctcttcagaatgatacttctaaaaactctcaacttggagactttaattgtttgttcattacaaatggactggtataactgttgaaattctcttaatgaataatgggcttaactttgtaagcctattctgctaatggctgatggttaaaggattttacattcaacttgggtatagaaatgatgcatatgatggattaactgtccccattggtgtacttggcatggccaaaggagccagggtgggagggcaaggaacctgcattgtgtgtaggtggtagaagtgctttaggaattgagggatactgaaattatatgctgtatatgatggtggtgtccgatcttttggcctccgtaggctacgttggaagaagaaatgtcttgggccacactactactggtagcgcaaaaaatcacgatgttgaatttgtgttgggccacaatcaaagccatctcctgggcagcatgcggcccgtgggttgggcaagcttggtgtagaaagtgatacttgtgtggcaaatgccaaattttcaactttcagttgaaaataatggtgatggtaacaggatatcccttgcttcctttaaagctttatgctgaaaaggtggccactagaggtctgtgtgccattgcccaggcagagtctctgcgttacaaactcctaggagggcttgctgtgcggaggtaagtgtcctgagacctaatggtcatgaccttttgtgtgtatcaacatacatgtctgccatttgttaatttagcagatgaactgttacaaagttacaggatctgctagtctcccagggttataataagatactaagtcatgccctcactgaactggcaggctaacaagactactaaagcagcaagaactgtaaagggtggtcagtcctgtaatggagaagtgttctgggtgctttgggagttaaacacaaatagaactgtccaaggaggggaccaactcctgttggtcttcttgagaaggctttacaaagagccctgttgcggggggcggggcagtgggcaatgaggaataattaggcctgttactgggtgtgttacgtatccctaggtagaagtgccttagtactagttaggataccatgaaactttagtagcaatcattcaaatctgcttagtgtgttcactcttaagatggtattgtgaagagataagatagacctgatgcaaaatagcttaaaatctagacacttaacct

SEQ ID NO: 7948 - DNA, 3054 bp, Homo sapiens; identical to SEQ ID NO: 7947

SEQ ID NO: 7949 - DNA, 1954 bp, Homo sapiens
gaaagggcctggaggtggctagctctccagttagtatctcgcagagcgtaaactgccgaatgagttggggggtaggtcatattttaaagtgttttatcagcgttctaatagcaagatagccaggatcctaggtgggtaagctttcctagtgaatgagacttcggaggttgcagagtatttcaagggaccacaaagtgggtaattgtggagtgtaaatgtggttctcagttttggttatacatgagaatcacccagggagcatttttaaatagatattcctggactttgcacatttaattggcctagagtagggcctagatgtcagggtttcttttgttttttattttagccttctgaggtgattccagtatgcagccagggttggaaagtacatatttaggagcttgacatacttgatgaatattaccctaaggttcggaatgataggtgtggaagagaattggtattcttggggccggactctggtcaaattattctccattaaaggaacattgaaaaccaagtctttgttttgttttttaaacttggtggaggtccttggcaataacacagtggctctcttctgttcttttaaagggcctgctatggtgtgctgcggttcatcatggagagtggggccaaaggctgcgaggttgtggtgtctgggaaactccgaggacagagggctaaatccatgaagtttgtggatggcctgatgatccacagcggagaccctgttaactactacgttgacactgctgtgcgccacgtgttgctcagacagggtgagcagctgagagtgcttggcaaagggcatttgtggacagatttggttttccacagacatcttaagtatttgggggagtttatcatggaagtagctgggcatgttcatattccttggtgtatcgattgccacgttgatctgtaagaatcgatttgctgagatctgtcagatccaagagttggtttgtccttgttttagccatctgtgtacccttcagtgatgacacgatgacgagtcagaaaggtcacgtcctgctcttggtccttgtcagtgccatgttctgtggtgctgtgcacgagttcctttggcagaagtgtcctatttattgatcgatttagaggcatttgtctgagaagggtccagacccaggggtgcttgagtaaactgcttgctctctttggtcttgtgtgatgggggcctttgagaccccagctgtgtgctaacaactgtggtgtcctctaggtgtgctgggcatcaaggtgaagatcatgctgccctgggacccaactggtaagattggccctaagaagcccctgcctgaccacgtgagcattgtggaacccaaagatgagatactgcccaccacccccatctcagaacagaagggtgggaagccagagccgcctgccatgccccagccagtccccacagcataacaggtatgtctgcaagggcaggggcctcttggggcataatagggtccttccgagtctttctgttaatacttgtatcccacattctggtaagcgtttggtgaataaaaatttcatttatttgctttatgtgggagaatacaagttgaaacctggggtctatttaacccttggttccaatgggacaggtgttgcctttattctttccagaaagaagttcctgcttttactcgtgtatatgaaatagttttcccttatcctcccttatttgctcaaaatttttggctcagtgcaacctctgcctcccatgttcaagcaattctcctgtctcagcctcccgagtagctgggattataggcacctgccaccaagcccagctaatttttgtgtttttagtagagacggggtttcaccttgttggccaggctggtctcagactcctgacctcaggtgagccactgtgcttggctgctcaagattttctaggcacttttgctattctgtcctttagcag

SEQ ID NO: 7950 - DNA, 1954 bp, Homo sapiens; identical to SEQ ID NO: 7949

SEQ ID NO: 7951 - DNA, 1318 bp, Homo sapiens
gggggtggccatagaggtggctgacctgagggcggaattaattctctatcatatgggagcagcaggcactgactgtagggaaccgcatcctcagatggcatgtcctggggccaagaccccttcccaaagctgggaacatagactctgtgggctgggtgctctatagctgggccctgaagaatggagcaaagacctgtggcaaggataaatcaaggtctgcagccgggggtggctgtgggctgtgattgtgtttgggggcggccatgtgtctctgaccctgtgttttgccccaactacagcacactgggatgagaaattccaccacaagatggtggacaaccgtggcttcatggtgactcggtcctataccgtgggtgtcatgatgatgcaccggacaggtaggtgctgtgaggagcagggtgtcaaggtgggtgggggtccaagggtagttggtctgacccacccctgcacacagggtgcccagtgtcctttccgctcctctcccaggcctctacaactactacgacgacgagaaggaaaagctgcaaatcgtggagatgcccctggcccacaagctctccagcctcatcatcctcatgccccatcacgtggagcctctcgagcgccttgaaaagctgctaaccaaagagcagctgaagatctggatggggaagatgcagaagaaggctgttgccatctccttgcccaagggtgtggtggaggtgacccatgacctgcaggtaaggggtggcccagcctaggggcctgcaggccttggagccagggggaggtgcttgggggacccactcaccaattcagcaggtctgtcccaagaccccctggatgtccaggcagtgctgggctctgtgatgggggaagctggggcaggaggtgtgggccatgcccttgggaagatgatgataataccagcagctaaatataacggaacattcctgtatgctaggcgttcttctaagcactttatatgtattattattattttttttttgagatggagtctcactctgttgcccaggctggagtgcaatggtgccatctcgactcactgcaacctccacttcctgggttcaagcgattctcctgcctcagcctcccgagtagctgggattacaggcatgtgccaccacccccagctaatttttgtatttttaatagagacgggatttcaccatgttggccaggctggtctcaaactcctgacatcaagtgatcctcctgcctcagcctcccaaagtgctgggattacaggtgtgagccaccgtgcccagcctttatacgtattaaactcttttaatcc

SEQ ID NO: 7952 - DNA, 1116 bp, Homo sapiens
tctaaagtgctcattgaatgaaaaatgagtgagtgaatgaatgatgagattcactgtctgcctccacattcaccatggtgcttccacaaggctcttctctgactattaactgtctctgctcccatgaaaggggcagttttgtgagaggtcacagcaactgcagaccagagagcagtcaatggctggttttatactggctggcctctgttcaggcctgcatacctctgtactttagatagccactttttctaaacagtcttgattgcataaaatcatgggcccttggttacagggtaatctaagaggttggccaatctcactccctgctcagttcagggctcctaactctagggtgacaggaccctccccaccaccacacatttcacaggcatgtctaattccaagcaaggattataaccaacaggcctggttctaaatccaagctctactatttactagctgtgtgaccttaactgagtctcttaatttctttaagcctccaatagataacaataatacaaatatcgatcactcttcgaatatatttggttcccaattcaggaagcaagaatttggccagcaagggataattttatttatttcgacctgtttgttttcagagttcaggatagcaggtggcaagagctctgaaagcaagggatacctgattcccaggcctgcggtgagggccccatggggaggcatgcaaaagtcctctgcaaactggagtgtgcaatgccctcgccaatagctcatgttatgggtagttttgctgaccacagcttcccagttaattactgcccctggtccctaacagtatggcagctggagctacacaaggtgaatccactcctgccacacaatggcctgagattaacgccatctagtgttggctcttgctgcctcttcccgtcccccagcctttcatctggcccctgctctctaagcacaccctataaatcagctggtgcagatccatctctgcaattccacattcatttggagtgatcccctctggatgcaggaaaccaattttgattaattgctcaagatccgatcctttgctttagatgggggttgggggaagacaatgatgatttgcaagttcccaggagc

SEQ ID NO: 7953 - DNA, 2676 bp, Homo sapiens
ttgaactttaggtacatgtgttcttttcaaaaattcagagaatcgtcatgtgccacagaagctcagcctgggcttcagcaattgacaaaatttgaagaaatattaaacaaaaataacaaaaaaagaaacaaccttggccttaatgtcaataaaagggagttgtgtctgttaagtggtcttttcatagaatcgtccattagaaatgtgtgcctgtgtttagcttcctatcagtgggctttaaattgtataccgagtcatagatacgccactgataactaaaactagatcagggctggtgaagaaggttaggtgttttaggtacattccagctgtcataggaagatcacagaaatgaggaggctgttttcctctgattctcctcggccgaccacctgtccaatgctgctggtttcgcagagcgaccggttggagatgtctgaggaagaaagttcaaggtgtagggatagtgtgtttggaatttgactttccatttctgagacccaagggggcgtagatgtagtggcaagtgtggcgatgtttactctcccttcctgaaccgctctggtctgctcctcagagagggcagcggtgccaggcctcaggtcagggagaatgtctgtgacttagctgcagactaggagactgccctgctaactaattagcaagcagctttgacctcattaatatataaaagcagctctcagtatattccgtgtcgtgtgtgtgtgtggccaaagcccccaagggtggcaagtgccaccttcgctgtgctagagttgtgttgtaggaattagtcagggagttgttgtgaaaaaaaaaaccccagtgcttgtgagggaactcaaaatagttaccagaaaaataatatttgccaatatgacgtgtatattgctcagcacactctgtatctcctgtccttaaaatcctcttgtccccggcattctgacacactgggctgccgtccggtgtcaagccccggcgcaggcttgctcttcttttacaatgaaaggggtgaagagtgagggtctcacagttccttacctcaaagtccctttaggtccttctggtttggaggaagtggagcctccacgaactctctcttactccgaccattcaggcagcaaagtctctgcttacatcattttggttgtcaccttggggctgagtgagaagtcttttgtaaattaattcggcgtgtgctacatgagccataattattaacagaacaggaatatcagaaacgaagttgttgatcaggcccactgcgaccttcctttctatctcagggtttaaaactgtgaggaaggagaagtatgaaggaaggtagaaaatgctggtgggtctccgtgtttatgagtcacagattttgaaagctatcaggaaatgactagagtggatcctggcactgattccaactctttgccagctaatcttaacatttagcagaaagctctagcaacatgatcttaattgtatccagaggatttgccaatgtatgttcagtctctcaagatttggcattagtcagacatgttgatgctagccacaatttggatttctccatagaataatcatttatttttgcagatcaaataaatcagagtttacaatgcacaggggatcatttatttagcattcccttgctagaagcccgtgtgccaggcactgtgctaggcgtggtgggcagtataaagaaatctgtctccacagccacacaaccagagggtgcacatgacttgatccctatgaccaagtcaagttggtgttgcccaaatcgcagtttgacataagggtcccacaggcttccccaccccccgcccccactcactgccccagggaccaacttcctaccctcacccaaggctttagaggacctgtagcatgtctttttcaacctgtcagtatccccttctgcttaacacacccactgagaaaaccctgtttgtagttcactttgactcttgaatgtgtcactttactggcaagagacttcctttgatttctactgtttacaaataaaactcagccagtctcattctatatcccaaacgtactgaatgaaactgattttggttccacaagcagtgtttgggtgttgccttcctgaaggtgaccaagcttccaaagctcgtcccactggcctctgtacatttccctgtggttctccgtccttccctggcgagggagctgggactgaagctttcccgctgtttccctgcctgcaaaagcagccccaagagctgcgcattggcttccctcagcaatctgtcctgtctgtgctcccattcggtccacatagctttctttgcctctctgaggcagacaggaagtgtctaattacgattttgtggcctgggttttgttgcataccacagattgtctatgtaacatgtagcgcacacctctcttggtgctatttcattcctgctgtaagagaatgacaaaaatattcatgtatagccaattgattgtgacgtgcttgtggtctgtgcttgctcagaaaaacaaacaaacaaacagtttttccaattataaataaatgctaaagacgaacaccactttcttgatcttatttccttggtgaggcccacctgagtaggtgaaggaatgaaccttttgcatttgagccattctctgcaagatgagctgtgccctgcagtcttcctggggctctcc

SEQ ID NO: 7954 - DNA, 1159 bp, Homo sapiens
gcctccttgggtgatcctactcagtttatgatttcaagttggcaggacttgctttgtttatggatgagtggcctgtcagtcaaggaatgaccacatcctttgaatataacgcactccagatttggggttgtaccttgttccatatagcctttttcctcaaaacaacagcttagctgtgcagtaagcatgtcgtgcttcacatgccatgcttcacattacacacatactggaaatgactggatttggtgggggaaggctatgccctcggagctggtgagaatgattatttttagcacctatcaattctattaacctgtcaaaaaaatctttgaacacctcaaaaaaatttttaaatttaggtcttttgtaaaatttaattatacctatggctttcgggccaggagtactattttgctatataatcaaaagggttttgaaatattaagggaatgattattgctaagaaacatcaatttcttcaatgaacaatttaagtgcatgacaaatttgatgtgaaatttaacgggttttttttttgttccagaataaaaattaacaaataattgagaaattcactttgattgaaagtagatataaagaaataagctattcaatacattaaatacactgtaaagaaaaaatggttggcaattataagcttatctagaacattgattttccttccctattgtctcacattcttttccttgctatgtttctaggatatcttctgaatttaagtaagtaccatgtccactgacataagatgggccttatgttgccttagaaggcttagaagccaagctgtgctccacttcaatgataatttgatttacaaacccttttcttctgccattctacataaattatggtgtattcacaccatggtgactggttcgtctcatggactttacaaatgacacctgccacatgacatcaatgtgaacagtctgcttaaacagaaagggacacacagtccatcatgtaaaatatacattcaaaattcagaatcatatacatgctcattgttttactttacaatttacagtcataaataacattagataccctttgacattatggttttgagaaaccttccctattcaatagctcatctaattcccaatccattcatatcagcctgagatttttgcattca

SEQ ID NO: 7955 - DNA, 1226 bp, Homo sapiens
cgaacccaccgggaggaacgaacaactccagacgcgccaccttaagagctgtaacactcactgcggaggtcccagcttcacacctgagccagcgagaccacgaaccccaccagaaggaagaaactcccaacacatccgaacatcagaaggaacaaactccggacacaccgccattaagaactgtaacactcaccgcgagggtccgcagcttcattcttgaagttagtgagaccaagaacccaccaattccggactcaaaattatattcagtatgtttagtttcacatattgagaattataacatcttggagttggaggagatactatacctcattgagtccagtggatcatccagtatttgattcctcctgtgttagtctctcaagctactgtaaattaccagaaacttgatgagataaacagcagaaatttgcctcacacagttctggaggccagaagtccaaaatcaaagtgtcatcagggccacactcctttctttatcctttccagcttctggtggctccaggcattgcccggcttgtggctgcataactaagctctgcctccatctgcacacaacctcttttccctttgtctcacctctgtgtttccttattacgatacttactagattgagggcccacctgaataataaaaaatgatctcaactcaagatccttaactattttagatcttttcatcaaataagttaacttaggtcccaaggattagaatatggacatatctttttggaggccgccgtgtaacccgctacatccactgaatacatgtgcattgtttgtgtttgtcgcccttctctacttggctgcctgtaaccaagatctttaggattttgaataactctgtagtgaaatcaatctcctgtaacgcatataccattcactttggttctccctgcttgaagccatgcagaaaaaaacgaattctttttctctctgaaagtccttcatttgttgtccctgagactgctatcctccaggacaaacacctctggttccttcaacaatttctctcaatactgacttctgttcccctaatcatcctgggtttgcttctctaaagcattcagaggcagtagagagaatactggatttattattgaagacctaatactgaagccatgtctcttccacttcctacttaggtgaccaagccaaatcagtttattttaaataacaataatactgactacttcattgtttcac

SEQ ID NO: 7956 - DNA, 1203 bp, Homo sapiens
ttgaagacctacctgttcttccagaagagaacgttgaaagtgccatgtttccttttgcgtgatctctgttgatggcactctggaattgtttcagttaagtcattttagacatagcatttattatcactgtggatctctacttgttgggtgttatgaattctttgaagaaatatattttgaagaggtgtgggaggaaggaatacattttataaaatgttgtagtgaagcccacaattgacctttgactaataggagttttaagtatgttaaaaatctatactggacagttacaagaaattaccggagaaaagcttgtgagctcaccaaacaaggatttcagtgtagattttgtctttcttgaacttaaagaaacaaatgacaaagtttgaatggaaaagcctgctgttgttccacatctcgttgctgtttacattcctttgtggagcctacatcttcctaagctttttagcaggtatatgttgaacacttctgtttcatggttgagacagaatcagaggccatggatactgacaactgatttgtctgttttttttctctgtctttttccatgactcttatatactgcctcatcttgatttataagcaaaacctggaaaacctacaaaataagtgttgtggtttatctagaaaaatatggaaaatattgctgttatttttggtgaagaaaatcaattttgtatagtttatttcaatctaaataaaatgtgaattttgtttaaagcttaggcacattattttttgtggggtcaaaacattcttgtgtaaattctcttaaacatttgataaacagcttcacaattcaaggtgagtcttttgtatgtggtttactacttgggttacagaaaaaaaacaattaagaaagtgttaaatgtaagattcacccaactaggtttttttttttttttaaatgtactgtgtgggccctgatgtaaattgtcagagtttgtcttattgttgctggctaaaatgaatgcagaggtgttaatgaattattttatgttgggagtaagtgttacttgagcttcagaaaccagagtggtgtgtatttgctgaactgctgagaatgatagcccacagtccatttctctgtcctaggaaagcccacagatgtgtcaaatcaggacacattatgcatgcggcttatcaaaaagataacaagagtttatcttatagccagggctc

SEQ ID NO: 7957 - DNA, 1177 bp, Homo sapiens
attctttaaaagttgttgaagacattgtaacattcctttggagatatcttgaatttttaatagctcaaattaaactggtcactgtgttgtgctattctgggtagatgtgtcctagagcaaatcatgttatgtactgcttattcaccctttgtttttaggttgatgaactcaagaccacagggaataccttgaagaagggtataggaaataccttaaggagagtgtacaagataaaaattcagttgtttggcttagagataaaaaggagatgatttttgtgttattgtatgtaagtccttcttactaggctgctgagtatggttatgcaagttgtgcactaaacagccatacatagcaatctgcttttttcttttcaattcactgtctacttagtcactgccagtgtggcaccccagaggtctggttcattattcctgtggacaactctggttttggtacttgtttgtaataaaagttaacttttcccctgacttttttatgcagtaaaggaaaaattggaatctaaaccaagacaacccactattgacctgagtcaaatggcagtgcctattcagatgacccaggaaaagagacattctcctgagagtccatcaattgctgtggtagagtcagaactagtagctgaatacatcactactggtaggtgtcctcttaaaatgtagtattaaggtaggagaactaccttcctggatttcatgggatgattgtgtgggggagaatatattctttatatttttagctttttcctctttgttttcagagcaaattcacaccatccttgggatttaccctgtctttaatgactaggaaaaaaaataggatgttatgaagtttgtaggtaatataaaactacaagtcagccataaataacaactgtgaatatacagcaacagttgtagggagaggataaaatatcttttgtctaagaatgagttttgtttgttttttgtttgtttgtttgttttgagacagggtctcacgcccatcgctcaggctggagtgcagtggcgcgatcatgattcactgcagcctcaacttcctgggctcaggtgatcctcctgcctcagcctcctgagtagctgggactacaggtgtgtgccactatgcctggttaattttttgtatttttagtagagatgggatttcgccatgttgc

SEQ ID NO: 7958 - DNA, 1098 bp, Homo sapiens
gttagaagaggcaccataaaggagtggaaagattgctttcagttgtacaagatttggatttgaatcttggcattaaccctgaccaactgtgtgactttggttaagtcatctaccctctcagtttcctcatttgtaaatgggaataataattttcttatagtgttgtcacagggatttagcagaatatgatgggatttagtagaatgtgatgtgtgaaagcaccttgcacagtgcctggcatgtagtagttgtccagttgtccaaaaaatgtcagttttcttttttttttttttcttgatattgttggggaagttattctgctaccttttcttaccataaagattctcctgtgtcttctcttccaggctattcctcagtatgctattccttgtcactccagctccaatgtggtggtggagcccagtgggcttcttgagctaaacaacttcactagtcaacagctggatgatgaggagacagcaatggagcaggacatagacagtagcacggaggatggaactgaacccagcccttctcagagctctgctgaacggtcctagtgtttggacacaatagtgcactttaaaacctgcttggttaccaagtgtccagggaaacccttgtattttgatgactaaaaagagcactttgcccgtacttaggctgtggaccctaaaacagcagtgtttcaacaagatgttgctgcaggagcagctttttaaaacaagataaaactcacaggggaatgtacttttttaaaaaaaaatgaaaaagaaaaaaaaagctgcacatttacagtgacttaagacctggtcttctttctctgttggatcatggccggtgaaacagttttgtcttgcagtggaaagagacttcctgtgaatgtttctcaactggtttctactgagcaaaataccatctaaaaggagaatgtgaatagttgtattttgaaatgatgtgtcaggaaaagttttttaaaaacttgtatgtttttgcaaatccctggaagtgttgaattggttaaaattttacattttctcagttcataattagtttataaacacctagaataatactggcattaaagaatccttgttg

SEQ ID NO: 7959 - DNA, 1230 bp, Homo sapiens
acaggtggtcagcatggtggaccagcagacgcaaggtcttgagggtggtgaattggaagtgaacttgaggctgggaaggcagggaccaaatcaccaaggccttgaatgtcaggccgagaagggggatttgagcctgtaggcaatggagagctcctggaggatttaaacaggcacagcagggtgcggttggtaattctatgaaacccgtctctggcttgtgggtggtgctggaggccgagagaccaatctggagggcgagtgatccagcctcttagagtcaaagggacccagattttactcccaccccattgcttcctacctctgtggcctgggacaagtaacttatttaaaatgtgaggatactaattcttgctccactgatttggtgtattaaataagataatgaattacatgtgcaaataaataaaaagtggtttgtagtgtgtattacattgtgcagacattcattggattgcactgacaatagaaggcagagacagcattgactctggtcctaaacctgatctcaccagcgggcagagccctaagcatcctgcagggttgcaccaattgttatgttccccacaaagcagaagggagctttctgtccatgacatttcattcatctgatttatcaccttcatgtggccaggctcgtgcaggcaaggaggtagacacagattcgtagatggccacagaagtgggccagtaccttgtcgggggcagcccaagggccatgggcgctcacaggatgggtggcctttcctggatgagcggcaggttagactgggaaagcctcacagaggaggtggctttttgaatgaaatgtgtgagagtttgctggtagacaaagaagggtatctttgcatcagagggaacaacgtgtgcaaaaaggcaggtggctctagaagagtcacaggcctctagactagaaagctgtctctgtgggatgggttttaaagagggagctgtagtagggtcccagacttctgttgggaagtgcgttctggtgccagcatggctggcagttggagtcaggccaggagcgaggctgttgcagcaggtctcttgagcctgacctggacagggggaggtgactgcccagcttagggatgagggaaagggaagacagtgaccccaactgcccagggggatctgcgaatttgatgctgagccctcattctgtcacaggcaacacagcagcttttgcctgctttggtctctgagacc

SEQ ID NO: 7960 - DNA, 1204 bp, Homo sapiens
catggacagtgaggccagggccatctgccttctctctgcttcattgtgggagagagagactgagaaagaccaagagagacacagagacagagattgaaaaacccagcatccacttcctccagagtcagggagacagagatgatggggcgtctccacggggagtccagcaagccggcattcactgctccctggccttggtgccctttgccggagcctgtgtctgggctgctggtcccataacacgtcgacaaccctcaggatatggggcagggttgctgcaggggtggatttgggcagtggagagtggctggcaccctggaggctgtgtaggcccagctgtggctcttctgggcctgacttcagggtggagaagtgaagggggaggttacacagagatctgtctctacgcacacatatccatgagacagagtgtgctgtattcatatggatgtattctagaggtctattcctaccctaggaacaagtgcagttttagattatctgttcatcattgctgctggttcaaggatggctcttaacaggggcctggtccggatgaccttggcctgggggcttgctgagctaggagactgcagttcagatagtgaaacagggagtggattagtaaagggggttccctttgccttgagggaagttggagctggagagagtggattctccagggcctcaggtatcccctgctggggagtcaggctctttagagcttgcaggtcagggaaggcaagtgcttcgtcctgacatagcatctgttggcatttcttgggcttcttcaatgcagctgaggggggcagggcgaaggcgtggtgggcagttacgacggctgatagtcccaagtgggctgcaggcggcagtggtgtgacggcagaatggtaacctctggggtcattggatgcaactcactcaccaaacagatggggaaactgaggcacaattttcatcagattcagttctgactcttagcctcattccccttcgcattgcgcagtcccagagagcccccccttttgggggagtgcctgacctgcacctaacatcagccaagtacagctaagccactgtccccagcaccctgacttaaggccagccctgtgttttgtcctcagccagtcagggatgtgtccaagacatttcccctcatgaagcaaagctgtcaaggaacttgcggctctggaacagatgcact

SEQ ID NO: 7961 - DNA, 1140 bp, Homo sapiens
cattttaaccatatggaaacatacaattcagtggcattcattatgatcacagtgctatgggccatcaccactatctatccccagaaccttctcatcattcccagcaggaggtctatacccatccgacagtaactccttcccctccccctgaccattgttggcactttggaaaagagttgcttttttttttttggacagctgattttttaagattgagccactaaggcttaggggaatttaagccttatatgttggcccgagtgttaagaactgggttccagtgttggctccgccgtggcctgctgcgtgactgtaacaggttgtttgacccctctgagtttcaaaaacctcccctatgaggtaaaggatgcagcctggctggggagcatgagctgggaagtctttccacattgcttcccagactggcaggctgttaccaggccctggatggaggcaacacagcagacgcactggtggacttcacgggtggtgtttctgagcccatcgacctgaccgagggtgactttgccaacgatgagactaagaggaaccagctctttgagcgcatgttaaaggtgcacagccggggcggcctcatcagtgcctccatcaaggtgagaacacggcagtccccagaggcgacccctccccttcaccctcgctgactgagatgggagacaactgtgacatcccacgctcaggtcagctcctacgtattcagaccctcagcctcgtgggggaggggagaagttggaaggtgcaaccccctgcccagaccctctaggctgtgaaaagcctttcccgcactgttcaaccaaaacttcttttctgatcctcttgggttatgaacgtctgtgcatctgagggtggtcctgatttcattacttgctcgtgttttggatgagaaagctgaggcccagtgaaagccaagttcaaacccaactttagcagaccctgtgctgtgctggtaaactgcctccagcaaagtaaaaagccccggtttgtagcatttgctaattactgtggtgtaaatactcccaccatggctgatttccaactacccacatttaacaaccagctattaacaatattcctggccgggcatggtggcacatgcctgtaatcccagctactcgggag

SEQ ID NO: 7962 - DNA, 1221 bp, Homo sapiens
caaatgaaaaagtgcagttaattcaagaacaggaatccctgtgtccttgctgggatttccttttgggaacctgactttccgactccagatcctgctgtctggatcagtgttctggctggaggtgctggattctctgattttgcctcctcactctgtgtctggctttgctcctgggtcttggccctgggccatatgaggggccaggaaatgaacgacaaggaggataagagtgttctttcttgaaagccgggacttcccctcaagaacctgggcctggggccgggactctgcatgactgggagcaagtcacttaaacctcctgtgcctcgatttcccccttctacaaagtggggccaatgattcttgtgtgtcagcactgttactaccgagtgctgagtaagggcaaaataatacccctttctctatgtatctctgtatgcacacgcactatatatatatatatatatatatatacattcatgtaatcaccacttctcgatgtctatttcaaatcaaggctcctgagtagggggtgaagtgagccagcttgcacctcaggctaacacataggactttgctcagccatgtcccctgggatacaggggcacaccaggaccaagtggcagacctgtgggcttcagcctcggggccggggcatgcctgccaccccctgacaaaaacaggttccacagtgctacccttgcttcctgccccttgaggtgggccaggctggctcctggctatgcagggatctctggtccccaggagaccttgggggccaggcaggtaaggatcaggggtgataggggagagcaattactttgttcactgtatgcacccgcgggggcctgggagtccccatttgcaggtgggtagggcctccagcccacaccacccagacctaggcttccctcttctcaggatccaccacagggttaggggacaggaagcctgttctattctcaataaatcttacaaaattccaaaaagactttcctgtgtccctctgtccccctggggggaagggacaatggaggaatattccccaggcctgggcgactgtccgctggtcagagggaaggccccgctgcctgcccggtgcacctgtgagctgagattgtggggatcattcagtcattcctttattcagtagatctgtacggggctggctttgtgccaaggcctgccccgggcacctgggatgtggggaaccaggcatag

SEQ ID NO: 7963 - DNA, 1222 bp, Homo sapiens
aatcctcacctccttcataaccatctcccacaattaattcttgactatataaatttatggtttgataatattatcaatttgtaatcaattgagatttctttagtgcttgcttttctgtgactcaactgcccagacacctcattgtacttgaaaactggaacagcttgggaatgccatggggtttgataatctgccagggacatgaagaggctcagcttcctggaccatgactttggctcagctgatcctgacatgggagaacaaccacatttttctttgtgtgtgcttctagcagctgttcgggaggaccttgacccaatagtgttcccatgctgtttcttgtgaaatgctctcggctatgtagcagcttttgattccctgcataccctaggctgctgcccctatcctgtcccttgtttataacattgagaggttttctagggcacatactgagtgagagcagtgttgagaagtcggggaaaatggtgactacttttagagcaaggctgggcatcagcacctgtccagctctacttgtgtgatgtttcaggaactcagcccctttttctgcctaggataaggagctgaaagattaacttggatcttctaatggtccaaatcttttggtcacaataaagagtctccaaattagagactgcatgttagttctggatggatttggtggcctgacatgataccctgccagctgtgaggggaccccgtttttaagatgcatggccaagctctctgcaaatggaaatgcttacactgggtgttggggatgtttgctacctcctgctatttttgtggttttggttctcccactatggtaggacccctggccagcattgtggcttgtcatgtcagccccattgactaccttctcatgctctgaggtactactgcctctgcagcacaaatttctatttctgtcaataaaaggagatgaaaatattctattggagtatgcctttcttttttctcttcgttttttctttccttttctaattttttatatgaaataatgagtagtttcttcctgaaccatttgagagtggtaagttgcagatagaatgcccctttaccactatatacctgaatgtgtattctttctttttaacacttttattttaaatataaattaagagaaatgggccaaaaccatttgtattgtttaaagaataattataaacacacttgtatccaccaaatcaagaaatgg

SEQ ID NO: 7964 - DNA, 1099 bp, Homo sapiens
tttaataaccctagagagtaggtacatcttctttgtatttctgtcttcagcagtagcctatatgtgtgtataaataaatgttcaaaagtatcttcctggaagcctatttggacagtatattatcttcagcagattcttttttttttttttttttccaagacaaggtcttgctcggttgcccaggctggagtacaatggcgtgatctcggttcactgcaacctccacctctgtggttcaagcgattctcctgcctcagcctcctgagtagctgggacaacaggcgcgtgccaccacgcctggctaatttttgtatttttagtagagatagggtttcaccatgttggccaggctggcggcagatatattattgattccattttgttttttctaattgttgtatttaaactttaaagttttctgtttgtttagaacaaggacagggggacatccctacattttacacctatgaagaaggattatcccatctaacagcagaaggccaagccacactggagagattagaaggaatgctttctcagtctgtgagcagccagtataatatggctggggtcaggacagaagattcaataagagattatgaaggtgagtgtccttttgcagtgtgaacagtcagatgagcacttgggcaataagttatggatagtcaatagaagttcttttaataactaagagaaagaattgactctctatagtataggaagcagatacagaattacatagtataggaatgcttatgtcatttgtttttagtgattttttttcctcattaccaaaaaagtctttgttcatagtcaaaaaaatttttttaatgtgcgcaagaaagtagaagtgaaaaagaaacaagtgtaattctaactgagagatatccactattaatttactgttgcatctgtgtattagtttgctagggctattataacaaagtgtcatacaggctgggtggctcaaacaatagaattttattgtctcatagttttggaggctagaagtccacgataggttatctctgagggctgtcaattcaggcatctcttcaggtatacacacacccaccaaagcaagagagagattttaaga

SEQ ID NO: 7965 - DNA, 1173 bp, Homo sapiens
agcagtcataagccaaaatgtaatgagcttagtatataaccactttagagtatacactcaccactttttgtattcattcatgcaaaccctcctggaagtcgattagaagaggatccaatttgtggaccttttttcctccttttggacacctgagcacaattttttttttcctttcatatttataccactttggaaaattcagtaaacccaattctggcacatcataatggtttcagttagtgaagatgtttattttaataactttaaaatatgactatcctatacataagttatataagagggcataacaatagatgagtagaaatttataaaatttcttggatattttgaatgagaaaaaaacatttttaaaggaattttgttttttccttttttggccaaaccggtacaagttagaaagtgtgctaaggactgaatacttgcctcgtgctttttgccactggatgatgtaagttaagaatggaattgttaatcctaagtatatattttcttgactttcatcagtttctaaagaaatctaatttaagtgttttgcggttttgtttgatctgtatttattgagttctggtcatagaccagcagcttgcacgtcatgctcatgaacagccagaacatagttattggggaacttcatggctcaaaaccttctgaatcatttaacttattttgtatgttgcaaaaaaaaaaaaaaagtttattttgcttgagagtcacctttttttaaaaaaaataactgtacagcttttaagggatgggaggtgggaaaataccctaaaataggatgtagattttttacaattgtgtttatgctagatcatctacaggtgcattatgtaattaaacctaaaattgtttaaaaatttgtgccatgtctttttcattctcctgccctttagcagaattggtgcatgtcaactgctatgtggacaagccttgaaattagagtaacaagccctgtctccaaagctttaaggtcactgcatgaaaattgcacacacacacacacacacacacacatctagcttatattagtaaatggattttcaggatcagaacagctacagtagcccagatttggctgttaacagcatattcttacagcacatgatttttgtgatgcctaactagggtattctcaatgttagtctggtg

SEQ ID NO: 7966 - DNA, 1471 bp, Homo sapiens
caaaagttatctagtctttagggttccgttttctaaagctaataagtcagccttcttaatgattgataaatttagaaatataactgaactttgcaaattaaacatcaaatggaatttttaaaaaatgagaatccaccaaaaagggataattttacatagttgatctactgaaaatttcataccatgacatcaccacagtcttaaaacttgtactgttacgtagcaacttccatttctgcaagttgcaaaattaataatataaatatagagacgttctttgccgagagtcgtcggggtttcctgcttcaacagtgcttggacggaacccggtgctcgtcccccaccccagccggccgcccatagccagccctccctcacctcttcacggcaccctcagaccgccccaaggcccctgccgccgccccagcgccacgcagccactgccaccgccgccacctctccttagtcgccgccatgaggaccacgtccacctcacaggtgcgccagaactaccaccaggactcagaggccgccatcaaccgccagatcaacctagagctctgtgcctcctacgtttacctgtccatgtcttactgctttgaccgtgatgatgtggctttgaagaactttgccaaatactttcttcaccaatctcatgaggagagggagcatgctgagaaactgatgaagctgcagaaccaacgaggtggccgaatcttccttcaggatatcaaaaaaccagactgtgatgactgggagagcgggctgaatgtgatggagtgtgcattacatttggaaaaaaatgtgaatcagtcactactggaactgcacaaattggccactgacaaaaatgacccccatttgtgtgacttcattgagacacattacctgaatgagcaggtgaaagccatcaaagaattggatgaccatgtgaccaacttgcacaagatgggagcactcgaatctggcttggcagaatatctctttgacaagcacaccctgggagacagtgataatgaaagctaagcctcggctaatttccccgtagccgtggggtgacttccctggtcaccaaggcagtgcatgcatgttggggtttcctttaccttttctataagttgtaccaaaacatccacctaagttctttgatttgtgccattccttcagatgaagaaatttggtacccccccccaaaaaaagtaataataataatataaatatatgtattagatgaatagataggaagcaattaacttatatataattatactttaagttgaaacaagatttagtatgtgatttacaaaacaatagaagtagttaagtttcattaaaccatatgaaattgttaacatttgaacattttgacctataaaaatggtgatttcatatggctcaatcaagtattataacaggtttcaatagcaaaaatgtttaagctccagccagtgtcctacttattccagttaat

SEQ ID NO: 7967 - DNA, 1189 bp, Homo sapiens
gtagagacagggtttcaccatgtgaactggtcttgtactcctgacctcaggtgatccacctgcctcagcctcccaaagtgctggtattacaggcgtgagccactgagcccagtgctttttttatttttatttttttaagaaatgccataacaggccaggcgctttgtcacccaggctggagtgcaatggcgcaatatcagcttactgcaacctctgcctcccaggttccaatgattcgcctgcctcagcctcccaagtagctgagactacaggcacccgccaccacccccagccaaattttgtatttttagtagagacagggtttcaccatgttggccaggctggtctcgaactcctgacctcaggtgatccacctgtcttggcctcccaaagtgctgggattacaggtgtgagccactgcgtccagccaaaaatgtaactcttaatacacatggactaatttttgctttctttgggatttgtcatttgaatttcaggtttgcatcgccagcttctatatattacggcctttttttttgctggatattatcttgtaaaacgtgaagactacctgtatgctgtgagggaccgtgaaatgtttggatatatgaaattacatccagaggattttcctgaagaaggtatttcaagttaattttagataatctgtgtttactgtattattattttccctggttaatcttatccatgtgtatggctttagataccttctaaattctgttgactcccacatcttagtctatagaccaaaattctcttgaattaatatatccagtttctgactacctccgtgtcctttggacagcaaacaaaactcatatcccctctgccttcccaaacctcctgctcctctgtgtcctgcttcagagaatggcactactgtccacctggacactcaagccagaagcctgagaatcatcaagtctttctctttcacttcccattagtcatcaggtcttatcagttctacttcctaaatatttcttaactttgaactctcctctcccactaccactaccctggttcaggccttgttaatctcttgcttggactgttgcacttgcctcttaactcaccacttgctttggtcttatttccaatgacagcaaatctgatcacatctgtttaaaatagtcatccggctggtcgcagtggctcacgcctgtaa

SEQ ID NO: 7968 - DNA, 1189 bp, Homo sapiens; identical to SEQ ID NO: 7967

SEQ ID NO: 7969 - DNA, 1221 bp, Homo sapiens
ctattctccagtcctcacggcagccactaagcccaggagccagacctggcccggggacacatctcctgagggatcccagaaagaacccagtctttcctttcccttggggtccttgttagaatgaaaacctctctatttaaggcacatcattcccagctaggtttatacacttgtctatattttactggaggaaagggaattaaaaaagaactctgcagttcaaggccctttcatttaaccttccaaaaacagcaaactcattttaaagactcattgctgaggtgatagagagaaaccttatcctctccaaccttcacattcacaaaaaccatccttgtgtacttgactgccctagacagtggtgactcttaggtttcattacgaatgtggaatatcagagtgtgggaaggcccaggcgagggccaatgttgtgtttcttaccccctctggaatgccaaaggcaaggtactaggtgacctcctggtccccaagaaaatgtgatttattctgagggcgaacagccaagggaggactagtctggagcacgctcggccgtcctggcaggagctgagcctcaggtgtctggcggtgccccagcagccctggattcacccaacaccagaatcccacttttctaaatccacctgttgttctgagcacctctgaacccgcagcttcggcaaaaggagtctgtaccaagctgcttctggatgaccaacactggagactctggccttaccatgtggaaatcattttcctgaagtctggaactaattttgagaagtttttttctcaacacttttgtgtttctaacactgtatcttgactgtgtaaataccaacaaggctgtaaataaatgcagatgtagataccttctagaaaaaaaaaagcataaaaacaaaaccagaagtgatcccgtgtagccttcgttgacaaataaagactattttgtgtttacaggtgtctggtggcctttgcttggagataaaggcttcctcttgcctgtcccagcccccgagccatcctgggtttgcacttccctgctggctgctatcaggatgacctgggagaggactcagtcctaggccccagggtccctctaaatccctccaggctgcagctctgtcaagagggatgtccagagggtctctaagaccctgaagcttgactttgcaattgcatgacaggaataaatatcacagctcctctgacatcactagt

SEQ ID NO: 7970 - DNA, 1055 bp, Homo sapiens
tttcttttttttttcatagagatggggtctcactatgttgcccaggctgttctcaaactcctggcctcaggcgatccaccttggcctcctgaagtgctggggttacaggtgtgagccactgcgcctggactgagtgtttgtttctttaaaggatcttatatttttcctgtgctacataccaccacagcagcccagcttctgtggggagagaagttgaaggatcccgaagctttagaaaaaggatctcagctgtggcacaggcagtgttatgcgcctcactgccacattggtgctgttgtattgaaggtggtgcttctggccttggcccttttgagttggtttccatttgggctgcaggtgactcagtgactccctcctcaagctgtcctcctgctaagaccagcagtcacaaacccatggcaagggtgagtgtgaaggcctaaccctgtgcctatgtaataggctccaagcatcgactcccatcctgagaggaccggcccttttgacactcaccaaccaaatctgttcattcgatagagtgaccaggcctccctcacctgcccaggtgtatgatcctacagttcctgccttctctcctaccccgcacagctgccaactggtcctacatcctcagcccctctgccaccaccttaaataggactttactgattccccaactttgtttttttgtaggatgagatttcctttttatcccacccccccacaccccaaacagacattgctggagggcagactggaggaaggggaaggcatgcaggtaaattactgccttgtcagcctctgaccctcatctctcagaattgttggctgagaattaacccaaggaccacaccagtgcctgatttctacttagggagagaggattggaaacgatccctaagaaactgactgagggtgagaatggccaggaggtgtgtgtccaaataaccaggagggggcacagaagatgatggcaaggcagactgggcagtgttttgtagacacagaacaaagaatcagaatttgaaaaaagaagaaaaacaaatcttcgcagc

SEQ ID NO: 7971 - DNA, 1167 bp, Homo sapiens
tttgactacaactatgacaacagcttccgggtgaccagcatgcaggctgtgatcaacgagaccccactgcccattgatctctatcgctatgatgatgtgtcaggcaagacagagcagtttgggaagtttggtgtcatttactatgacattaaccagatcatcaccacagctgtcatgacccacaccaagcattttgatgcatatggcaggatgaaggaagtgcagtatgagatcttccgctcgctcatgtactggatgaccgtccagtatgataacatggggcgagtagtgaagaaggagctgaaggtaggaccctacgccaataccactcgctactcctatgagtatgatgctgacggccagctgcagacagtctccatcaatgacaagccactctggcgctacagctacgacctcaatgggaacctgcacttactgagccctgggaacagtgcacggctcacaccactacggtatgacatccgcgaccgcatcactcggctgggtgacgtgcaatacaagatggatgaggatggcttcctgaggcagcggggcggtgatatctttgagtacaactcagctggcctgctcatcaaggcctacaaccgggctggcagctggagtgtcaggtaccgctacgatggcctggggcggcgcgtgtccagcaagagcagccacagccaccacctgcagttcttctatgcagacctgaccaaccccaccaaggtcacccacctgtacaaccactccagctctgagatcacctccctctactacgacttgcaaggacacctctttgccatggagctgagcagtggtgatgagttttacatagcttgtgacaacatcgggacccctcttgctgtctttagtggaacaggtttgatgatcaagcaaatcctgtacacagcctatggggagatctacatggataccaaccccaactttcagatcatcataggctaccatggtggcctctatgatccactcaccaagcttgtccacatgggccggcgagattatgatgtgctggccggacgctggactagcccagaccacgagctgtggaagcaccttagtagcagcaacgtcatgccttttaatctctatatgttcaaaaacaacaaccccatcagcaactcccaggacatcaagtgcttcatgaca

SEQ ID NO: 7972 - DNA, 1135 bp, Homo sapiens
taggccatttttcgtgtgggctgtccccatttttcattgtttggcattccatagctttgtttactcacccctacttaataagtactctctttcatgttcctatcttgtatcctgcatctcatggactccacgacatctgtaagaatgaagaaaagcatgtagcctcagttaaaatttcctcttcccaattttccacttggctgtgcaggctccagaagcatatttcatcttgaaccagagaccacacggatacctgaactaagaacacagcctctcatccactagtctttgaggctaatatatagtgatgaacaacaatatctgttctatccagagaattgaaaaaatataatttatggttttttatgaagagagtaagaatatttaaagaaccctagggattcctgataaggccacaccgttgcagtccggtcctgtctgatggacttttgattcatgtgtgaaattcagctggggctggagtgcagcctggctgaaggcatcagatccttcaggagactgcccagctacccggcctttgcagaacacactagtaggaggtgtggagagacagagaaagagaagctcctcaaagagctataactacagcctagggagggcaggtgaaatggtattagtgattcatgctgggaattaagaggcctgccctgctctaaacacacagccagacacccatatatagacacagtggggtttatttcagagcaacctttgatgctcatcctcaaataagcaaaactttagaaggccaaataactcaaggcttggatacaacccctccattggaaaacaaagcacacatctttctttagggttaataagcattgagaagtggtcagattttctttgctttgtcttgtttttcacagtgacatccattgacctgcacctcatagtctgtgtacgatgcacaaaggaggaatgcatcttacttagaacgctaagcattttgcattcaagcatatgtgggcacatgtgtacatggaaaattcaagaatggcaaacagataatccagcagtatatttgaccaaagactcaacccccttcactagtgcatatcagagatgattcaaattttgcgtatttctaaattccaacttcttggaaaggcct

SEQ ID NO: 7973 - DNA, 1202 bp, Homo sapiens
atttaattaaaaataaattatcatttaaatgaaggaatctattttagtctcatgcctacaaaaataaacctgcattatgaagtgataataaaagttcattctatgaagacttattaaacacctcctgtgtgctaggcaatgttctaggaggtggagattcagaagtgaatgaaacagaatctagtagacatgaagtgctatgctgatgcttgagacacatttcttactttgccccacaaacgaagtggtagggatttctacctgggtggagttgggaagccaggtctgccatttgccgcagtactgctctcaccttactaagtgacctatgcatccttctgccagaatgtatgaagccccttggccacaaagctaagtagtttgcttaaagaagcctcacctttgctggtcagatgcttacctatgttctccttcctccatctcacagtggactgcatggaccccacatgttcaggccggggtgtctgcgtgagaggcgaatgccactgctctgtgggatggggaggcaccaactgcgagacccccagggccacatgcttagaccagtgttcaggccacggaaccttcctcccggacaccgggctttgcagctgtgacccaagctggactggacacgactgttctatcggtaaatgcagggggagaagaagcatgggtagagggaggggatttccactgtgacatggtcaccaatcacgtgactgttcccaatcacgtagcaatgcattccccgtgcctctgagtgcttttcctctttctctgaactctagccttcaacacctctactcttagacaaagagaggattcaaaaattacatccttacatcattccttccatagtagtggccctgagattcaaaactaccccttaacaatggagcttataattacagatgtgtttcaccgaactctcatctcatgttaagacatcatccctggaggcaaggccatagggaaagtgtacctaggtaagctctgtaggggtgggccttataggataaatgtcccagccatcaaacccttcagtttcacccatttctcagaatgaagtccaaactcagtgtagtgtttagggttctttgggatctggcccccacctgcccttctagccaaatgctctgttagtcactaagctccatgagggtagcaaacatgtcttgttcacctctgcagccccagga

SEQ ID NO: 7974 - DNA, 1166 bp, Homo sapiens
atgattatgggctatttgtatttcttattcagtaaactgttcatatccaatgcctattttcctactgagttgttggactttggttattatttgtacaagttatttttgcgttaaggaaattaacattgtcataccaattgcagtttttcccccagattgttatttatctttcgaagcaaagaccaagacctcctgagactccccgatcctgcctactcccagttccaccagactgtgagccccttgagggcagggtctgaaccttgatcctctctgtccccagtctcctttgcagggctggcactacaagagcttccttttggggctacttgttgaactgaactgaatgcctgtgttcccccaccctgcccacctttcccttatggcttgggagtcccgtttctgcctccagcagaaaaagatgacttttctcattgctcaccacagccatgcacctgtttggcctaaactggcacctgcagccgatggaggggcagatgtatgagatcacggaggacacagccagcagttggcctgtgccaaccgacgtctccctatacccctcagggggcactggcttagagacccctgacaggaaaggcaaaggaaccacagaaggtagggttgctgcgttgtccgtgttgtgagtcctctgtgtctgcctctgagctgaagagccctccataacgtgcgtgcatcatgtgcctggctcacagctccatgctctggcgctccctccatccttccacactccacgccagctgtcaagctgccagtccacctgtgtcttcatcgcagttccttgtcactgagagttcgtgggaggctcaggaagggctcatggtgctcagcagaatcccatcccatgccttgagggaagcattaggggcttcacactgctggggtggccatctttgtgtggggtgagaggagctcttctgggcaaacctcatgggacagttgggcatctgtgggagtggggtatggggaggcaggtagatggggtgttgtaatggaaagattcttggactcttgtggtttaatagaaacaccagtttaagtggtctgtcatttactaaacgtgtgaccttgagcaagtcacttatttgcctgagcttcagtttccgcatccgcaataataacaataatcattagtgttcgtacag

SEQ ID NO: 7975 - DNA, 1182 bp, Homo sapiens
tggcctgtcccatgccataccctgtgctttcttgttcttagtccacagctttggtgatgagccatatcccttgcccactcctcccaccacgctccatcctgctgcagatcatcttggtttctgaccttggtgcctgactccctcacccagccttgccttatcttccacatgagactcttggaaccatcattttttgatacaatctcagcttccctttaagccataattttagcctttccttctgcttggttgcctcaagctgccttagtgaagtttgacctggggcctcctccgcatagcacgaaattggctggaattgcctgtgatctgggagccaacactgacggctactagctttgttgttcttaggagtccctttaagaagtcctggcccagattaaatgcaccccataaccgcttcctgctggcaagctctgtgactctccctggtggcagcacatactaacacaacagcaccttgcttctgaaagggaaagggaggaaaaggaaggctcagagccatggtaaattaagacagattgcattcccgaaactgggttgagacctgctgagtgtgcagagaggtacagcaaatgagagttttgtttttaatttgagacaacacgattttcaattccagtggaggcaacaacatgcatgatgacaaacttcctaccgaaagatgtttcagaagcatttttccctgtcagtaagctcagctttgtccaagaagagtggtttctgaggctgcttgaacttcatctgacccaggatgacttcaaggaagaaagagtataaccaacattgggaaaggagcttcctgcctatgggagcctagttccagtgccagatgtgtggagtccagggatgaatctggtttcaattttaggctgtgtcactagtcctagtgtgactttgacctagtcacttctctctgagcattatcatagtttccccatcagccgaaaaaggtcagtggaatctcagacagtgagataacttggaaggaggataggctttggagtcaaacttggaatcccaactcagctacttaggaattgagtgactttgtgcgaattactagatctcactgagatgaagaaacggagaaactcagtttcttcatctgcaacctgggaatgaataactgtctacctcctaaagttgtaataaggatggaag

SEQ ID NO: 7976 - DNA, 1077 bp, Homo sapiens
cctcagcctctggttcactaaagcctcatgctttgagcaccccctctgccacctgtgtgagtaatggttgaaaaactcaggagtacttagcctggaaattgggagactcgggcagtatgagtgagtttccatatgctcattcatttattcaacaaatatttattaagtgcctactgtgtaccaggcactgtcccacctaggtctgggagtagatggaatgcagttcctcattgtgtgatctgggatgcttcattgataggagaatgctttaaaatagggagaaaacactgatatctgaaagggagaaatgctaaaagcagcatctctgtgaatgcagctgggaagtatctgggatttccaagaccccatctatgttctttgtgccagctaaggggatgtccaccgtggcagacacaagcccctgcagatccaggctcctgcagacccaggcatgagcctggggaagcagccctgcctcagctctcagagttcacccaaaggaccccagatggctgaccttcaacatcttgttgattgggtgccaggacaagaactaattagtactggtaacaagcttgttcgtttttcagagagcacagagaagaaagtggagatggaaataatgttctggtctcaaactattttttttttttttaaacttagctacactgtattttctttagaccatattaagcattggagtcctttttaaaaaggtgagtcagggccatttttatcaagcatcagctgaattcccaacactctactatctgctttatataggttaacattgctacttttttaatgctcacaagaacactgtgaaggagggattttttttgtcatacccattttataagtgagaaactgagaccctgaaagccaaagctcaggctctggagccagcagacctctgtgtgtgacccagctctaacattttccatttgtgaaaccgtaggccaagctgcttcactttcctgagcctctgtgttctcatctgtaaaatagaatgatttcaaatatctgcatcataaggtgaaaagtgataaggatcacttaaccataatgcatgtgaag

SEQ ID NO: 7977 - DNA, 1279 bp, Homo sapiens
tgtaccaagtacctgtcattcctgaacgtattgactccacacatctccgcgagacagctgttgttatgtggagaaattaggctaattaatttgcccactacgatgatgacaacaatgatgacgatggtgataaaagcttatatttatatggcagagactattataaactccttatctgcattattcactcctcacaataaccctgtggggtaggtgctgttatgatccacattcttcagatgaggaaaatcaggcctagaaagataaaataacttgccccttagctggtaaatggcaggactggggttcaaatgtaggcagattgcctgcagaacctgtgcttttaaccactaggatggaagttggaaagcaagactgacatagtctaaacatccttgccctttcagccacacctggctgtcccatctcatactgatataaatagtattacaggtgagcatgtatggaatgttggccaagggtggcctctgtacttggttgacattactgcgtatttaattctcactgtctctgtcgaggttggtggacactgaagctcagagaggtcagctgatctgcccaggatcacaaatgctaactgtggctctgggccactttttaagctacgtggtttcacttgctggcttatttcattaaacatataaaataattcctggaggcttggtctgttgaatgagcagtgattcaacaaactgagtggctgctcttggcttctctgtggtgggagaccaatgagcacagtgatgagactgacccagtcctgccctggaggagtccctagtcttggggtgggactctggcgttggtgccttcctgccccgaatccccaagggccgcagcgaactcacatggtaggactttgcctctttcaaccccatgctggtttccttttgactaaagaaacagcagcctccacctgctttagtcagatttagatgtagcaagtgattatcacttattattgctattaatctgacacaaaggaggcttgaaactcttgatcctcagaaataaaagaccccaccaccctgccaaaagaaagatcaataactttgcaaattgttgctttttgaagccttcaaggaagaagttgtgttttttggtcaaagcaggccatttgaatgtcacatttgttatgtctctcttctttttcttttcttccaataatttgagtcaaaatgatgataaaactgctctatttttaggtagtttcagcaggttgttgacacattggattagcataagtcagttatttctg

SEQ ID NO: 7978 - DNA, 1185 bp, Homo sapiens
ggccaaagccagtgaggggtggccagaaaggggactcagagggtacacctacttgaccagcctcctgggcacagagcagggcagaaaggcagaagatggatggcggggccagggtgcagttggagaagccacagcacactcatgaagggaagggtctgtaggggcagagggagacccaggaggccacaggcagagcgtgcctgctcgcagcccctgggggctgtgtgcttcagggaagtaattaataccatatccaggaatctcatccctggacccataattacatgtacaggaattttttaaagggttgatggcagtggttttaatgtctcataaatattcttccaaggattctccccatagagaggagtggtttcatttctcaggcttgaagccagctctgagcctttgaagaagaggctcccagcctcttctcgggaaacaaatctcacggtagcaccccttccccagtgtcctcctccccctccctaccctccatcccttctccctgcttcactgaggactcaggtctccatgtttacaagatgctctggacttcataattgcttggattctgccacataggaggcttccttcaggaagtattccaggattgctgccagtagagttcctgaggctgatctctgcagggcatgggggattgcagatgctggtaaaaactttcttgagaactccatgtttgctcattttgactaaattctggactgagagtggcatgtacataagtaggaggctttcattccaccgaaagcgaagcctgcacaaggcagaggaaaagaaacacaagacagaaggaacaaaagagcatgtgtctgaagcccccaggttaaggaagggtgttcacagagaccaccacctctaatccccagagaaccctctggcacggccactgccaattccctcagttgatttggctcaggtgtggctggctgaaggctgcccggccagacgagttacatttgaatcttggccctccccctaatgagctgtgtgtccttgggcaactccctgtacctatctgatttgctattttctccttcggaaaattgtgttgtaattatgtctaagttgagataatttatgcaaaaatattctaccaccatatctggcacgtgccaaatgctccctaaatgtgacctagtttgaaaccccaccttggaatga

SEQ ID NO: 7979 - DNA, 1150 bp, Homo sapiens
tacttttgtttcttttctgttcacttctgggctgtgccccattaaccattcatgcacaaccctccaccaagctggcaaggcctcagcattcttcaagtggaagagagaatgcttgatttctgtccacatcctataaaatgcttatcagatgataatagctttccagggttagtgacagagacttagcatgacccaaaggcctggaggctcttcacttatgcatgatttggtgattttacatctcttagacaataaatttttggttgagaagtacttctactcagcggtctgattttttcttgagatcttctcaaacccacctcaaactggggaaatgtgttgtattttggagagggcttttaacatttaatgtgcataggtaccatctgagaacttattgaaatgcaagttctgattcagtgggtgggagcatgggcctcagctcctgcatttctgacaagcttccaggagatgttgatgccgccagtctaaggccacacttggcttagcagagctctaagaccttggtcttccttcctgcttctgctttctcccttctgtcttcttaggtccaggagcatcagatgcagactgtcattgagtgaatggaatctgtcagttttgtgcaaccgtttgtcagtattgttgtagcctcagtggaggcaattgtagtgtgaagtagacagagtaaatagtggccattatcatcatgccgtggaaagattccagttccacgtattatgttatactctccaggcttcttttatatcttcaagcacattaagcctcatggcaccttgtggaataggcagtgatttttattactaggataagtattactttgaaaattttataacctttattatgtttttgtttaatgtggttttcttctgattatgacaataatgcatataaacaacagaaaatttaggaaacctaagataacacagagaacaagaaaaagaacccataatcttgccatggagaggtagtttctcctaaccttttgattttctttccagtattgtttctatgtaaaatcctaattctcaccactaccctctcccaccataatttggagcacattacacacattgttttgcaaccttaatctatcacgatcgtttccccgttccattaatttttcctc

SEQ ID NO: 7980 - DNA, 1219 bp, Homo sapiens
agcagactggaaggtagtggggcggcgtgtgtgtgtgtgtgtgtgtgtgtgtgtggacacacacacgcaaccgaggaatacacaaccaactacttgggtgaagggcggggggttcacctagtgagtccttcttggcgggggggtcgggcgagttagctgcccgctgcccgccccttctctgcctgcccccgcctaggcgaggttggaaagtactggaaattcagctgcgtggtccttaactttggaaattggctccgctttcagggcaaaatgttaaggcgatttatgcacccgcgtccatgtggatgagtgtattactgctcagttgggtgcagagccctcaacagtaccgcgccaagcccccacccgatctctaactccctcccaccccctaaccgtggagagagggtttatagaaatgcagttatctgtaaaccatcgacgcagtgaaaggggcgcagggaggcagccagagttttgcctgaacctgcatactggcttggtgtttgtagcacacgagatcaccccgctgctttgtagaaggcggtggtggggcaagctcgggattccaatcgccggggtggggggtggggggaagagggtgcccatgtactgagctctgaggccgagtaaggagagagatctgctgagcggcatcgcgggcaattacataagctgcctcggtgattacccggaactgtgatgcgagctcccggttctcgaaagacaagcctgaaagtttgcctgcttggggagtgtaagtaccggggcgcccccaccccggcctgggtagctaggatacgcctcgcaccacggcgcccacttgtgcgatgggcgtcgggtgctgatgctgctgtccccaaagaaccggttaccgaggcagggactaagtgggggcatccggaattgatcgcagaggaggagtcagtcagaactgaggtttcattgggtcttcagagctccaagtcttccctcggaggtgttggaaggccttccagggaacgccgttttcagaaactgacttggtgtcctggggagccccaaagcccctcttttccgcccttcctgggcgcccctccttgtctttcaagccctgtgcccttcacgtgtttagaaacctgcccgcggtgcctggtcccccttggagatgcccaggcagcccagccatccaggcccacgctggcgaggggttagagggagtagaacgctggctctgccg

SEQ ID NO: 7981 - DNA, 1265 bp, Homo sapiens
aatactgtataatgactaatggatctcaacatgctggcctgacacctggccatagttgttatatagctagttcccatcacgatcatctagggtgcctttttaaaatgtagattctaagtcacacccctcacctacagaaatagaatctcctcaggtggattcaggaatctgtatttttagaattgattcagacagagttaaacaactagtgattgcaaacttctgaattaagcaaaaacagtagaaaacaggtggttggggcctcttggccagctgggttagacattctagatacacttaaagagtgtcactactcagagtatgtcccctgagtggtggcggcagcagcacctgggagcttgttagaaatgctgaatctcgctccgccagaccgccgccgcgccgccatcatggacaccagccgtgtgcagcctatcaagctggccagggtcaccaaggtcctgggcaggaccggttctcagggacagtgcacgcaggtgcgcgtggaattcatggacgacacgagccgatccatcatccgcaatgtaaaaggccccgtgcgcgagggcgacgtgctcacccttttggagtcagagcgagaagcccggaggttgcgctgagcttggctgctcgctgggtcttggatgtcgggttcgaccacttggccgatgggaatggtctgtcacaatctgctccttttttttgtccgccacacgtaactgagatgctcctttaaataaagcgtttgtgtttcaaaaaaaaaaaaaaaaaaaaaaaaaaaaaaaaaaagaaatgccgactctcaagccccaccccagacctactggatctggacctgcattttaacaaggactccagctgctttgtaggcacgttgaagattgaaaagcactagaacatgcttaacaacaaatcacaaggggatccaaccctggggtcaggtgggttgcaaattgctcattggccatttgttagacagttgacacatacgtacaactcagttggtactagaccaggcgcttatatacattatcttacttaatcatcctaaaaaccctacatggtaggccctgttatcctcattttttaggtgagaaatccaaggctcacagagttatagtaactcaccaaaggccattcagcttttaataagcagagctgggatttgaacctgaaattgtctctccaaagcacacgctcattccactgcagcatattgcttaaaatgaagagcaaatcaaaggcgcagccaaatttaggaaaac

SEQ ID NO: 7982 - DNA, 1133 bp, Homo sapiens
caaggcataggtctagggaaatgccttgctgcctatcatttccctgatcaacaagagttaccaagaaagaaactgaaacatattagacaaggaaccaataaaggtttaattaagaagaaattaaagaatatgcttgcagcagttgttacgaaaaagaaaactcataaatataactgtaaaagttcaggctggatttccaaatgtccagacattcaagtcttagcagcacctcagctgcaccctattcttggacctgattcttgttcagaagtcaaatgttgccttccattttcagaaaaaggcccaccttcagtgtgtgaaactcgaagtgcttggtcacctgaattgttttcataaaaagtcacctgaacccaattcctgaacttttaaatctgtttggaaatgtttgccttcaggggtacggaaagcattctttacattttgaacacttggagagaagcaaattgaaaacaggactctgctgggagctactgtgccttttaaaatataaagccattgttttccccagggttttatctagaatactatgattaggtagttgagcactttatcttatactgtttattgtactttaataatattgttaagattgtttttgaaagtattaatgtttgttaaaatcacatatacatccagaaataaagactttgcaaaccaaaacttagtcttttttaattgttcagctcagaccagaaaatgccagctatattataggccaatgagtgtgctgagtttgggatagaaagctacaagatcactgatcttaaaatatgttagtctgctggataagacagataaacaggtaacttcaatacagtgcagaagatgcaatgatatgggtttgtaatgggcatgacaaacatttacgttgctatgagagcatggaagaaaagcagctaactcatcagtgagctgagggtaagaagaaacgttttaagaaaaaaagctatttagaagttgtatgtgaaactgttgctattttatttaatacgtatacactgaatgcctactctacatgccaagggccgtgcttagtgctggaaactgaagataaaaatcaagctccttccctcaaactcatgagctattggaataatcaggtaattagaatc

SEQ ID NO: 7983 - DNA, 1263 bp, Homo sapiens
tcaccaggacaaatggggggaggaggccctttgagatttgaggggccacaaggtcagctaggaggtgggtgtcctttgagatttgaaggtcctccaggaccagtggggacacctctgcggtttgagggcccaattggtcaagcaggaggaggtggttttcggtttgaaggttcccctggtctgaggtttgagggatctccaggtggtttgagatttgagggaccaggaggccagcctgtgggtggtctgaggtttgagggacatcgtggtcaacctgtgggtggtctaaggtttgagggacctcatggtcagcctgtgggtggacttagatttgataatccccgaggtcagcctgtaggtggacttagatttgaggggggtcatggtccatcaggggctgcgattaggtttgatggacctcatggtcagccaggaggtggaatcagatttgagggccctttgctacagcaaggggttggaatgaggtttgagggcccccatggtcagtcagtagctggtctgagatttgagggacaacataatcaacttggtgggaaccttaggtttgagggtccacatggtcagccaggggttggtatcaggtttgaaggccctttagtccaacaaggaggtggaatgaggtttgagggtccttctgtaccaggaggtggcctgagaattgaagggcctctgggtcaaggtggtccaagatttgaaggttgtcatgctttaaggtttgatgggcagccaggtcagccgtcactcttgccaagatttgatggattacatggtcagccaggtcctagatttgaaaggactcctggtcagccaggccctcagaggtttgatggaccacctggacagcaggttcaacccagatttgacggtgtacctcaaagatttgatggtccacaacatcagcaagcatcaaggtttgatattcctcttggtcttcaaggcacaagatttgacaatcatccttcacaaaggcttgaatcagtatctttcaatcagactggtccatataatgatccacctggcaatgcttttaatgccccatcccaaggactacagttccaaagacatgaacaaatatttgattcacctcaaggaccaaattttaatggaccacatggccctggaaaccagagtttctctaatccacttaacagagcttctggacactattttgatgaaaaaaatcttcagagttctcaatttggaaactttggcaatatacctgctccaatgacagtaggaaat

SEQ ID NO: 7984 - DNA, 1245 bp, Homo sapiens
tacagaggaaagcatagcaacaccctctgaaattaaaacagaaaatgacacagtcgagtcagtttaaataaaatgagaaaggtatgtttttcttttttaaaaaagctgctgttggatctagaaggtgaagaatttttttatgtatatatagacatatctatataaattgtctggctgaggcagggccttcagctatcatttggttaataaatacattttagtatttgcatttcctactgcctgcagagtttcaggtgcttgttgtgtgaaagttctgtagatgtgtgcaaatttaacgaaatgaaattgtatgtgtaaaaatgtacgatttttcactgtgcaactgtaaattataaataaaaaatatttttgctattcatggagtgtaatatttatgcacaccatcaaatagtttctgtactttttattgggtaaaaatggaattgaacagcaacctcaacataagattttttttctagtagcctcccactgattaaagaagcaagtttgaggtttcatccttcaaaagggggttccgagagagcaccgtagggcttttctcaaatagaaaagccagattttgaaaaaattttaaagataaaataggacatattttgcagatatatatatatatatacacaaacacatctccaggtatagagaaccatccagatgttcacttttgaaaatatctaatgatgcaaagttttattcttgaacttggacactgatgccatcaaacaattaacaaatatatttaagtactaaaggtgattttttttttaaagactttttcaaattgtcaaatgatttaatgcagatgaacatatttctattttaagtaacgggaatctgtaagaatgtttgcttgagatatggttaacttttttcttttgttggttttgacttagatggacaccatgagatgttaatattcatacatgtaataaatagaatgatgaagaaactttgtttgtacttctttatttcttgaaaagctttagaatgtgactttcttgttgtctttcatctgttttttgaaacatgaacatggtacttgctatgagccaggcactctgagacaggttagtcttttctgccatttattggagataggcatataaaacactgagttttattgagcacatagtatgtggcaggcactagcactttctacatgtattttctctggtattcacatctaataactacatggtagatggtgtccccactttacagatgaaa

SEQ ID NO: 7985 - DNA, 1298 bp, Homo sapiens
tcatctactactgcacttgagcatgaatgggtagtagccaaactcacaaattggagtgatgaacctgcttatacctaagggcaggagcaagcccctcacaatgcagctgcatgggtttttagtgcctactgaattatatatatatatacatatatatatatatatataaaccaaaagtagttggaaagattatttgaaatgactaatttgtgctatctttatgaaatatgttaaatgtagcttttttgaaacagaagccttgaattgaaatttaactaatacttgaacattttgtatatatttctttgtatataattttgtgcagtaccaatgacaaaaatatggtgtcataataaaaccaggtttgttgatcttttagttatgggctcaaagaatttattcatctctaacatgatattggaaaataatggatgaaaataggaaaaatgattgttaatgctgactgtgggtcttaaaaggttctggaaagcagtaagttcatttttctaaaaactataacattctgttggagtattttcttccttacgtcaatacttttcctgcattatttgaaattgtgggctggggagaaacagtagtcaaagctttctgaattgagatactttgaaattccaagtgtagatttttagaatgtcattttataaatggcagtttttggaattacttgataagaacttttgaaaatggaaggattagtatggcctatttttaaagctgctttgttaggttccttatgttttattaactgtcttttctcagtttccatttcatttttttttttctagttttggtgacttagtgattttgtcattttttacatcaacttcatggtcttgtttttacatggtaattgcatgtacttaggatctatctaataggggctttaaataaatttggtcatatttatgtgtaagcacattttactgtaaatgtttgggtttctgaatttaaacagatctgtttatttcagtatgtagtaaacaatatcttaaagtgtccgattcactacttgttaattaaaaaagttatgattaatgtgaaactgttgtcttactatttttagaaaattgtgttctggatgattagcacatggataaaggagatttctggaatataaaatggattgtttttgaaatttctaggtttggctctatttactgtaatggttgaaaacaatttagtatttgggtgacccttttgtttttcttctaaatgtgcctctggtaaaatacagaactagactaaagatgtagctttttaatatttgtcttttgatg

SEQ ID NO: 7986 - DNA, 1282 bp, Homo sapiens
caagtaatctgctctttatccgcgtttacccctttcaactcccttacaccatgtcaaacttaccttagtgggacatcttcaccggacacatttcagaggagagaaaaaaagtaatattgaatcttaaagtgtttagctaaaagcatgaatgtgacacagtaaccaactcctaatgataacatgtgactattaaatctctctgacagtttcttttttaggtgatttccttcctgccaggctccgttgtaggggttacagaacagtcgttcccgcctcacaacctggtaaggatccatctcttcccgtaacgctcatgctctgctgctttgtctactttaatgggcaacatctcagtttgtgtgtgtgtgatttttttttttttttctgttttggaaggtgggagggaaatctaatttgggccctgtccaccctggaaacagacttgtgctggtcaagaatgtatttaagatgcctcttctggttgaaatagctattaatgtgtccccttattcagacttgcgtgtacctagctcttctgtccccagtgtggacatggccttggatgacatcggttccaactgtacactgaaacctgcttatagagagacagtttggagacagtgaaacaggtgaagttgaatggaagttccgagttgtacaaggtgcaaattggaattccgattttagggcaacttttcagaggttgacagttaagtatttggggcatgcacaaatgtgatagttattttgctggaggtgacaggtatctcttaaatatcaacaatgccttttagttttcagtatgagatatagaaacagtctataatggagtaacattttaatgtctcaccattagagaagttggaaattaacatacatatgagactcctgcgttttagttaattggagaataagaatggctaatgtttctttgaggaccagcagtgattaccctatcactgagattgaataaattgttgaacatctttatttttgttgtattaaaattttaggttaaatttatatatgtatgattagatattgaaggttgtgaaatgtgaatgaaaacgtgtaaagtgaggcttcacaaagaatcttattctctgtgtttcaaaagtatttgtcctattttaaaataattttttaaattgagtggttctggccacttaaatgacacgattggtactattttcctaaggtgggatttattcccttgaatctattaaccagttgtataaattgaattatggtgtccttcagtgtaagaggcattaagaaattc

SEQ ID NO: 7987 - DNA, 2021 bp, Homo sapiens
tttaagactaagatctgtctttttggtgactaacccttcaattctttcaactcctgttaatacccataatcagtaacctatcaagaaaagcccttatttggaaagtgtgaaatttgtatttggaaaagctgcctggagagaagaactgtgtcctttactgtatttcaacaggactcttttgggggatcaaaattaaaattcctaattatgcattatctttcttttctccagtcctcacaaatacagaaacaataactgaaattaacttttctttttttaaaaaaaattatattcagtttgcagtagacattccttaagtatttgtatttatttatgattatcaattttacataacattaatattgtatcagacctccttatgaaaatgagtatggatgtgcacagtatgtttgatttttatccacaagaatgaatctgattcagaatgcttttctcagctgacatacagagcactaaatattttaaggcaagtccataggtctgaatctcttaagaattctcggcctctgtgggatttagggaagcattataaatgcattaatccttatagtcaattctgtgcctaggattttgccagggaacagttcactgactaggaaaagcactacattttaaattcagcattagtgcattgggaaggatctttactgctttgtgcttggcatgtcattattttccatttgacattagggcctttccaaaatgaatgtgaggaattgctttcacttcaagactttccttcttttcactaaaactctagaaggtgttacaagggggagggaaggggggcaaagtccttgaacattttctttggctcgtgccatgttatgatcatataccttttaaataaggggaaatagtatctttaaagttaatgtctagccaagagtttagtaaacgaagaattaaactgcactgttgatcggtgctttgtgtaaatacatctttaacatttgggtggagaggggccttaagaaggacagttcattgtaggaaagcaattctgtacatgagtttaagcattcttgttgcattgtctctgcagattctatttttgtttacaatattaaaatgtatgttagcaaaatgggtggattttcaaataaaatgcagcttccacaaaagttttgttatggtattctggtctgagatgcattttcatttttcctttctctttttattatcaatattgtcatttttccctaataaaatatacccaggtgattatatttgttgatctaataacatggaaggtttgttttatatgaattttcaaaaagatgtctctttacactttttgttaccttgtagactcttattgataaatgcaactacttattaaaattgttcactttttgtcttttgatcagatgcctttagtcaggtaagtttaagggaaaatacgcagtttaatgttttggtacatataattatgtctgccaaagaaacctttgattgtatcatattgcctatttagtagtgcatagggttcagagtacatgataaaggatcaaaagctttgcattgataagtgtctcataatatttgctgtgattggagaaaaaatgtagtcgtagccaataaattttatcagcttttaagtttcagtattattaaaccattttcatataaactgggaagttgtacttttataagttaccctccttaactttacaaatttttgtctcttgtggtgtttgaggaggtgtttatatttaaggtctgtggcttgttttctttcatattgcctttttttttttaagtatgtttcagtatgtgacgtgcttcatagccatttttatttcattgtttaaacaacttttgggctatgtttgataagtgttatccatattttacccattttatatgtaggaatcagaaatcagaaaaggagctgggtgcagtggctcacacctgttattccagtaatttgggaggctgaggtacatgatcacttgagcccaggagttcaagaccagcctgggcaacatggtgaaacg

SEQ ID NO: 7988 - DNA, 1165 bp, Homo sapiens
ttacgtgttactggtatgcatgttttggtgttcctgtggcactgccgaaacgtaggctgtaaattagcagagggttttccctgtgataaactcaacactttttcccatcagggattttgtgggattatgtgggctctttcccaattgcactggtttcctctcttggggcttggaagaggcaatgtgccccactctgttgtgaaccctttccaaagtcaaacacttactctgaaagcagtgagtgtatattaagtcaagatttttctaattgctttaatcctgtagatcactaggtagaatatttcatctgaagtactggatttgaatccagaagttaagtttataattatagtgcctatccatggcaaggttgccagaccatttcatgacctgggtgtaatgtgaagtgtttagcaaaaagccaaattatctctgttcaattatcctagggcaactacactttccaatgcagtgtcttccctggcaagcactggtctatctctgaccaaagtggatgaaagggaaaagcaggcagcattagaggaagaacaggcacgtttgaaagctttaaaggtaagtttgtgcattctccttatttcgaaaaatgagtacaggtgttcattaggtaaatggggcctctgcacagacttagagtcttaaatgtatagctacctaatgggctgaaactcagtctaacttttcgtcctgacatagaattaggtaaaacagaatatctgctatcagaacaaattagaaaatgcttttttcagaggctgtacaaagaaatctggtttctggaatccttatggtagttccctttcttaacaggaacagcgcctaaaagaacttgcaaagaaacctcatacctctttaacaactgcagcctctcctgtatccacctcagcaggagggataatgactgcaccagccattgacatattttctacccctagttcttctaacaggtaggagtagaagttaaggttacctttgaatatgtaggttcaaagacttctaatagaaattttgcagaacttttcaggtttacttttatttatgcttttataatctattcacacaaagaggtggcgataaatggtgatattggtataatacctaaagataaagtgatgagtttatattttacgtatttacgaaatggaag

SEQ ID NO: 7989 - DNA, 1125 bp, Homo sapiens
tatataactgtaatacaatatcaaatccagaaaattgacactggtacaatgtgtgtgtttagttttatgtcattttatcacgtgaattttgtcatttcaagaatggtacagtttgggaccttttaagattgtttttttccactcaaacccttgagatccatccaggttgttgcctgtatcagtagttctccttttttattgctgagtagtattccatggtatggattaccatagtttatgtaactatctatggtaggaggttttggtcatttccagttctgggctattgcaaataaagctgctaatcagcagttgtgtccaggtttttgtgtggacttaagttttcatttctctgggtaaatgcctaggagggcaattgctgggttgtggttaagtttgtttagttttttaagaaactgccaaactattttccagagtggccgtgccattttacattcccaccagcaatgtatgagagatccagtgtctccgaatcttcgccagcatttggtattgtcattattttttattttagctgttctgataggtgtgtagtgatatctcatcgtggtcttaatttgcatttccctgatggctagtgatgttgaacatctttttcatgtgcttatttaccattcgtatatcctttttggtgatgtcttttcatatcttttgctcattttctaattggattggttttttgttgtgttttttttttttttttaactgttgagttttgagagtttgaatatattctaaatatgaatcctgtatcagatacatagtttgcaaatattttctttcagtctgtagcttgtcatttcatcctctttaatagggtctttcacagagcaaatgtttgtagtttttattaaatccagtatattgattttttaaaattattttatggattatgcttttgatgttttgcctgagaactccttaccaagctatagaccttaaagattttctcctgtgttctcttgtaaaagttttatactgctatgttttacattaaatgtgtaatccattttgagttgatttccttatgaaggtgcgaggtttaggtggaagttcatttttctcttatagatactcagttgttccatcagcatttgttggaag

SEQ ID NO: 7990 - DNA, 1197 bp, Homo sapiens
tgcagtgcttactttaaattaagttggcagttaggtatcaatggtggaaattaggtgtttatgttccataacataaacattatcataacattactaagacttaatgttttagtaattagattgtcagtctacctatgtaactgtttcctagagaaaaatcaggatagaagacagataaaatactagttacctaaaaatttaaataaatctattgttaggattttctggtaacaaattacttgggtatttatttctgtaagaaaagtttggaaggctttccacagcatttgctgtatttcttgaaggcagaagaaaaagtaagtaccatgctaacaatgtaaatttgtaaggcccttcataaatttgcacaatgccttcttacttgctcaagacacttgtgatgtattaattgctcttattcatatttacgaatcaggagtataagacccaaagaaatagccaagagcacagaggctggaactgagctttttctgaaacaagaaagctgtctgaggattcctccaatgctttagaacctggtaattttattaatttgatgtttttaaaaatatgtttatacagatgcttgcattgggcaatcaagttggcaaactttatgtttgggatttagaagtagaagatcctcataaagccaagtaagtatttagaaatttctgttcaaaatttcaggctttttctccacacttgtatgccaatgtagagaagatcatttatatttgcagtgccatccttaagtcatttttaacatttactgttttcagagttaaagttattcttttttattccaataatttttgtttttcctaagtaccttggtgacaagtcatttcttgtttttatacaaattatgtagtgcttgttgaacttaaaatatatctaaattttataaaatttgagactgagctcttagtgaagtatattctggttttaagtgcttttcgtatgacttggaacatctgcttattttctaatccgctgttttagggtagacactgacaacgttatgtgtggtctttaacctgttgtcatgttttttccctagatgtacaacactgactcatcataaatgtggtgctgctattcgacaaaccagttttagcagggatagcagcattcttatagctgtttgtgatgatgccagtatttggcgctgggatcgacttcgataaaatactt

SEQ ID NO: 7991 - DNA, 1191 bp, Homo sapiens
tgacagtaccaggagacaaatgacttacagatcccccgacatgcctcttccccttggcaagctcagttgccctgatagtagcatgtttctgtttctgatgtaccttttttctcttcttctttgcatcagccaattcccagaatttccccaggcaatttgtagaggacctttttggggtcctatatgagccatgtcctcaaagcttttaaacctccttgctctcctacaatattcagtacatgaccactgtcatcctagaaggcttctgaaaagaggggcaagagccactctgcgccacaaaggttgggtccatcttctctccgaggttgtgaaagttttcaaattgtactaataggctggggccctgacttggctgtgggctttgggaggggtaagctgctttctagatctctcccagtgaggcatggaggtgtttctgaattttgtctacctcacagggatgttgtgaggcttgaaaaggtcaaaaaatgatggccccttgagctctttgtaagaaaggtagatgaaatatcggatgtaatctgaaaaaaagataaaatgtgacttcccctgctctgtgcagcagtcgggctggatgctctgtggcctttcttgggtcctcatgccaccccacagctccaggaaccttgaagccaatctgggggactttcagatgtttgacaaagaggtaccaggcaaacttcctgctacacatgccctgaatgaattgctaaatttcaaaggaaatggaccctgcttttaaggatgtacaaaagtatgtctgcatcgatgtctgtactgtaaatttctaatttatcactgtacaaagaaaaccccttgctatttaattttgtattaaaggaaaataaagttttgtttgttaggttgtgtgtgacttggcatatttctgaaagtatatgacagccactaggaagcatatacacccagcagtgagaaatagaggattcagtttgtagggcagattgggaactgctttctgagggcctctttcttttttgctggggctctttttcccctgtgggatttctcctgcgtcagcaaacccccacagtctaaggtcaacagaattgattgctaatatggtcatcagtaacactcaagtaggtcacatgatgctttggatataactatagttctcaagttgttatcccaatgacacctctttttttt

SEQ ID NO: 7992 - DNA, 1129 bp, Homo sapiens
acgatgacttggtcttgaaatatctgttcagtgctaagctgcacaacttcaggggacatcatccatattgtaatagattgtgatggacatattctgagaggcacaatgtggatggtacccctggagttctgcaaggaagctgccctgaaaaaagaaaaggaaaagaggctttgaccctttatctttgaggtcctaggttactggtcctcaaatggattgatatggtactcactgagaattatcagcaggaaagaagaacaagggccccagagaggcacttgccataagggaagggctgtctgcagagcactgggctcagcaaagctttctgactgaggctagatgccattgggaaacaaggatggacctgaatcactgaagggccactgtaaccttaaaatctttctgggctctccccagcaccagtcagaaacaccaaggtagatctagaagtctcttttcctctctatttcaccagctgcttttcctcgagggtccaggaagttgagactgatgttttaatttcacttcaaatataccatcctgtactgtgtatgctcagcaagtgttaatgactgaccggctagctggttgagtgaaaagttttaatattgaaagaattggagtcattcattattatttgattccagacatgagacagagtggcaatttgaggaaaatagtcccatgtgattttgtgtgtgtgatttttattattaaaaaactaaatctatcattacattaagaagctttccttttataatcttttaaccatataaacaagaatattctcagccctaccttctctggcctcaatgtggctgtgaagatcttgggcctgggtcagtcaacactaggtctgagtcatgttttgcaacctatttgttctgtgatctttagcaactcacttaagttccaagcgtgtttctggtgtataaaaggggacaacaattgtacatggttcataaaattagatgttatgtgtcagacactaaacctgacacaaagtaagcacttaacaaatgttagctgtcactattatttccttcatcaccaaactccactctgcatccttttattattattatttttttttttgagacggagcctcactctgttacccaggctg

SEQ ID NO: 7993 - DNA, 1111 bp, Homo sapiens
tccatgctttttttcaactaataacatcatctctcttcatgaccagttaattgggctatttggcagcccagtgaacctatgtactaatggcaagttaggggcaaatggaaatggacacatccgataaagttgaaatgtatgttttaatctttcacagaagtattacacttgaatatttaaaaacaaaacttttaaacttcctataggtttatgatgtttgttttcatttatatggacataatccttcatagctcagtttatatgccattgttgtattagaagggatcaaaatcctatggaacaaagtagtcttggcaagttggcagtttgtgtcctctcagctgtttaacttatgtaatggatgttttgcacctgaaaacactataaaaatccagtggttgtttaaaaagtccatttgtcactaattccattcaggttctccaaccttcttcttgaatatcattgtcaccatttttactgttagaataaagaggtgacaccataaagtcctgctgataatgagagtagttcaggacagctgtgattgaaatatggtcgctatttacagtttttcagggaaaagttatacttttctatgttaataaagagctgaagtggtctacagttaatgtgacatgtagggatgatgatatttttaaaatacattttgttgctaaaaagtttttaggccagtgcaaattatgcagtagaacttgtgttgcaaaaggaattataacccatactttaaaaatgcttaatccctcatattcaatttcatcaagccttgtatacttctgcttaaatgtaattcaatccttggttgttatggcaaacagaaacccaacaaaaagacagactctggtactatggtaacagagccactttatcatttggtcaaaatttggcattatgattagctttgtagaactgacctgtttatttggcaatgctgttaaaggatcatttcggtttcagacttcaaagttgattaataaatttaatcttaactttttattcactggaatcaaaacgatggttggtactgtgtttactgtttaaaatgaagtactaaagccctgagaactgcacctcattttctttatccagaaat

SEQ ID NO: 7994 - DNA, 1149 bp, Homo sapiens
ctagaatgaaaagtatgaggtaaataaaatattttcctggttgacatttacatttggaaataattagaaaattgttttcaatatgtaaaatagcaagaaatcaactttgttaatactttaaaccatgctcataaagcatacttcttgtcatgttctgcctaattttacacctgattttccattttctctgctcttgttctagaaaaacagttggtgttttctgttgtggacccaattcactatccaagactcttcataaactgagtaaccagaacaactcatatgggacaagatttgaatacaataaagagtctttcagctgaaaacttttgccatgaagcaggactctaaagaaggaatgagtgcaatttctaagactttgaaactcagcggaatcaatcagctgtgttatgccaaagaatagtaaggttttcttatttatgattatttaaaatggaaatgtgagaatgtggcaagatgaccgtcacattacatgtttaatctggaaaccaaagagaccctgaagaatatttgatgtgatgattcacttttcagttctcaaattaaaagaaaactgttagatgcacactgttgattttcatggtggattcaagaactccctagtgaggagctgaacttgctcaatctaaggctgattgtcgtgttcctctttaaattgtttttggttgaacaaatgcaagattgaacaaaattaaaaattcattgaagctgaaattccattttctgtgttgtgtataaacagagtagctttaatttgcaagcactccaggcaaatatattagatgtttgaaaacacagcacaagactctgtattgatacgggtactttgtgtcaatatctaatcgtctccactacttatgctaatacctctatttgatatctgaagactatatgctaactgaaccttcctcaaatgttgttatagtatctatttttatatatttttttctttttattcctctctctagggaaatatgccttcccttagcatgcattagacataatgatttaataggtccctttcatcttcatttaaatctatcactattgcatggtaatgaaaatattcctactataaattataaagggatatatatatatggatatatatatgtatatacacatata

SEQ ID NO: 7995 - DNA, 1112 bp, Homo sapiens
cctgcctcagcttcccaagtagctgggactacaggcgcccgccactacgcccggctaattttttgtattttttttttttagtagagacggggtttcaccgttttagccgggatggtctcgatctcctgacctcgtgatccgcccgcctcggcctcccaaagtgctgggattacaggcgtgagccaccgcgcccggccaagtaaactcttaaaagctcatttatgagggctggtgtcccttttaggatatatgggtatgtactctgtaaattttgtttttagcagtcaggtacttttaaattatctatttgaacattaacagggtttttttttgttgttcatcttttatggcaaattattttgacttggcattcatatttgttatttactttgttttcaccagtataattccatggcctcagttttgaaatgcaagctattaagcccagcttgtttttaggttttgttaatagggttttctgtttcatttgttttgattgtttgataggttttttgttgttgttgttaattatccctgactgcttccctactgcccaggtatcttaacaacttaatctggtggtgttggatggcttgccttcttcagttacgtatatgcctatggctttatacatatggcactatctctaaaataccaggcttgcagaggttttcttctgcatgttctttaactttttaacagaattcttcattgtgaagattatctttaagaacagtttttctgaagaccatgttttcactaaaaactcaatgacttttcttagtttttccgtttagtgggtcacctttaatgtccattgaaaagaaatataacttccagccttaaacatttttatgtttcttaaagattatgtgtcaaaataattcaatttgccattcctttttcattaggcagagatgctgcttaaatgtttaaattattttttaaaaactttgctaataaaagtaaaatcagtgattgagtctggaaaagggaaacctccctgaacttgaggcactttcccctcgttcagtaaagaggttagatggatgtattaatatttttaaacaccctgatccttttcttcattttgcttatttcattttgcagtt

SEQ ID NO: 7996 - DNA, 1135 bp, Homo sapiens
cttattagccagattgtgtcctctatcactgcttccctgagatttgatggagccctgaatgttgacctgacagaattccagaccaacctggtaccctactcccacatccacttccctctggcgacatatgcccctgtcatttctgctgagaaagcctaccatgaacagctttctgtagcagagatcaccaatgcttcctttgagccagccaaccagatggtgaaatgtgaccctcgccatggtaaatacatggcttgctgcctattgtgccatggtgatgtggttcccaaagatgccaatgctgccattgccaccatcaagaccaagcgtagcatccagtttgtagattggtgccccactggcttcaaggttggcatcaactaccagtctcccactgtggtgcctggtggagacctggccatggtacagagtgcatgctgagcaacaccacagccattgctgaggcctgggctcgcctggaccacaagtttgacctgatgtatgccaagcgtgcctttgttcactggtacgtgggtgaggggatggaggaaggcgagttttcagaggcccgtgaagacatggctgcccttgagaaggattatgaggaggttggtgtggattctgttgaaggagagggtgaggaagaaagagaggaatactaatccattccttttggccctgcagcatgtcgtgctcccagaatttcagcttcagcttagctgacagacattaaagctttctggttagattttcatttggtgatcatgtcttttccatgtgtacctgtaatgtttttccatcatgtctcaaagtacagtcattaacataaaaaaaaaagtttatgttatattttagatcatttgttggcatttcaacaatgttcacagcatcttcactaagagtcgattttgtctcaagaaaccacttttttttcccatccagaggaagaagcttctcatccattcaagtttcattatgagattgcagcaattcagtcacatcttcaggctccacttctaattgtagttcacttgctatttccacatctgcagttacttcctctaataatgtcttgaatactcaaagtcatcaacttcttcaaactcctgttatggttgacattttgaccttctct

SEQ ID NO: 7997 - DNA, 1233 bp, Homo sapiens
ggatcaaggggacactgtgtgtcacatcaattatgaacatgttataaaaggaaattgaaaatgaaattaaaatggaatcagtggagaaggaagaaggagatatattaggacaatcattccaaaatcaatcccaaaatcaaacagacacaacaaagtccaaagtttcaaaaacatcagattggtatgcattgactcctatggatttttttttcagactttcagcccctttaattaggtcagaatggcaggcaaggggtggggaaggtggtgcttcttgagctccactcagcaactggtcagttctcatcctctggcaactggatcgtgctggggttgaagcagttggattccatgatgggaaggtctttggcctctcggtatttcacaagcatctcagctctgcagtgggcccactctcgcatcctgtaatcaggcagataggccacaaaggtgctgccaaggaccgggacaatggagacgccaaagaagaagacaactcacatgttccagatgtccaaaatggggtccttgtcatagcaatgggagtctgggttcttctcatagaagtttttgtcctcaggatctgggtcctcctgccaatgtacggtcagttccgggggctgttttcccaccacagcagacagggcgaccacagtcctggagaagctggattcccagcggaggtgggtggccaagagcctttgcatcaccactgccgccaaaagactgggagcgctcaaacttaacagcccaactgccatgacagatagtcctacagggtctccaactcctatagactctatgtggattttataatacagatgataaagatttgatgcctttccatgaactgtaaaggacaaaattatacaaataatttatctgcttcatgtttacttagtggagagatcaatattatgatggcctagaacagaactgaattttttggccatttttaataaaaccaaataaccagaaggtatttgattaacaaaatcaaataatctgaaactatcagataatttttcttgatggtctggtagtgaaatgttgaatccaagtaaactcgagtaggagaagtagagtcctaggctatatgactttcatctaagattctgtgagaggatggcaaataagcatgttctttggtcttccattaaaacccttttaaaatataatagtattataaccacttacttttggtctggggcttggaccctcattttatcgttg

SEQ ID NO: 7998 - DNA, 1286 bp, Homo sapiens
tttaaggtatatgctcgtaacaggtataaatgaagttgtatcacaaatgcaggttgccacgaaaaccagacagcaatttataggaaggagaatttttctcactttgaaatggctttagggtccttttctgattcttattaacacagttgtctagtttttattaaactttcttgcctagtttctccaaacctataagccctcagatttgcttggttgtatattcaggtaaaactgacaaggtgcaaggttatgtaagctaaaggcagatgcctgcattgaaggccagagctaatggaaaaaccttttatatggtagcaaattattttagttttgtagattagatgacccatccaatgacattttaaatttaagcgtaaagattggctggcttgcatatttccagtgttgtgttggttctagtgaacaataactgactattgagtctccagaaaggtagtggctcctccctgccccagtcttgtaagaggttgcatcctacaaggaagcactgacttagctacatgggaatatactactcagctatatgggcctggtgattatttattcaaaaggtaacatttattgagtagccagtagacataaaagtattttatgggatatttgtggtagactccaagataaacaaaataaatcatgcccaggggatattgtaatccagtagggaagacaggcaagttaaccaataataacaatcaaggcacaatgaaatgagtgttcaggagaaacataaggggagctatatctgggcacagatgaagatgtaactaatattctgataagaggaaaaaggaaactgcttaaaggaagaactagcatttgaactcagccaggattctcagtggcttaaacaggacactgcaagttataggaacagcatgagcagagagcatagcgcatccaggtaatgtcatatacaaaagtggagggaaaactactttaggccagattgtggagtgtcttgaatgtcccaatgaaaatccctggatgctttttgagtaggagagggaaatgatccaacctgtatctgagaactggctggccatagccaggaagctaaaagatgaactgccttaataaatataggtagctttggccagcacggtggctcacatctgtaatccccgcactttgggaggccgaggtgggtggatcacaaagtcaggagatcaagaccatcctggttaacacagtgaaaccccgtctccactaaaaatacaaaaaaattagccaggcatggtggcgggcacctgtagtcccagctactt

SEQ ID NO: 7999 - DNA, 1141 bp, Homo sapiens
tttcagataatatttctagtctatgtatgttatttaatttttacactttggcccattgtttattttccttaaggaattcatcaaatgcaatgaaatttgaataaaattgatcatagcaataaataatttttaaattcagcacaaactcatcttgagtatattatcaatcaggcttcctttagcaataagaatggtgaatcaacatccagtactaaattcaataaatgatgaatactttaaatacaagaaaaagttgaattgcagaaaagaagaggggctaaaaaggaagaaagttttaattctcaacaagaaacactatttagatggaaagcttaaatgtattcttattaagggtatttgatgatgcattttatttgcaaaaataaccagtgggtaattttttctctgaaaatttagctttaataagtcgtaaaatttcctaaagattttggagacgatatttcgattataccagctcttgcttttattttgggagcctggagaaatgagagtgattgcacctgtcaaattttgtatctcatcacttttggatcatcacactgtgactaaaatgacttcagcattttgttggccaccacagtgaagaactattccctgaaagttaatcagttgcctgagagacttttctgctactgaggggaaagaaaggaaagctttatttacctctaatgagctccgttccaagtcagttaatcactgttcccttacacccaagagtttcatcagtatcagagtcaacttgtcaaaacactggttctcagacgtttttttcagagggacttcttttccccacatggccagatttctttacaattaagaaaataagagctacagcgtattcttggttaaaaaccagtttagatgatgttaccaaatgaaaacaagtctgtattagcaaatgccacattatatttagtcgtattctcactaaattctccgttattaaaatgatttctgcatcttgcctggaaaatgcacttacatatttacaagcgttgtatgtcaatgtgcatgttttgaatttcctaacagtgtctaatcttagtagtttcatagtagttatgtaaaatctctttaactgcaaaatactataaaatattacttgaaatattaaagtatt

SEQ ID NO: 8000 - DNA, 1112 bp, Homo sapiens
tgtgtttaaacttcattattaacgatgttatgatgatgggcgaaatgttcaactgctctgaaggggctgaatgaaaatggcctttctgaacatccatttacattaaatattgcattgtatttcagaagattataaaagctcaaaggtaaaagttaccagaaacatgatcatagagcaaattcggatatgaatgggcatgggatcattgatttttaaaaatacctattagtttaaatagctattttaagcatagaattttcaataccttacttggggtgccgggtttcaggatactttggaacctaagcaacctcattcttgaaagatagatttatgtacttaatagtaaatataaatttgaaatacacatttttccacaggtgaattttgaagtcttcatcagtatatccatattaaaacgagatgacagaagccaaagtaattatggcaagtaatggtttttatcttaactataagttatttgctcaagggtgtaatggtcattaccaaggcttttagaatgcagtttctcatttgctgtggacatgaccataaaaaaatttcccagtaggttttctatctgctactttgctagcaatcagcttattgggaacagttgattaactgtaatagaaatgcaatacaaataaaatgtgaaccacatgtgatttttctttaaaatcagtgagatttgaaaattctcctagatctcttgaatcatgcaaatttgctttgcctttatattgtaacccttgtgggttgctaataaccaagcagtttgtagtagagttaactcaggctcgttctagggactcattcatgttcactcactgtacactcatctctggaaatgtaaaatttacttttatactattgttatgtagggctgacaggacaactggatcagtttcattaaaaaggtatgtatgcattagaaaagacatttgtatgggtcatttcaaagagggcttatgaggctgtgaaacccagagctcttaacgctgtgaccaaagatggaagttctctataggaagccatagcactcctaatgtttggtgctatgttttcctgaggagatataaaacgtaataatccaggattgttgccatgtg

SEQ ID NO: 8001 - DNA, 1112 bp, Homo sapiens; identical to SEQ ID NO: 8000

SEQ ID NO: 8002 - DNA, 1112 bp, Homo sapiens; identical to SEQ ID NO: 8000

SEQ ID NO: 8003 - DNA, 1161 bp, Homo sapiens
agtacattatctcctttaaccctcagagcaacattactagtgcatttgttaacctcctcctccacttttattctggataaaaatactcttctgtagctgtaagtgagagtctgggaactgaaccatgccctttagaccccatagtttttgcccataccccctgagttgtcccaccccttgcctgtaagaggcgtatgcttacacatatttaggatttaccagatgccaggcatcactctaaaaatttccaaatattaactcatttaattaactaggccttctgttaaatattaaggggaaaagcattttattattccttttcttcctcctcttttaaacggattttatttttgactactgacgttgtaggtaaagaagtatgggtgtttgaaatttttagtgtgacattgttgaatgtgtatctgcctttaatatttgatggtcttgatgagtgcctaagttatttttgtttcctttattttttagtttgtgggaggtatctgaaagccacttcaagtacccaattgtggagcagtacttgaagacaaagaaaaattctaataatttaatcatcaagtacattagctgccgcctgctgacactcatcattatactgttagcgtgtatctacctgggctattacttcagcctctcctcactctcagacgagtttgtgtgcagcatcaaatcagggatcctgagaaacgacagcaccgtgcccgatcagtttcagtgcaaactcattgccgtgggcatcttccagttgctcagtgtcattaaccttgtggtttatgtcctgctggctcccgtggttgtctacacgctgtttgttccattccgacagaagacagatgttctcaaagtgtacgaaatcctccccacttttgatgttctgcatttcaaatctgaagggtacaacgatttgagcctctacaatctcttcttggaggaaaatataagtgaggtcaagtcatacaagtgtcttaaggtactggagaatattaagagcagtggtcaggggatcgacccaatgctactcctgacaaaccttggcatgatcaagatggatgttgttgatggcaaaactcccatgtctgcagagatgagagaggagcaggggaaccagacggcagagctccaaggtagggtttgcttttggca

SEQ ID NO: 8004 - DNA, 1110 bp, Homo sapiens
tgtagattgctattttttgagcttctagaacctgtaggaattctgtaaataaatgctgaatgaattaaatgaatgatttggattgaatttggtatctcttcccatacgttctgttaaagtgctaagtttatgtttgattcaaataatagaaaaaatatgatcaccttgtgtggcctgaatcagagacttggtgtaattggaagatggcttttttgaagatagcttagtcagctaaattagaaccagattaattaccagattgaaagtccctttgaataaataaaatgtaaatttttaagttgccatatataatagtgtcttttgtgagtttttttttatctctttcatctgtagtttacaaaaattttacctgtaaaacatactaattttaacacctttttctgttgatcaggtggattttattttgttaggtggtgatctttttcatgaaaataagccctcaaggaaaacattacatacctgcctcgagttattaagaaaatattgtatgggtgatcggcctgtccagtttgaaattctcagtgatcagtcagtcaactttggttttagtaagtaagtatatttatttacttgagtgagtgattacttgtgtatggtatttgctgtataagacacgtaaacacacaactgttttgccttccatataagctattttcttagtaaatatcattctttgaatttttttgtacatcattgtattaatttatattttcctaattaatagtggaactgacccagctactcgggaagctgaggtgggaggattacttgagccccagaagcagaggttgcagtgagccaaaattgtgccattgcactccagcctaggtgatagagcaagactccatctcaaaaaaaaaaaaaaaatacatggtgggactgaatatcttctcaggtttatattgtacattttggtatcctctcctgttcgtatcctctgcctattttaaaaattgagatttttttgtttgtttttctacctgaattgcagaagttacttatatattctaattagtaaacctttgtgatacatatattttttcccaatcaatggcttgtcttttgactttgtttatggactcttgttga

SEQ ID NO: 8005 - DNA, 1172 bp, Homo sapiens
ttgtgatttttttatcagaaataattttaatgtgtgtatacttaaaaacttgacacgggttgtacagaaactggtatttttggtgctgatacaagagaaatgtatttttaaatatcccacatcctggatctttgttgggtatttagtatattgacatatatttttataaggtgaggtaactcagaacttaatttaaaagtcttaaatattctgatacaattcagctgtcttctctaccttaccatagccagttgctttcattttaaaccagagcaagtaacatattagtgacttgaatcttcataagttaaagtaaaaaacagcaaaaaacctagatctttgtcttttagaacacagaccattttcaggaaagcagttagctaagtgtttaattcatgaatattgtatactgcatcccctaccacaatttacacaatcctgtggatagtcctacctcaccctggtcaacctacatgatccttaagctaatggcgaatcacgatgaccttgtagacatgcacacaactatacctttgtccaacagatcataatatatctgctatccaactggttttacctgcctaatcctactgatttgggcactgcttgtatagtctctcaagttcacaggaaatgttgattttctaaggtcctcatttttacagagtatacaggcaaagtgacaggggaaaaggaattagtctaagagtaaggggatgattattatattgaggctaaaaccacaaagtggctcaggctttaaaaaaaaaacactgtggataatgacaaaaagcataagtaaaaatatttgagaaaaataaagtacaagttttgaacaacacaaaaggcatgaattcattttttacctgtgtatgtctttcttggatccagaacattattcatccagcacgcacttagttatttaacatctactcactcagtctctccagcagcaattttgcattgtctatctagcccccctgtgattgttcccaaagttttgtcttctcaacaccacaacactccaggggaagggaactaaaccagttgctctttacttcagttaaatttttaagatgtccaccaaggcttatctctttcaagccatcctacgtaacccagtcaccctagactaagtaataatgttatttaatcaaagattaaatatttat

SEQ ID NO: 8006 - DNA, 1147 bp, Homo sapiens
tgtgaaaataactcagcattcttccagaaaaatcatcttctaccagagaacctgttcatcttggttcttttttcttagaaaatagagaaattgactttagctgaaagctcaccctgtttgaggctttagagtttttatgcttccctatcccctacctacccccggcccccaccgccaatgctagaccctctaaatatggtccccagccgacttcggtccaggaatgtggccacggtcattctaactgtacctcgctgaagtcccagtctcccaaggtgccagagaaggtgtactcttttgacatatgacaaaagacctgtcttaacaatttggagattatcaacatttgaagactcgtactgtgcttcatcctgtatccctaaattacaattaaagtctttgggacagcctgagataaatgtttcaagtttttctagccaagtggctttttatggagactgttttgttttgttttacagtattaaaaatctccatgccaaaatcatagagaaagatgctatgattaaggtcctgcagcagcgatctcgtaaagatgccgggaagacagactcctccagcctacgtcctgcccgctccgttccatccatagcagcagctactgggacacactctcgccagacctctcttaccagcagccagctggctgaggaaaagaaggaagagaagacctggaaggggagcataggtgagccccacacctctgtcagaccatgattggaaaagcaagaccagacagcttctctgccactcatgggacacggaaatgtccctgaatagttcctggtctcagtttactcatctgtgaagtggggagggaaatcagtcatacttcagttatagatatgtggaagcattgtgtaaattctaaagactgcaccactggagtagctcttagccatgggttgactcagatcagaattatctattattgttgtaagttgaggtgacccttataacacaaaaggctctcatagaaaagcctagagacatcacgcctctgaacttggctctgctctagaccagttgtatgacggctccacctctgcttccacgtctggaaagggaggacagtgtctgcctgctttaccccatggggagtgggagggaataatgggataatgggggg

SEQ ID NO: 8007 - DNA, 2255 bp, Homo sapiens
gtggaatttcagtacagaacactgacaaacaaggaaagcggcagagaaagaagaaagacctagaaggttgtagatgggaaatcaggaatgatttgaactgataaagatttcagactcataagaacacattttataaatgttaaacacaaaaactacatgactgaagatagaagagaatgcgatggattttattacacatggtggaagagagaagaggcgtgtaggtttgcaaacaaagttaagaaataggaaactgaatttttcattgtacagaaaatgtatctcttggggagggcctgtgtacccccattctctgattataaacagataaacccaaatgtggatcatccttggaatacccccattctccttgcctcttagcatgtttgatttaagaaaagcctccaggaaatcttgagagcctgtcttggcataatgcagtgtcacctgtgccaaccatggggtgtcccgtgagtgtgagtgtggcagtgagaagaagcatcgagggcgaggggaatatgaaagttggtcttcacctaattacctgtttggtttggattttcaagagatgattgggcttcttagcttttctgaattctgcagtattttctaaacaggatagattatgatctcggtccccatccatcctaacttctgagttcatctctgtctctgctttacagtctttaattttttgttgttccttcatttttttctttttaataagacatagcagaattccttaggtatgggatttatgagaccagtacctgaactgtcatcattcctactgtgtttgatagtgaccagtaggacaaagccacgtgccgacttcctggctgcttcacctttgcatagctgggttgcagctgcgaacctcattctgactgtgaactaagcaagctttgaggaggcaggagattccgtgggtccctgtgacatattgcattaagatcgtggcacttgcttttttgtctttcacatcggctgtcttgcaaggagcttgacatttccaaattccattgctctgtttggggaagacttaggacagcactccaggaaacagatgacaatttacagacagttgtctcagtggtttccagaatctcaccagcctcccgtatagcttcttgtattgaggctcatgagcgtattcacactctttcctcccccgcgcacgcctctgcttgctctcgatcagcatccagacctccgtggcaccaggttgcctctgttgtgaacttcttttgtaacctaccaggccagttgtatatacagtgttgtcaggtttttccgggtttcagttttgaggcagtttattcaaagtgagacagaagtgccacggaaaagaggcaggagtgtgttaggtggtgggtccattagacctctgctgtgacattgcatattcagctctgcagacactggcttcctttacaaatctaagagatgctggattagaaaagaggagaagctcatcgggccatcagagagatgctcctacagggtcctgatgtttttgtacctccaggtcagctggatcgctgttttcccagttccctttgctcatgcttacttagaggaagaaagaaaggggggtacctcttccaagtaccttctaaatgaaacactcaagagagtgctactcaggaaactttgcttggatcctaaaatggactggtcttgggtgtgtaaccccggtgaagttatagcctccccaaattgaggtgacagaaggaagacaagaggtgtaagctggagagggaagggaagaaatcagtggctttggccagcctctgtgccacccagtacgacagaggagtgggaactggccctctggggctctgcttggccataggcactgcacattgtgccacctgctcatcacctcctctagtctcacactgagcatcggagtacctgttgtgcagacaggaaaactgaggagctctgagaggctgagcatggagctcaccccatgccatagggtgtgggaagagggcacaggaggcctcatccatgggggaaagggttgaggatggacatgggtggggagagggcatagacatcccttcctaatctctgttcccaccacatttcataggagatgagttaggagatgacagctaactctcttaaggacattttgaccccagtttatgttggggatggaccagaaaggaaaatgtctagagataggaaggtaaatcaactctgccagcccctaccatcaggtctgggccaccccaaacttgggc

SEQ ID NO: 8008 - DNA, 2703 bp, Homo sapiens
ttgggagagcaggcagtggtggagcccttctgggtgcagtcctctggggttgctctttggaactcatgtatgagtttgactccacaaggcttggcatggataccaaaacagttgcaacaaattagttctgaacctggaacagagaattcagtgcttctgttactcaggaaggaggtgttcagaatgccccgtgcagagcagccagtcattactcttgtttgttctcacctgggtgcgcaccctcatgatgcagtggctgtagcaccttcatgccaggtgctgagagaatgggaaattcttcctccccattgacctgagtcccagagacttagggacacagacttcaggtgaggctgcggacctcagaagcagtggataatagattggggcattaaaagcttttgaggcagggggctcatgttttgactgcagggagttatgctgagcaaagagatgtgtttttcaaaaccagggttcaaaaccagtgtccacgctggagtaagtggagcatgcttctctgtgttctctgaatgatcttgcactcctcttaagcaaaggagtaccatgaccatagtcagtgggatcccacaaatgttcttaaatgggtaaggctttaagtagccagagagtatccagcctaccattggcttctccacatcctaaaacctgagacagccttggtatatgctttataaatgtttcttttcttgttgtttaagtaattaaagtgtttaaaatgtcttcattagatgtgacgattgtttaatgagtttgcctctgacgtgtggctccatgggagataggcaaagtaattaagaagttaccagaaattggtcggctggggaaatgcaaaagttagcatttcagtagtgaatttctcctggaacaaatgagcaatttttcctctttctcttaagtagtatacccttttctcacttagtaatttaatggtatataaagacatgtgtataagtgagtgcatacatatgaggtatgactatagggttgtttgtgggaatttcttttcctaacatacagaagatcaaagtgttcatctcaccccgccctccttaaaaggtgtcttttgggagactatgtgctcattgactatagtgctgccaagtaaaaatatcttgggaactcttctactagaatggccttcagggcttggcatgttcctttggtttacccttagagatgagaaatcctcctcctttgaggatggatttaagttctggaaataatctcaagtgcttgatagcacagttggatgaaaaaagatggcaattaaggtaagttacaccatttttgtttctaaaaaaatccctaagaaatttcttggaatgagtctttggcctcagagcctctcaaagtgtccacttcaaggggggatcatcctcattagcacacagatttttaaaaatcaattctcttgccatgcctcctatgtgttcacatctctgcatacactacagatataagtgcataatcattcatataaacatctggtaggtattctgtaaaactgtgtttactttagtgcatgttattgtcatgttatgatgtgactggggtgtttctttgtcatgaaactttgcttcttcacagaattagaatactgctctctctatattgaactacatatacagcgttttcttgtatcagcccccaaagtctggatgcccggtgttgtgtttacatgtgattgtgcctaggagtctgttcacatagagacacctgtaagtatttattacaaaacggaatgtaagcaaatatatccacattggttttatttgaatcaaggtgtttttttgttttttgttttttttccttttgaggaggaacagggagcctcctcctccatgagcacttacagaattgtgtaaaattctgtgaaacagtggtaagcatgggcacccgatttcagctgtcctgctgccgctgccctccaacctgctctgtgtgtgtgtgtcgctgtgcttggtggcagtgtgccgtgctcgtgccggctcttcccagcagactggtatctggctgtaacgtttgacgtcttcatattgccagtctgtattgaggggtgatgtacatggccatacagccaaatgggtctgtgtaccagtgtggggattccaagaacactgcctgtcccccacagcaaatattgatgctgttggtcagccaaagattttcctctcctttgctgcttaaacttgtgccttaatattgtacataataaatggataaaatggcaaaatgactcttttctctcgcttgctcctttcttccttaaagaacttataaactgatgctcaataaatgtttcatttcattgtaccccacttaatgttttgcttcagaggccctcggctccccccttgtgggcctcacgctgacaccaacacgcagctcttgactctgaggaggaaatgaatcatccagaccatcgcagcttgcagcccgcccactcctggctcctccagacaaataaggagaaaggaaacgcagggagactgtgtgcctgggtgtccactttgatcacatgtgagtgtccacttttgaggttccttagttcagagcctgcaaatgatcactgtaaactggctctgtctcaggaattcacccaggcagcctggagtcagccatggctctctgagcctgaggatggaaatgggagatgggagctgttttgtcagtgtcttgggg

SEQ ID NO: 8009 - DNA, 1084 bp, Homo sapiens
tgaacttgaaaactctttttaaaaaatcctggttttgcaggacagctacataatgaatgtatatattaagactgtagctgaattgcacatgaaatcagattgccaacttcttgactttcaatgttagacatttatccttaagttgtgagcgatatatgtagcatgctgtgaaatgtctgttatagctctttaattcatcagtattaatacagaattatcatttgcgtttcttggtactttttattcaatgtaatcagaagctgtgatgttttgcctttgtagtcctgtgctttgttactgtaattttttttttttttttacgaagcacgtgactggactaatgtaaggcagatgacgtgatctttaagactgctatatatatcagtctcttactctataaggttttaaattagaataagcttttatcaaatagataattgatgcaatttaggattcacgcaagtttcagtgtcaaatggcggtcttatagtttcaattctgaaaatagcaaacttaataaacagccactttaaacttgttctggcaaaccagaccctgctgtagatatagtctaaggtagttaaccatataagccttttcaactcttaatgccctccacatgaatcagcagttaagaaggttctagaacccatgaaagcttttgtatgtattactaggttttgtttttcttatgtttgctgattttacagttctgactaaagctgacctaaatggatcagtttatgtgtaatattctagtgctttaatgactctttttttctttggagggagggtaacattatttggacagatgcagaaggaactgttagtgagtcaagacaaacacatctgaaataaaggaactgtgtattaacatgttaacaattcataactgcactttttatgacattttgaaaatctatttataggtacagaacaatgggttttgttaaactgtatcacatttatacttgcagaaatttatttcattgttattagtaggaattttattggttcaataaaattggcaaaactgaacaccaatcatttgcctactttgtttatactggagtagcattctcgc

SEQ ID NO: 8010 - DNA, 1062 bp, Homo sapiens
ggtctaagcagctttcacaatccaaaccaaacatcaccagccacccgctgataagtcaccagcatttactttcctgagttactttttctccattcattgagactatggattcatcccaactccttctaaatccctcaaccatccagctatattttggctaacctttgccctagacactctaccagatgttaatgcagtatcaagtgtaaattgtgtcaccctattctgttctacccttttccctgctgccgaaatatcttgctctcctctacctcatccccaaagagcctataaattcagagtatccaaccttttcatggattcactcactgttgttcagtaatacaacttccatattttaaataaatcataaaagatttttgccttctatcaaagtaggaaactttatatttatacatgatacagaaattgaactatttctatcgttcagaatttagcatataacaggattttaaagtgattgaattgccatcctaacttggatttgtattaggttatgaatgaatactgttgttagtccaagctatttgaatgtaaagttaaaattctccagcaatccagaatgacttgtaacccttcagtggaatgggaaatttctggtatgcaaatagggtggtgttccagacatttgttttattggtggtgtttgggccttgaaacacatttctaatagaatgacatatggcaaagggtatttagatggtcctatgggatcacagaagcccatatgatttaaaatatagataaaataacacaaaattgggtacataagggtttaaccaggctttcctgggttagactaagcctctaacctctgttcctatcctgttcttatgggaggaaaaaaaatgttccatgggatgaaaagaaaatgcattgactttgtagtctttattctcctagccgcacttcgggtatatccagaaggaagaggaaatgcaaagaggaagaagatgtaatagttcttctctccagctaggtgcacttgaggttgttcataaatgtaaaattatgtcaggtttctaacatgggacactgcac

SEQ ID NO: 8011 - DNA, 2203 bp, Homo sapiens
gccataaagaaatttttttcaaatttctttattgcacaggcttttttcagttttacctttctgggattgaacaatgttcctttcataatgccaaagcattcccttccccagaaaaatctccttggacaactggtttaaaaacgttattaagtcataggggaggaataagcggccaaaaagtcacatttttgcattggtttacgttgcttgattagactatcttcagagagcacattatgtgtttatagctttaatttgtattatgtcaatgaaccagtgaagtgcctaaagagatgcttacaactatccagtaggacacaactgcactgctttttaaacactttttggttagttaagggtgacttgaattgtacacatacatgctaatttttgaaaacttatccatttttcatagtaaataatatagataaaattttctgttagagttcccgcaaatatttcattttagacttacttgtgatataagatttaacttttcttttgtgaaagaatcgtgaactagtgtttcatgaaatcattttcctcttccatttatcatcctcctctggtacaatatattgggttgctttcttttagattttgttccagataggaaaacaaatatgactgtatacttattaacataaggtagttctgcatttttggattccaggatcctgtttgaaatcttccatgtgaggaaaaaattactaatatttttaaagacagggtggtttatttaaagagattattcagagaacttgtgccatatctcgtctgttttattgcatatgccatatgttaacttttattcaatattacattatgtagatatgtaatacaaagaaaatatttaggagaatggcaaaacacaaatggcaacataaatgtccatttgacttacctaacttcacaactttcaagttgaggatgtcatttattcttgaatttgtttttttactagatgctttcaattaatagccctatatttttgtgcaggcgaactgtataacaggataaaaaatgatttgtatgtattgaaaaggaggagaaattctcacagaacaccatatgagctttagaccaaaaggggaaacaaggtttaagtaactaaaatggccacttagtttgtgtttatttttttccctggaaatgtaagtagttggagtttaggctatggaaatattagtgcctttaatagatctctttccttgcaaagtttctttttagctcagcattgatctatcttatcaataggaaaataagttgacttggaactataaacaaaaacaacaccatatatttatgaacctcagtgaaccagcctagaaaaattgacttctgcaggtgctaaagcacctactaatacgcagcatgcacagcatttcaggttgtgaataccattttacaacgagtttgctgttaactctctttatccaatgcaaacttgaaattctgatgcggttttccagggtggtattttttcagagtattgaatttactatttagtaatttatagtatagctttttatattaaaatgtgatatttttaaaagagatatctggttcaattggtataatgacgtgattatgcaatatgctgatctacaccttgcgctcacattgtgccaaacttaaatgtgcaagtgtacgtgagaaaagcacatgtgaatgtgaattctttaattctttgcttattatgttaaaattagtcttcatagtccactgatgtgtatgcttgaataatgtctatttactttggaatttcaagatttccagcttcaatggtaatttataatttctcagatcaccttaagaaatattgagatactctcccacctgaaaataatctgttctttaacccacctgactatgggagtagccaggcaggtgcctcactggcttcttcagacgaggcttcctcaggtggatatatgactattaggggaaaagaggcttttgagacagcttattacctccttcccctttttgaactaagtacattgtctcagtcccagtatgaatttgtcccatttggggtatttttaaaataaaagatggctaacatggaatctggggcatagccttggcctttaattatggttgtaagcccaaataatggcagagaaacacagggctgtttttacaacagaaaactcaatataagttttatataagaatcctataaaatttgaaccagagc

SEQ ID NO: 8012 - DNA, 2169 bp, Homo sapiens
attgtcttgttaattatttgttgtatttggaaaagtaccagtttcaggagcacctacacagcaggttattctttggaaatactcaggggcactgggaaagccagtgaaaagattagtggtgtccacagtcccggtatttaatttcactgatgggttggaaaggtgccattggttccaacagctgaaaaaacatacactgcaacatttagggaatgatttgacctggctttggtcaggattgcctagttgaatattttatgttttgctcttgcaggaacctattcacaacagatacaaagaacttcttgctaaacgagcagagcttcagaaaaaagtagaggaactacagagagagatttctaaccgatcaacctcatcctcagagagagccagctctcctgcacagtgtgtcactcctgtccaaactgttgtataaaggactgtaagatcaggggcatcattgctatacactcttgattacactggcagctctatgagtagaaagtcttcggaatttagaacccatctatgagagaaagttcagtcactttatttattttaaatctctctaggatgagtttagaactgtagcagtgcaggtggcttaagtgaagtaactccatatgtaattacatgattatgatactaatcttttaagtatccaaagaatattaaaatacttcaatcctggattcacagtgggaacaagtttctattaaaaggcaaatgctgttacaaatttttggcatctggtaatattaaaaccattttagaaatacactctgtgctcactgtgcagaggaacatcagttttcaaaccaacactgaaattctgtggcatcacatatattgggccttgatgtcatgacagatcaaaatcatttgatatccctttctccattctaggtttttctttttttcagtaactgatttaccttgatcacttttcaacttccatattcttcatatagtaaaaggcaaagtgttgaagatactacggtgtggtagtagttgaaaattattgccgtcattatttacatacttaagacatattagcaagttgatccaaaatgggaggccttatagatgtgcttgggggaaaatgaaggggagaaagtagccatacaggagttcaaagaattccatgcccttcagattagcccaattaccagaaacatcatgaaagatattttaaaaactaattatttactacagtgtatttcacttgtcttgtgtgtctgaacacacagaagctaattagcaagtttttaagaagtatttaaaaatcttactaggattgacattttttctgaattctgtataaatagcttatagtgagaagtactgtgctcaaattttacatttttttcctttgcaaattctgtaatttcactcaacgattaagtctaccaaagaacacactgcatgtaaaagatgtattacaatctcaaagccagtaaaagaaatcttgcttcactgttcacctgctacaagtaagagtttggtgctggtagaaacatttgactctgatgtctattttattctacataagagccatatgtaatgtactgtaacaaaggagcttcttgtccccttggtcttttaattaaaagaaattccaactgacttttaaactttgttcttgtccaaagttgccatttcttttttttccccagaaatatttggaaattattggaggaatatgcaccccagatgaaaatgttcagtttgtacccatttttccttaaccaacacccaaatcaaacaattaaaatatacagtgtttttccactcactaattcactatacagagagtctgaaccttagcctccctcttggtcttgcagtgaggaagtttctattagtatatccaatttagcaaaattggtaccaaaatgatttctttggtaattgtgtgaaatataagctttttaacagggcatttaagtggctagcaaatcagtaattaaaaattaagctttctactccaagtatttcacaaacgcatctgccattttcctcatttaaaccttggttatcttggcctgataccacataaaagaatgtagaatggctgaagagatcaagaatttaaagcttctagtcttaacatacttgcatccacttcaaattcaaatcaaaagccagggaaatctaagtgcaacccta

SEQ ID NO: 8013 - DNA, 1165 bp, Homo sapiens
cagttcctgttctcttatcacagttctattcctccacactcccttcctgctaggcacgggaatttgaaagggcagggaaaaatcggtgaaagtttgtcttctacttgggtaatccaacaccaccgcatccagtagtatataattctttttgcatgtatatcagatcctccccaatccctctcccatacctctttctcacttttctctcattatccggtcctcttgttttccttgacccccacattcctgtctaaatcatcctcctggcctcaggtccttatcgccttcctgagaccctcatgtttagtgttccctcattcctcttacacctaggatttctcctccttccataagggtctggtccttcatccctcccgcttcaccagaccccctcaccctgggagccgccacctccctttccccaagaccagatgtcgcgcggccggacacagccagcacggagagtcgatgccggcgtctgagctgcgcagtggggtcttcccgctgcccagcagcctacaggcgcggtgcactctgggggaacatggccgcttccggtctccctcccgggccggcgctggcctgactgcggccccggtccgtagcactccgccctccgcttctcccgccctgtagccgcgaagactgcttcagcctttccctgtgctgcccctgccgcgcgatggagaagagctcgagctgcgagagtcttggctcccagccggcggcggctcggccgcccagcgtggactccttgtccaggtaaccaggacgcccagggccccgcccagcgtccgaaggggatggagaggggccggggacctgctggattgttgccccaattcgcggattctggtttctgaaggctacgccggaattccttccccgggacttgggaaccacttctgcctccctccctggggcgtggaggctgaggaaaaggaggttaaaactcgctgcttctttatcgattcctctacctttcatattccgatctcgttttctccccgatggaggtggtcccagttaattactttctcctgtctttcattccctctcaaaccttttttaagacagttccccccgcccccattcttttccccacatttcctgtctttctctgtcactttttccaaaaccatcctaaagtcagtctttcctcctc

SEQ ID NO: 8014 - DNA, 1580 bp, Homo sapiens
aaatacacatacacacacacaactatgcctcagaaaagttaggcttttacaaataaaaagaataagattagaattaacaagtagagagaataacggtaggcagagtcagaatcaggaataaatatcagtgaatcaaaagaatgaaaaatattatgtaataaaaattagcaatgtaatgtaaacgtttgataaaagagtatctttttcttttatctcttactgttgacctctgtgcactgtaataaggtgtgttgctggatcttcttggtcgaggtccttggtgaccttagtagtaataacagcattgctgacaccctaattgccctctgctggaacagaaggtagttttccagtgtaccagtcccttagtctatacagcacccttggtttaagcacacttgccatcatctggtatcctgctagactagaatctcttaaaagcaaattggttttctttcaaagaccaacttgactccaaagagagattcagaatcctacttctcctgctgctgcataaagaatctcaaccttcattttatttgaacacggaccaaagtgttcctgcttctgagttgtctgtaagctaattctgcagatgttccattcagatttaaagcttttttactgcataggatgtggataggaagcctaactattgtatctgatggcaaggcatatgttgcagccacagtactggctatggtccctttgctgaaacaagctacagaagcactgattcaagttgtgcttgtgcttgaacttttaatcttctagatttgtgaggatggctctttttccttcataatggattacaatgtaagcaagtcatggccatatactggagacgggctaaagctgcttttcccttaaagtaagtttcctacagataaggtatttatgagcactgagaaagtcaggacatgtactctaaatcacacagaatgttaattccacaggaaggcaatgccagacattgaaagaggatcacattcaacttttaatagtagttcaataacaaaaccttagcttttcaggaacaatgtgaagatacattagaattgccacatccatatcttcaaaacacgcaacctctgcaccctaataactgcttacggtataatcagtatgatgatgagattgagggggtctaaatttaagttccttatctcctgagttatgtgaaaatatccctcagtacaaaacatttgtgtgtttcacagatgactctcttgttttgccgtaatgctaccaagtttatggaaactagtcaactgaaggatttttctgttgtgttatgtgtaaatgtctgaacagtaaaatcatctgtgtattcctgtaacattcacgaagtatgaggaagtgggtttctccttgtttgatgtgagtggttttgcttgttgcatgggttccctgtgctttgtaacttgcatgaacacaaccaggtttctcaacaatgatttgtctgctgactcttttcagagatagtgaaggaaaaaaaatgtattaaaaccccaaattatctaggtttccaagtaggaaaaataaagatacatatgacttttattattattcgatgataa

SEQ ID NO: 8015 - DNA, 1204 bp, Homo sapiens
gccgcggccgccagctctggtcaggggaggggggttgcgggaactctagctggggtgggggtcccgaggcgaagtggaactggagtcgtccactccgccgcggtgaccagctccccactcctcccagagtccggggctgagatttgtttttcccttctgagtttctctctgcggttgcagccccggggggcgtgctttccctccttcttcctttctttcttcccggggttcccgagaggttggcgggagtggaggaggggtggggaggaaggaagggggtggggaaaagtcgggcctgggccgcggtgggcttgcacaatgcgcgcgcctccgcgcgctccgcaccttcgctcccgccgggccgggctgggaaagggggaggggggcctctggcatttgtgtgtgggtgtgttgccagcggcggccgagtttgtgaagttgagccctgggcccctttcctttgcggcctctcggtccacttcagtctcctgggggagtcaaataattgttctcttgttttccagtgttgattagaggtgggggtagaaccggtccatttagttttttgctctttctttccttcccccctcccgtttcccctccccctcccgtaagcatttattttcctcgcggctcaggcgatttcggaatacaggtttcgggcttcccctgcccagactttcctggaagttgtttatggagttctttcacccctgctcttcccttgtgtgttggaacttgggccggcttgctcttatcaaacttagtaggtcgcgtgttggtttcccagttgtagactattatttacagtcggctgaaacgcttttgaattagccacatctgtacgttgcgcaggaactgagttgcgctttacagtaccgaggttttaacacaagcctttgataatacactgcaggttgactcataggccaagtcctgcctagttcaactgtgattaaaagttaatgtttgggaagcgatgactaattctaggatcgccattgctttttaattcttattgcggatatgaacatggctgctattccacatacacaatgttcgattattgtgccaacttgattcagcatagaagtgaaactgtttataatgagtgttaacattccaataggtcccagtggatttgttttgtgtagggttctctctttttctttcttttttatttcttcttctttttttttttttt

SEQ ID NO: 8016 - DNA, 3651 bp, Homo sapiens
ttattggatatctgaacaatgttgaagcaaaagtaaacttggcattgttattttgttatctgtgagttgtttgacctgatataaattctaggtatcagtttaggtcagtcaggagcgcttttctttccctgtgcatttctctgtgctcatatgatacagccctgatgttagcttttcaaaaaggactttgttatctctgtgtgtttccactaggtgatactatcaaccaaagcaccctgccctcacagcagaaccgtttcccagactaccttgaagccattcctgggacaaatgtggaccttggaacactggaaggagatggaatgaacatagaaggagaggagctgatgccaagtctgcaggaagctttgagttctgacatccttaatgacatggagtctgttttggctgccaccaagctagataaagaaagctttcttacatggttatagagccctcaggcagactgaattctaaatctgtgaaggatctaaggagacacatgcaccggaaatttccataagccagttgcagttttcaggctaatacagaaaaagatgaacaaacgtccagcaagatactttaatcctctattttgctcttccttgtccattgctgctgttaatgtattgctgacctctttcacagttggctctaaagaatcaaaagaaaaaaactttttatttcttttgctattaaaactactgttcattttgggggctgggggaagtgagcctgtttggatgatggatgccattccttttgcccagttaaatgttcaccaatcattttaactaaatactcagacttagaagtcagatgcttcatgtcacagcatttagtttgttcaacagttgtttcttcagcttcctttgtccagtggaaaaacatgatttactggtctgacaagccaaaaatgttatatctgatattaaatacttaatgctgatttgaagagatagctgaaaccaaggctgaagactgttttactttcagtattttcttttcctcctagtgctatcattagtcacataatgaccttgattttattttaggagcttataaggcatgagacaatttccatataaatatattaattattgccacatactctaatatagattttggtggataattttgtgggtgtgcattttgttctgttttgttgggttttttgttttttttgtttttggcagggtcggtgggggggttggttggttggttggttttgtcggaacctaggcaaatgaccatattagtgaatctgttaatagttgtagcttgggatggttattgtagttgttttggtaaaatcttcatttcctggttttttttaccaccttatttaaatctcgattatctgctctctcttttatatacatacacacacccaaacataacatttataatagtgtggtagtggaatgtatccttttttaggtttccctgctttccagttaatttttaaaatggtagcgctttgtatgcatttagaatacatgactagtagtttatatttcactggtagtttaaatctggttggggcagtctgcagatgtttgaagtagtttagtgttctagaaagagctattactgtggatagtgcctaggggagtgctccacgccctctgggcatacggtagatattatctgatgaattggaaaggagcaaaccagaaatggctttattttctcccttggactaatttttaagtctcgattggaattcagtgagtaggttcataatgtgcatgacagaaataagctttatagtggtttaccttcatttagctttggaagttttctttgccttagttttggaagtaaattctagtttgtagttctcatttgtaatgaacacattaacgactagattaaaatattgccttcaagattgttcttacttacaagacttgctcctacttctatgctgaaaattgaccctggatagaatactataaggttttgagttagctggaaaagtgatcagattaataaatgtatattggtagttgaatttagcaaagaaatagagataatcatgattatacctttatttttacaggaagagatgatgtaactagagtatgtgtctacaggagtaataatggtttccaaagagtattttttaaaggaacaaaacgagcatgaattaactcttcaatataagctatgaagtaatagttggttgtgaattaaagtggcaccagctagcacctctgtgttttaagggtctttcaatgtttctagaataagcccttattttcaagggttcataacaggcataaaatctcttctcctggcaaaagctgctatgaaaagcctcagcttgggaagatagatttttttccccccaattacaaaatctaagtattttggcccttcaatttggaggagggcaaaagttggaagtaagaagttttattttaagtactttcagtgctcaaaaaaatgcaatcactgtgttgtatataatagttcataggttgatcactcataataattgactctaaggcttttattaagaaaacagcagaaagattaaatcttgaattaagtctggggggaaatggccactgcagatggagttttagagtagtaatgaaattctacctagaatgcaaaattgggtatatgaattacatagcatgttgttgggattttttttaatgtgcagaagatcaaagctacttggaaggagtgcctataatttgccagtagccacagattaagattatatcttatatatcagcagattagctttagcttagggggagggtgggaaagtttggggggggggttgtgaagatttagggggaccttgatagagaactttataaacttctttctctttaataaagacttgtcttacaccgtgctgccattaaaggcagctgttctagagtttcagtcacctaagtacacccacaaaacaatatgaatatggagatcttcctttacccctcaactttaatttgcccagttatacctcagtgttgtagcagtactgtgatacctggcacagtgctttgatcttacgatgccctctgtactgacctgaaggagacctaagagtcctttccctttttgagtttgaatcatagccttgatgtggtctcttgttttatgtccttgttcctaatgtaaaagtgcttaactgcttcttggttgtattgggtagcattgggataagattttaactgggtattcttgaattgcttttacaataaaccaattttataatctttaaatttatcaactttttacatttgtgttattttcagtcagggcttcttagatctacttatggttgatggagcacattgatttggagtttcagatcttccaaagcactatttgttgtaataacttttctaaatgtagtgcctttaaaggaaaaatgaacacagggaagtgactttgctacaaataatgttgctgtgttaagtattcatattaaatacatgccttctatatggaacatggcagaaagactgaaaaataacagtaattaattgtgtaattcagaattcataccaatcagtgttgaaactcaaacattgcaaaagtgggtggcaatattcagtgcttaacacttttctagcgttggtacatctgagaaatgagtgctcaggtggattttatcctcgc

SEQ ID NO: 8017 - DNA, 1181 bp, Homo sapiens
agaagatgtttcaggtaaaacaaagatttaaaaccaacatgaactattaccctttttttttaatgaagtggaaacaatttcactaaagttattttttgttattaggtctgtcactggaagaacaattgaggaggttgcaagaagaacgaacttgtaaagtgtgtatggacaaagaagtttctgttgtatttattccttgtggtcatctggtagtatgccaggaatgtgccccttctctaagaaaatgccctatttgcaggggtataatcaagggtactgttcgtacatttctctcttaaagaaaaatagtctatattttaacctgcataaaaaggtctttaaaatattgttgaacacttgaagccatctaaagtaaaaagggaattatgagtttttcaattagtaacattcatgttctagtctgctttggtactaataatcttgtttctgaaaagatggtatcatatatttaatcttaatctgtttatttacaagggaagatttatgtttggtgaactatattagtatgtatgtgtacctaagggagtagtgtcactgcttgttatgcatcatttcaggagttactggatttgttgttctttcagaaagctttgaatactaaattatagtgtagaaaagaactggaaaccaggaactctggagttcatcagagttatggtgccgaattgtctttggtgcttttcacttgtgttttaaaataaggatttttctcttatttctccccctagtttgtgagaaacatctcaataaagtgctttaaaaagattgtgttaccagaatattttttctttcctgatttaaaaagtaattttcatgtgtcttccttgtactcaaatgccagctattaagtaaaaaattgcattcatgagaaattattaagtgttgttaaaataatgttatctgtgaaatttctttagatgacagtgtcttgttgctttgtatgttatagatacaatgttggatgaaaaatgaatccaacattaatttcagaaaactcttaaattagataaataggcattattttcagacagtagtgtaattgctttgttgcataggtgttgatggggtgaggaggcatacaggcaatgaatggttagtacctcctttctgggtccagtcatatttgacctttcttagatctcactctgtggcagacttct

SEQ ID NO: 8018 - DNA, 2544 bp, Homo sapiens
gagtcctgaagtaagtattagcctctgtaccctcttttaatcttttcaattctgatgtgggagattattgttcaggaactgttaacacattccaagattttcaagcttatttaaaaatagtacataacaagtcattctgcttttctctttacatcgttaatacttttcttcccacctaaatataattacctaggttatatgtattacagacatcaagtaattcagtgtaaatgatattcaaaattcaaattaagtatttttccccaaacgacgcagaaagcttttaagaaatatttagacaaattgccacaaagtagaagtcaatactgaaaattgcttttctctttgctcttagtttgaaattgaggaggaggaagaaatgttgtcatccgtcataccagattccaggagagaaaatgaacttcccgatttcccccacattgatgagttttttacccttaactcaacaccatctagatctgcatatgatgagcctcatttgctcgtaaatattgagaaacagaaactagagttggaaaaacgacgactggatatcgaggccgaaaggctgcaggtagaaaaggaacgcctacaaatcgagaaagagaggctgcggcatttagacatggaacatgagcggcttcagctagagaaggagcggctgcagattgaaagagaaaagttgaggttacagatagtcaattcagagaaaccgtccttggaaaatgaacttggtcaaggagaaaaatccatgcttcaaccacaggacatagaaacagagaagttaaaacttgagcgagaacgcttgcaactggaaaaggataggctgcagtttttgaagtttgaatctgagaagctgcagattgaaaaggaacgcttacaggtagagaaagacagacttcgaattcagaaagaaggacacttgcagtgatttttccaggcttccatttagcaaatgtttgaaaactctagatttttctcatatcaggtgatataatgatggttgctggattagctgtggtttcttgtctaatgtcagtgttcagtaggaaaaagttatatgtggataactgtatgcctaagtagtatataaaagctgtgccctagcgtaaacagtatagcagaaacttactgtgctggactctttaccttataatattacatagagtcttgtattgtctgtgtacccagagtttacaattatgtccatataaaattctagcccagaagttctcatctggggtagattttggccttcagaagaccaatttggtgatgtctggagacatgttgggttgtcaaaactggggtggggaaaaggttgctactgtgcaatgcatacctcctcaacacccccccacactcagtaaagaattttccaacccaaaatatcattagtcctgaggttgagaaaccctgtcctagcctaactgtgtacctctatagctatgttttatagttttagaatattaaaacctcagatatttatgtgggtaggtacttaaatggccaaaaactttaactatgaaatgttactgtgtagtatattgaatataggaagtgatgaagattataggtattttattcccatgtttccatctataaatagccttctcagattcagaaaacaatacagagaacatcagaaattttctaaaatgggtcactttgaaaagaattctttttctcactattaatgctttagaagcaagacgcaattttaaagctttagttccttttctttcagtcattgtcttagtttgggtacaaaaatgtcatttcagtaatgtactgaaatcttataagtgaatagttgaagctagtaaaaatgataccagtataaaaatggtacttgtagtccatgagcttgaacccaatgactgattgtttgacttttaaaataagtaatagcagccatttgggagtagggggtaggtggggaagatgtactccgtatcaaataataatgatgttgaaataatgatagtaggtatgtattatggattggagaagcacttattacactatctaacctaatatgtagaacaattcttgagagttgtatctgtcgttatttctgaatgtgaagctcagagaagtgacacagagtaaatggctgatcttctatattgtagtatattttgtccttccctcttccctgaggaacaaagcacgtatctttagtctctttgatatttattctgagaccaagggcttgcttgacctgatgattttccttcagctctctgaaggtgctttttccacaatccaagtgattctgatacacactaaagttgagaatcactgcactagatcactttgtgttttctgattttcaaggttgatacgtagctttaatacagctcttctgttgacagttattactttaattttgcatttgttccttgtaagaatggctggaaactgtgtgttgacatttgaggatgggtatgcaaggaaaaaatatacttctgtttacttactctgactttgaaatagtgttatttttctatatctgaaataaatgcttctaccatagaaata

SEQ ID NO: 8019 - DNA, 1244 bp, Homo sapiens
aggggccaactcagaccctgagaataagggctaccatcccactcctccctcagaccccggagctcacccacctgcaactgcagtctccgaagtctccaccccagtctccctgcctccagaggactggttgcgattggcctgcaccgctgtcccgttaactcttccgcaagtgtgagtggcgtaactgtcgggctcttggccttggtcccgcccttcgctcgcctccgaagcctcgcctacttgacgtcatacaatgccgcaaagcgcagggctgatctccgtctccgcccccagctgctttctccgagaggaggtggctgagtcgggggcgggctgggagggctgtcggtgggccagtctgcgtagcgacggcccgtcccctgcgcacggacgccgggaagaagggggtggggccacgtttgcgtccgcgccatcaggcccgagatagcggcgaggtccgctttcagtgtatggttttccctgccaaacggttctgcttggtgccatccatggagggcgtgcgctgggccttttcctgcggcacttggctgccgagccgagccgaatggctgctggcagtgcgatcgattcagcccgaggagaaggagcgcattggccagttcgtctttgcccgggacgctaaggcagccatggtactacaggtcttttttggtatttagagcctaggaagcagatcttgggggaggcgggccgggctgtggagacccgacactcccgcgctggccgcgaccctctcgctgtggagcctgtggccggcccgggcgacagcagccggcgctgcggagttgtgggcgacgcacggcctggtttccacggcctttgtaaccgccttggaggccgcgatggctgtaaacattatctctttccccttgttatttcaaatggagaccctcctaaaccatgaaataagtgtagggaaggccgacaaaattgggtttttctgtaatgaatgtttttatgtctttatctttaaatgttatttttttttgtttgtgtgcgttcatagcctatgcttattctgcctgttaaatatcccatcattctccaaggactccctgcacgtggtaggccctagaaattattgacagtatgatttagtttgtagccctgcgctccccgggattgaagccaatgaaattgaagccagagaggataccttcctcactagatgccatgggaaacagtattttacgtagatttatttattttagctatgtattttg

SEQ ID NO: 8020 - DNA, 1194 bp, Homo sapiens
tagtgtccaaacagtgcttgaagtaaatgggtgattgcttgagaattttatggtttttatgcatatggtattacattataatgacatttcattttaagaaaatttaacctatatgtaatgctcagttagaaagtacttacttaaagctaaaacaaatcattaccattgataaataatattttctgtcataaaggaactaatacacatgaggtcctatataacaaacactgataatatatactacatgccagaagacattacttcaagctctaagttagttaatttaatgtacataacatccctatgaggaaggtattgttatcatcatcgcaggttacatacgaggggatacaggcacggagagcttaaatgatttgccctaagatcatatggatggtttgttttcatgctgtaagggtttttttttaaaaaggttatagctatatagccataatgtagtatagcattgaaactccctatcttttggacctgtagattctatgaaaaatttttgtccaccaaattctaagagaaaatgtctttctgtatcttaggcacttaaggaaagcttcataaaagccattggtgttggactaggatttgaattgcagcggcttgaatttgatctatctccattaaacttggatataggccaagtttataaagaaacacgtttattcctggatggagaggaagaaaaagaatgggcatttgaggtaagaaatttgttagaattgttaaaactaagaatttctattttttatgcatgtatgtgtgattaatttgggtaagctagtcactgaatttggacgcaactgaatccagtcctgctgctctgaaagtgaaatcagggctactatgagagcatgtaacatttatactaatacttgaaagaagttgaaagatgagtcattgtgagttcagtacgggaaaggaaaagaggctctgacaaggagctttgcatgtatgaacagccaaacgcagccactttggctgggccataatgagggtatttaagagagattccagatcaggctggtagatcctacaaggtattgatcaagttaaatattttggtttcttactgtattttgtttctgtcactggcagttcctggttgctagtgagagaagccaacacacacagccaaaaaaccccccaaaacagtattataggttactagagtgattcagt

SEQ ID NO: 8021 - DNA, 1284 bp, Homo sapiens
taacaacttacacgtgaatgatcattaaaatatgtttaaaaatagcaccaaatgagtgggacactaaaggaagaggttttaggaaataatagaaacacatggttgtagtagataaaagcactgtggtttggggttgtgagtctgataaatcacttttgttaatgactccatctgaagcagtggattataaaactcagtgtgtaattttcggtgggagggagctggcaaaatctgaactgagtgattaagccccagtcaaatggactctggttcacatcagggctttcctcccaggaagtggaaggagaaatccaattgtattgactaaacaaacatggcagggattattgtctaaggctgtatgcatatgtaattgtccagtcttcactccaggtgccctgggtggtagactatttccagttcccagtcactaggggaatgaggctcttatttcctgatatcattaggattgggttagcatttggatgatctgtaggccttcttctgtgactgtagctaagcaaaatgtctgcaaagtaataccacacgattagtattccaaccggttgtctgattgctgcatatttgtatgtcttatttaagttgtaagcttctgatagatacactataatacaggcactcactaaaagctgtgtatgtatataatttttcggtttgaagacagcactcactaaaagctatatatgtgtgtatatatatgtatgtatacatgtaatttttcctttgaagacagtattctttgttcgctgtgttaatttgatggtacagagggtttgaggctttctatgaattctgtgactggctggagagggaaagaaaaatctaggaatcatccaaaaaaaaagattcctgagaatgtagagtggttgtaaagtaggagaccaagacaggaccttgaagaatgcctagttgttacaaataatctttgtcttataagtgaatggtcatgattggaaaaattagttgaattagtttttacttctttgtatgtattgttcatatatctttacctttcttgttatttacaccagtattattttttagaacatgccatttgtaatcttaataaatgtatatgtataaaatttaaacaatatagacagaagagtataaaacaagaatatgaagcataggtgagtataaaatgaaaaagtaaatctccctttcatgtcacttccaaccctaatcctatttgccaggttaacagtgttggtagtgtctttccaaattttttagtgtatttgaaaatgtgtaatatatata

SEQ ID NO: 8022 - DNA, 1101 bp, Homo sapiens
ctaggattacagatgtgaaccactgtgcctggcctgtttgtttgtttgtttaaaacatttctccatcactcattccaggtcccagagcaaactctctctgctctcggagcctgtgacactggctatgtgctccacagtttcagtcccaggtcatactctccaacagttttcagagctccatatatatgtagatgccatcctttctaaaaacttctcacgacctcctggaatattcctattgatctcattttatttagcatcagctcaagaaactaagtcttagtgcacagtatcacaacaaagaaaaagctttgtttttataactggtaaaaacaagaaaagattctcatcaaaatgaaaatataaaattaatcatttctcaccaaagagtatgcctgggagcctccagctgttaaaagacaatgctattactacttcttatcaaaaatctgtaatgccctgtgatttttatgatacttcttcaatacaaagtgttaatatgtgtcatcagtataataacaaccaacaaaatgccactttcagaaaactgtatgtaaattttttgtaacaatgtaaaaaagaaatggggagtaagtgttcacatcattaaaaggctttgaattcatggaaatacatcaactgtgtggtttctttgattaaccatttccccttgtggattttttttccagtaaagccgtccttcaaaacccttgtggatttttttttcttcttttttttttgtttgagtcttgtcctgtcgcccaggctggagtgcagtggtgccatctcagctcactgcaacctctgcctcctgggttcagcaattctcctacctggactacaggtatgcaccaccatgcccagctaatttttgtatttttagtagggtatcaccatgttggccaggctggtctcgaactgacctcaagtgatccacccacctcagcctcccaaagtgctgggattacaggcatgagccaccacgcctggcctccttgtggattttgaatgacttgacatattcagtatttcttcatattcaatttttcagagtcgtatcctctgtggggtgaggcaagcctgtctatttggggactatgc

SEQ ID NO: 8023 - DNA, 1097 bp, Homo sapiens
agcctgggaggtggaggttgcagtgagccgagattgtgccactgcactccagcctgggccacagagcgagaccctgtcttaaaaagaaagaaagaaagaaagaaagaaaataaaaagattatgagagggtaatcctcgaagcacagttggcaaaagccagcagcaaagatgtgtatgtgaggggcacaattcactgcctgttcttcccttctagttttcaggactctacatcctgtccttcactgtcatcatggtggggtttatcctgtactgctccacccctactcgcacggccgagccggctgaaagcagcgtgcctccagtcaccagcattgggattgacaacctggggctgaagctggaggagaacctccaggagacccactctgctgtcttgtagctggagaagatggcgcacccatcccccaccaggataaagcagagcctgctgcctgctgaggggacacttggggaaatagcagactcagaatggacactctacaaccctgggttggatccagtggttaggttttagaaaggaacactgaacaaagttcaaaagtagaaataccaaaatagagcagaaaccaagctaagagtgtgtttctgtgtttgaggaccaatatctgttcgtgttgaggagatgaggtgcagactccacactggggtcttagaggcaccagtgggaaagcaggactggggagagatccaggactgagccagcctcaggccagggcgggaaagcaggctgtccaggctgggcttggtggtcaggaacaggggcagctcacggtggctctggagtacgtttcctctgtcagatgcttcaaggtttttttttttttttttttttgctgaggcagttattgtccacaggcctttgggtacagatgaggccttggggctgactgcatgtggcagaaaacgggtgggtcagcccttgaaaagtcttgagatataagtgtgagtactatacaagcattaaactggagtgcagtaaacctaggaaccttcccacaattgtttttttgtttgtttgagatgcagagtctagagtgcagtggtgcaagctcagcttactgtaacctctgcctcct

SEQ ID NO: 8024 - DNA, 1361 bp, Homo sapiens
atataaaactttgaggtctatgtcctctgtgtgctgtagtgaatcccaaagtacctcctgaggagggggtaggccctgcccaagggtgctccctttgcctgcctttatgcccttctatgccaactttcaaatgaggttgtcaatcctctctccagcccagcttactgttaaaatttaggaccctgccagtcgcagtggctcccgcctgtaatcccaacactttgggaagccaaggagggtggatcacttgaggttgggagtttgagaccagcctggccaacatggagaaaccccatctctactaaaaagacaaaaattagctgggtgtggtggtgggcgcctgtaatcccagctacttgggaggctgaagcatgagaatcgcttgagcctaggaggtggaggttgtagtgagccaagattgtgccactgcactccagcctgggtgatgagagtgagactccttctcaaaaataaataaatagcttttcctccctgatgcaaacgaggtcgcacgcatgaggcttctccgccgccgccgccgcagacgccgcggcgatgcgctacgtcgcctcctacctgctggctgccctcgggggtaactcctcccccagcgccaaggacatcaagaagatcttggacagcgtgggcatcgaggaggattacgaccggctcaacaaggttatcagtgagctgaatggagaaaacaatgaagacgtcattgcctagagtattggcaagcttgccagtgtacctgccggtgtggctgtggccatctctgttgccccaggctctgcagcccctgctgctggttccgcccctgctgcagcagaggagaagaaagatgagaaggaggagtctgaggagtcggacgatgacatgggatttggcctctttgattaaattcctgctcccctgcaaataaagcctttttacacatcaaaaaaataaaaataaaaataaatacataaatacataaaaataaaaatttaggaccctacctttaaaaattaaaatttaggaccctacctttttgagtgctggggttatactccaggtgcctggcattgagaataacattgaactcacaatccttgtccaaagtaagacaaatagtatttatggaagtttgactgagtggtctatacccctagcatatgtcaagatctatccctaggaaagaccaaaccagaagagagctagctaggccccagcctcttatcatctcttcttgctgaattatgctcagacatgacgccattgatctacactgaagggcatttacatgaaactataaaactcactgacctctcagttccttgatgtcctcatcttcatagacgtttttcatctacaccacctga

SEQ ID NO: 8025 - DNA, 1111 bp, Homo sapiens
atcagaagagatgaatctgatatcaacactttcatatatatggcataattttgaatatcatggacaatatttagaacccaaattttggagtgcttgggcagaaagttgtaaagtttgtgctggagaaaggtttatttggactttgattacataaatattaaaatctctgccttaccttacaaaaacaactatattttgccaatcacattagttagcatgatggcattcccttcatgttgcacactctttgacagcatgctgttttgtggagaaacttgcattcatgaagagcccattatcaacttttaaaagtgaatttgatttgtacccaccaggagaaatacagttgggaagggtgagggtggggttcttgttgcttttttctcttttttcctctcttaaaaaatgtacttgcacaaggaaggatcttcagatattcatgcactgaaaaatgctgttatcttttgtttttaaaaaatgcaattaaaactagaaatagcactcttggtttcttttgatgaaaagagtgagctggtcaatgcaacattgggaaacggcagatgtaggtgagaagttaagtatttaatagtatcaaattgttcaaacattgctcagtataataactggattttaatggtgacctaaaaatggtattaaatattttcaactttcaaatgttggttttctttaagcaggagactgctattttagttgttgttaaatgatgaggagtttttttttttttaaatatggctggaaagcttgttttgaaaaatgaagcttatattaattgttgcttcaatagtttaaaaaatttatggagataggtaggtcattatgattgcagagccaaaatagcaaaacaaacatattaagtgtgtttactaaacatattgtgtgtttactaacacacttaatgtttatatacctaatatttattatgccatatctgaatttattaaaaacaacacagaaatctcctgctctgatatagttatgtaactgatctcttaatctgtagcatagaagtattttggtattttaaggtctcatgattagggatttgtagcctcaggtttgaatcagtcacctaggggtaagagaaaaacca

SEQ ID NO: 8026 - DNA, 1912 bp, Homo sapiens
tgtgaagaattaaactaaaattaatacgtacagttttctctaattaggtgactgttcataatgggtatatttggaatttagaagaaataattttgtagtaattgtggcccttatgtttaacagataattcagcattggcgtatttgcttgtcccaatacaagaatgccaaaggaggaaacaggaaaaattgccgtccattttaaaaatttaggtttgttgttttaaaccataattgttctcagaacttttttggaacttctaattttgggtcatttaatttaagaatgagagtcatgatgttttgatttatgaaggtgaatttaatgcaaaagtgggtaacactacattcatagcaaagttttttattaaattttataaatttttaatagccaattatgtcctaattgtattttggggaatgaacagcagcaaatactgtaaatgtacagttttcttttttttttttttttggttatgtatacaaaagttttaactactttttggtgtttatgaaaatcatttagttgacaaggtgcctatgccattgttaaattttctttaagtaatttaacaacagatttgctaatttaaaaaaaaatgaaaaaaaaaatcttaccagcagtttgtaaaggtctggaatcacagttggcatcctttattcaggtctcttctctccagcgtacacttaaaattggtgccgagcagggatataacctgcagttaagtgaaaagaaaatccagcctccccctccaaaaaaaaaaaaaaaatttaatttttaaaaattagtggtatggcaataagacacttcagaggctatcttaacctctgaatacccatcttctagtttaaagacagagacatcccatctggaaaatgttaacttgtgttgccatctcgttgccggagtaagtagacataagacagagtttaagaagtaaaaatatagaaaaattttgatggtcacaatgagataaatattagaatattactattccaatgattaaatgaggatcttgaaataaattctgaagtcttccaatttttacatttattggaggggtccctgagttctgtcaacttttttatttaagtctcttgctcttattttgtgcataaatgttaaaccttccaaaaatgaaatgttagctttctttcttttactttttattaaatttaatagaaaatatgacctgagtagttaaaaagtattttgcattatttgcagtaagatgtctctagcactgctcaaagggcaaattttaaaacttcagtctgggtgaaagatttgctagttttacagaaagatttgctatcttaaactcaagctggtttttctgttctcatgtaagtgactgggatgctgtcttatgaattcttccaaggtcatgtttgtgaaataaacattacatgagagctttcctgtcatctacactatatgttgtctggagtgttgaacaaatttattttagtttctaagttgtaatctatcctcatatggtctatacgattttgaatgtgtgccactacatactgagatgataatgctgtacaattttaagtggtagcagtttctgtatgcagtaggctgaaatattttgatgaactgcttaatttttggattttattttttaagttgtataatttattttcttgcaaaataaaaatgtaatataaaagcttttacctatccagaaaatgttgatgttctactataaaatagttacaaagagtttaattaaaatttttatagtaggtatatttttaaatttgaaggtaaattaatctcagccagccttaggaatcagaaatatgaaaagtaacccacttatttatattagacttcaaattctaattcaaaatgagagcagtcaggaatgtagcttttccactgatgatagcatgtggctata

SEQ ID NO: 8027 - DNA, 2234 bp, Homo sapiens
ataaccacctaacatagaaagcatgttctatcttgtctcattcaacattcagacactctggatttgtatcatgtcttttgccataaactaacattcaggtgccattgaagtatatttaagtaactttgggtttataaaacttgtctctacttctctatagaagtaaaattctaatagactaaaaaagtttgacaattttagtagtatgtgaaagaacccaatatactgttttaggtgacttactaagaaagcattttggccttgttttgagtttattttttctttctctttttcaacagaaaaagaagcttcccagttcatttccagcaggaatggatgtagacaaatttttgttatcattgcattatgatgagtaaacattctggacacataagaacagtaggtgttaaaaactcatatcccttaaactgagtgtagggaatgggatattgacagaatctgaaagcatgacctgcactttcattgtactgaaacttcactttatatctaaatcatgctgtttctgaaacagcttcctagtttgtaaatagacttacttggtatatttttattttgggaaaaacgtttgcagaaatgtaagtaaagccaatctgcaaaactgtatagctttgacaattccatattgtaaatactgtgtaaatcttgttgaaatagaggttaaatcaacctaatgttcttacactgtgttttttgacttcttatgatccctaattctgagacttactcatctggaatagtttctcacttgttttggaggaaaatgatgcttattcttataaattaccttcagtaactattcaataagacatttaaatacacaatcactaagtactacaaaataataaccacctcaactgatagcaaaatatctaattagaaatcaacagtttgatgagtttttttcctagagtgaatactacccctttcttataattgctgtaagtattatatttctggaatttcacactttacctactctgatcactctgttctctttgttttaaagagagaattttgtaaaccatttattgaatgttctgatctttcatttataacttaagattttttacagaactttaagtggttagactattgagccataaaattttggtttgtagtagagatttctcggtatgtacttttcccctaaatgctggggatttaaagaattgcactaattcatagaactctttacattgtagtgaccaatgcacatataatttaaatcttgtgttctatgtgagagtttatgtggaggattatcttctggtgttgtgtccatcataagatgtaaaaagagaaatcatagttttatattttagtttctcctacaatgggtatgttaaataactatatctatacttagatatagtgcattgtctgtgtcccttaaagtgttacaaagagtttctctcaaaaggtccttaaggagagtgagagatgagagaggtgccttctctgtattagactcacacacatcagtccagttgaagaattggtttaaacttttaaatgagaacagaaattataattagtacctgaccaattgtgcctagatattaaagtatgttctctttagtactttccgttcaattaaatatcagtatattagggatttttttctacaggtgtatattttgttgaagagtcactttcctcaaccatttttttgtactgggcctttaaaaaaataaatccatccaactttaacacaacatttctcagtgtagaaatcatgtcttcttaattgctgaaccttactgcaaaaacttgtgatgtaagaaatttgtatggtgtggcagtggtctattcctaaggaactaaatatcatatagttaatgtttatttaactcagcttgagactgtactacagttaggtttgaataaatattttcattaacttcaaaagtttgaattactttacattggcagtcttgtttagaaactgattaaattcctttgcaagtcagttctttttgggagtttgtacaatgctgaaaatcacagttttcttcttattcaattcatagttgtatgtactaagcactgaaaattcatatacaaataaaataagtttactttcttcaagattcatagttaactaaccaggaactgctaagtaaagttgaaagataacttgtacttggagcttttatgttcaagagcaaaatcatatccccattttaccttaaaagtccacaggtcctgaactt

SEQ ID NO: 8028 - DNA, 1115 bp, Homo sapiens
tctactaaacaaccatctaatgattcagcatctgttgagttaaatcatacagaaaatgaagctcaggcatccaagtctgagaattcacaggagccttcatcttctgtaaaagaagagaatactatttttctctctttaggtggaaatgctaactgtgagaaagttgcactgacgcctccagaaggcactcctgtagaaaacagtcactctcttcctccagaatctgtgtgttcttcagtgggagattctcaccctgagtcccaaaatactgatgataaaccttctagcaacaactcagcagagatagatgcatcaaatatcgtctctctcaaagttatcattagtgatgatccatttgtttcctcagatactgaacttaccagtgctgtttctagtattaatggagaaaacctgccaactataatcttgtcttctcctactaaatcacctactaaaaatgcagaactagttaaatgcctatcttcagaagaaactgtaggtgctgttgtatatgccgaagtaggggattcagcctcaatggaacagagtcttttaacattcaaatctgaagactctgcagtaaacaatactcagaatgaagatggcattgctttttcagctaatgttacaccatgtgtttccaaggatggaggatatatacagttgatgccagccacaagcacagcttttggcaattcaaataacattctgatagctacctgtgtgactgatccaacagcgttaggaacatctgtaagtcagtctaatgtagtggtgttgcctggaaattctgcacctatgactgctcaacctctaccacctcagttacagacaccaccaaggtcaaacagtgtatttgctgtcaaccaagctgtgtcaccaaacttttcacaaggtaactttaataacataattgaaatttgtttctctgggttgggatctaatttcttttgtatgtgatgttattgactgcgaagtaataactaatgagtagatggtatgagaaaagattctgaaatttgtgattacgctgcttctttatgctagctaattcaaaccttttttatttttcttaatctgctagtaagctatgggctttagtggtttttcttttt

SEQ ID NO: 8029 - DNA, 1221 bp, Homo sapiens
atacctgctttctaaagtgccattactgtcatgcaaaatgtttgtttcttactatgttatcagatttatatgtttctgtaatgtattactcttgctttatgagttccctgtatcttcatttcagaaagaattttttttccccctaatgaaatattagaagacaatagcaatgaaaaaagtgtatttggccaggcgtggtggctcacacctgtaatcccagcactttgggaggccaaggcgggcagatcacctgaggttgggagttcaagaccagtctgaccaacatggagaaactctgtccctactaaaaatacaaagttagctgggcatggtggtgcaagcctgtaatcccagctactcgggaggctgaggcaggagaatcacttgaacctgggaggtagaggttgtggtgatacgagatcgtgctgttccactccaacctgggcaacaacagcgaaactctggctcaaaaaaaaaaaaaagaaaaaagtggatttatttttattttacaggtttttaatgaagataccagatccttggagatttctcaatcttacactactacacaaagagaatctagtgattacagtgtcccttgcaaaaggaagaaaatagaactaggctgggaagtaataaaagatcaccttcagaagtcacagaatgattttgatcttgtgccttggtaaagtgttaccattttctcattcagtgtcattttaatctcttgtatgttatttttcagaaaactttcagtggaatcctttcatctcaaccagaactaagtcatttgtctacccccaaacctattactagcaaagggatatgtgattgccatgacaaatgagatcaatcattaatggctcatttgcttgggccaagtgcagggccacctattttaatcatattgtcatagcaagttaagaaggaggactggctctctgataggcaattagaagtgtgcacctcatggaattcactgaattgtacgcttcaacaatagattttagcatacgtagcaccttctaatagaattaggaagaagttaaagataatcttaagaaatcacagaataattttgaccttatgccatgataaaaagttattttctcttattttctatcttctttattctcatgtaacgttcacatatatttaagtaatcaaataaattatggatactttggaatcccaaaatattagatctggtaaggatgtttagaa

SEQ ID NO: 8030 - DNA, 1230 bp, Homo sapiens
cctcatttttgaccgtaaggatttcccctttcttgtaagttctgctatgtatttaaaagaatgttttctacattttatccagcatttctctgtgttctgttggaagggaagggcttaggtatctagtttgatacataggtagaagtggaacatttctctgtcccccagctgtcatcatataagataaacatcagataaaaagccacctgaaagtaaaactactgactcgtgtattagtgagtataatctcttctccatccttaggaaaatgttcatcccagctgcggagattaacaaatgggtgattgagctttctcctcgtatttggaccttgaaggttatataaatttttttcttatgaagagttggcatttctttttattgccaatggcaggcactcattcatatttgatctcctcaccttcccctcccctaaaaccaatctccagaactttttggactataaatttcttggtttgacttctggagaactgttcagaatattactttgcatttcaaattacaaacttaccttggtgtatctttttcttacaagctgcctaaatgaatatttggtatatattggtagttttattactatagtaaatcaaggaaatgcagtaaacttaaaatgtctttaagaaagccctgaaatcttcatgggtgaaattagaaattatcaactagataatagtatagataaatgaatttgtagctaattcttgctagttgttgcatccagagagctttgaataacatcattaatctactctttagccttgcatggtatgctatgaggctcctgttctgttcaagtattctaatcaatggctttgaaaagtttatcaaatttacatacagatcacaagcctaggagaaataactaattcacagatgacagaattaagattataaaagattttttttttgtaattttagtagagacagggttgccattgtattccagccttggcgacagagcaagactctgcctcaaaaaaaaaaaaaaaaaggttttggcaagctggaactctttctgcaaatgactaagatagaaaactgccaaggacaaatgaggagtagttagattttgaaaatattaatcatagaatagttgttgtatgctaagtcactgacccatattatgtacagcatttctgatctttactttgcaagattagtgatactatcccaatacactgctggagaaatcagaatttggagaaataa

SEQ ID NO: 8031 - DNA, 1147 bp, Homo sapiens
ccagtgataccaagaagaagcaggggatgaagaagaggagcaacagtgaagtggaagacgtgggaccaacaagtcataacagaaagaaggccaggtgggacactttagagcctttggataccggcctgtctttagcagaggatgaagagctggtgttacatctgctaagaagtcaaagctaaatacttcctgcgcctgccttctccttgaaaccttggttatgactgcgtaggcaagaagttgaaaaacagttgatttgggggcacttaggtaccatatgccccattcccaaagggcacatttctggatagaagcgatcgtatctccaagtccctctcacaggacatgctttgtgccatcactgagcatactcagatcgagggtggatgataccatttcctgaccccgttttccagcatgtgttctgttagatttttatccatgggttcctacgccttgtcattggaaacactgcctttgtcttactggcaagttctggagctcttgtgtcattgttagaaatccctgtcttgcttactgtacagaagtttctgttgctgttaaaattgctcatgatttcgacgtatttaatattttcaaagagactatgatggaccagccctgagaaagaatgagtatttttgaattgagatgatcaataataaacatatttcctataaaagaaagtattaatgtttgcattgtgtccagtaacataagagacctctcacaggaaggttcttaagattaaagtgcttggccatttcctcaaactgtgaatttgtcatattcttaagttagcctgttctcaaggatatcatttaacttaacacttgcaggtttgctagcaattgtttataaaatcggtagaagttctgaatatgaagactgactaaaacatggcctctcactgtgcacatggtagctgcaggtcctctgcaagtgctccagtcagcacctaccacagagccccacccagactcagctcctggtaatgagtacgatgcaaaacaagacagagcctcttttttgttacaaataactcagattcttcaaggggaaagaatatggtaaagaaatgagtcttgacgtgaaactgattttatagatttgccaccttctcatgattctgtccctttcctatttt

SEQ ID NO: 8032 - DNA, 2431 bp, Homo sapiens
aatgtgagagctgttattttgcatatatgttcttcataagctgaaccaccaacagagaaaagcaggcctttgcagatatgatggaatgcatcccaccttgccaaagcacttacaccagtttgactgtgctagctaaaagacaaatttaaggggagctcttcaacattaaggcagtatgatatcatgcttggttttcttttttcttttggtccagggaatggagaatggtgttccattgcctcttttcacattttttttctttttcttttttttttctgttgaagattaacactaattatcacgtctgacaaatgtgtatgtgtggtttcagttctgtgtacattttaaaggataatggtgaacattttaatgggtttcccttgccctttccatatttaacctatttccacattctctctcactcacattttctcagtgtgcccttctcttatctgccatgtccatagccataattccaccatcatacagatcaggcagtgtttaaaatgatggtaggtagcacagtggacagtctttgatcatcatgtagaatatggctatgaatcaggaaagagattagaacatttaataatgtatgtacagctggtgcttagtttttttttaatctaaatttaattaccttattggatatttgatatttggttatttaatcacagtcatctttaacagcttacactgattggtgttttatctcctgtgatcctttgatggctttttttgcctaccatttcacagaggtttagacagcagtagtagctccctaggagagtttactgatgaaacagcctctgcaagattttaaaagttttgttcttttatagactgatttagaaaaacaaatgattagttaaaaaaagaaaatatacatttgttggtaactaatgttattttttaaaacctggaccttttctggaagggcagcatataaaaacatcagtcccgaggaggggacaacaatactacctcactactacatctgtgatgactggttgttcaaacacaatggagtgtgtaaggtatatgttttataattcataaccatagcctcgatcatcaagaaatactttcgaaatttcattttccttcagaatatcttaagagtgctaaatttttaactgcctttttgtcgagtcaaactgtgggattctgatttgtattaaaattgtaagctcctcactggtatactatcatcctggaggggtgttgtatggctgagcaagagagagagagaatgagagagagactgtgtgtgtgtgtgtgtgtgtgtgtgtgtgtactctgtgtgtgtatgagagagagaaatgctaaccttgtagcatgtgaagaatgtctgtaccttgatacgatagttacataatcagtatatttggtttctagatcactgtgcttattttgtttcaatctctgactaaaaatacttaaatttggtttgttaattcttattttagaaattataattttagtttatattaatttcggttatagcttactgaagaaatctttccagttagaaggaggttctaatattcacatgttctaatactttgtttattgtaaaacagctaaatttggagatacgtaaagccttgttttctctgtgtggttcagctactttccatttggtattacacagtcaaatttacatttatctattaaaattgccattttattaaacattttcatgcacagtagattcaagttgtgtctgaaaatatctcttgtgcttttttgattttgctgactttaaaaggattaatctgggcagacattatgtaaaagaaaggttgcgtttaatatattttttgaactttgtaggacaaaacatagctggttaaccttgaagtgactgttgtaccatggttgtgcacatgcttcagaatcctatggaagagaatattcctacttgcagtacatcaaaggaatggatggtggaccctactattcatgttttgagacataaatgttcactttaaagcaattgcataatagataaaaacctgaactttcattggatttttgttaattttcctcattttgaattatgtgcactaccatagctacatcagtttgatacagtattgaaaaattatcagttatattttgctgtttatgatctatttgtagattaggattaaaatggatttaatccatttttaaggctgtgtgaatttttctaaacaagaaccatttgcaatatggatttcttagagattaaaccaattataacttattagcagtcgcgagcacatgttcatatagtcaatgtaaaaatacactaatgagtatttggtaaatcccagtaggcttttaccattagcataattttgtgttgtacaattaagttacaattacatctctaattttggataatattcattggttaacaataaagtgacaaaagctcatgcct

SEQ ID NO: 8033 - DNA, 1129 bp, Homo sapiens
tgcatgaacctgttttcccatttctaaacatttttatgtgaatgtttaatgttttcttaagagtgaaatgaggaagttgaactggatttagctttcttaccttttagtatttaataattgcaaatgatagtgtattattttgttttctgctcaccttaggaacaatacaggtatgattttcctttttaaatttacaaaactcttagaagagatcctaaactcagtgtaaaactttggtgttaatattgcagttcagctttataaattttagaaatttgctttgcattttcagtaacatgtatattactcaaacgttgaatatttcatttccttgaaaatatcattaaaccagaaatcatttctacatgagcaagacttaatatcttatttaaaactgcctctcacccttacaggaaatccatttacagagatgatcataccagttattaatgtgcacttaaaacatctttagaggtagtctcttgacctgctaacaatagagagctttaatagcctacttcttgaaaagccctagtaattgtttcgaatgaacttgtctaaaatggtatctgagaaaagtagaataagataatcaaaagagcccaagactaggattttaaaggacttatgtcttgttaagtagccccctgacattgagcaagtcatttatctgaatcttaatttcttttttagaagaatgagagattgtaacacctgtcttgggcaggaagggggagggcagttattgtgaagataggaagtgtaggcagagtggagagtgagcattctacagatgctccctgtattcactacccttcttgcttttggccttatttctttacttgcaaaatggagctaaaaattcttgtcctctttgcttcactttgggatgacgggatgacatgtcattatttaggtaaaagtgcattattattgccataaaatttattaacactgagctaacagcataataagcatagttctttgtatattaaaggttttaaacccggggacctatgaccttgaatggggaaaaagttacatctttatttttacattttcttgttatgagtatagacaacattagcattagcagtacagtaccagagactgtgtcgtctatttttta

SEQ ID NO: 8034 - DNA, 1118 bp, Homo sapiens
ctgcactggcttgtatgagagtaaaatagagttcatgagtgataataattgccaaatgttttataactgtgactattagggagacatatactgaggccaccaggtggcgttgaccaggtagtcattgccatttcctgtaaggtagtagagcttattacctggtaggtgggtagatatatatgcctttgatttccaaataagctttggaaagaaaagaaaataccttcggctaggcatggtggctcaggcctgtaatctcagagttttaggaggccaagttgagaagatggcttgaggccaggaatttgagaccagcttgagcaacatggtggcaccccgtcactacaaaaaataaaaataaaaaaaattagccaggcgtggtgctgggcacctgtattcccatctactctggaggccttataggcttttaaaccaattattttaaattatgttttgaaattactaaaaatactaaaggactgtttttttttccagctcagaagataaaataacagtccactttataaaccgtgatggtgaaacattaacaaccaaaggaaaagttggtgattctctgctagatgttgtggttgaaaataatctagatattgatggctttggtgagtatgaaacatttcttaaaatgcataagtgaaactgttaggtttcaaatttttattttgtggtttttttttttgaagaagtttaacctatagcatgctatgtaaaatattaacattcaggatgtgttagtgttatattcttgtttataaagaataatagagtgacaccattgttctgttctttgtacatttaaataagtcatggccagaaatctgctgtggcctcattaccttactgtttatatgtgtgatacaaagccgacggtagggagtagagttaaaagataccaggttagagagaataaatgtcatagcacagaggggtacttaaatatcttgaatgtcagctcaccttcctaggaaaggtaacttatcctagaaagtgatttatttagaaagttttcatttttagacttctgaccatatgccttaactacacgtgcaaagcctgtgttcctgcaactgcccttttacacttcctcaggcgtaccctgt

SEQ ID NO: 8035 - DNA, 1309 bp, Homo sapiens
cggtccgtcggtggcctagagatgctgctgccgcggttgcagttgtcgcgcacgcctctgcccgccagcccgctccaccgccgtagcgcccgagtgtcggggggcgcacccgagtcgggccatgaggccgggaaccgcgctacaggccgtgctgctggccgtgctgctggtggggctgcgggccgcgacgggtcgcctgctgagtggtgagtgcgcgcgctggggcgggggctggtgccggggtgggctcactgcaccccagctgctgctgaccctcttctgggtcgccacgtatgggactagaaggccgtcccatgccccactcccagacgcagcccttcggagtctcttgcgttctgggggcagtcgcacggcgtctgagacccacgccagttcccggagctgcgcagttccctgcgcgtcctggaacgctcgaagcccgttcccagtccagagttatgggggtgggttggagaatgtaggagaggtggggcagtgggcaaacctgccccagtgggtgccccttcggcccgctcctttacacgcatcgaatcagtccttgggaccacccccgcggggcaggcttgccagctggcccccgcctaccgcccgctccgggaggcggccgcagagacagcggggtagggatgctggatccccggtgccgtgggaaccctgcctgttactcctcgtctcttctgcggggttggatggctgggtcgagcgcccggtatgagagcgcttagagatcgggaaagaactccagttagtgtgggacgagccccacctgactccggggaatgactctctgcttccttcctcctgttgtgtcactgcagcctcggatttggacctcagaggaggtaaagtgctctggcttctggcttctttcagttgttctgcatgtcggggggagaacatccgtgcccttttctcagatcctttttgcgggtgccaacagcttgaccaaacgggacagaggagactgggaacctcctctactctggcatcctggcttgcgaaactaatttaaagaatgtaaagttggtttcaggatgggggcggggcggcaaaagaggtgggaagctgaattgagctgcttgggttagggctgcgtgggctctgtccttggtcgcggggaacagaaggccctcccacccttcgccttcctgcaaatgagaagagaaggacacttcctgaaggcaggagaaccagataggcccgcgggcctccttccagctctgacggtctctggcactcacccgcagacttcggatgtgtggccaggctggaccatacaggaaactcg

SEQ ID NO: 8036 - DNA, 1187 bp, Homo sapiens
aaatatgaatcaagctgtacagtggttgtatctatggagttgggattatggggaactttcatttgtacattgtatgtttgttcttgtgttttaaattttttcacaatgagtatacactgcttttcctactggaaaaaataggtactgtattttcatctggaacaaaaatgagacagctctacagttcaacttagagacatgttagcatgtagatcttttggagaagctccaacgagagaggaagctaaggcaagtgtgtcttattgctgcagtatatgtctccctaccaattatggtctcctgctcaatgtgttcttgaattgttagtcagcaaaatgaatactttttactctttcctaaattctgtcaggctacacatattttataattgatatgtagcttgtcattccagtgttctagtgccccttatatttcagcatactgtagctggttaagatagtgtcacatagtttcattcttttttctgtgcatttgtctctccatctgtgagtacagcgttgtgttgatccttgcacatattccatgtatctctctatactctgactttgaatctgctaatcaaacactgtacactttagttggtgaccactgtgtcctaaaataatatattgttactgtaaatacatgataaattattttctctgaatcaggtaacatctcactataaatgaaggtaaccacatgaaggtatttgaatatattacttacagtacttgaatatagtataaagtttttactttatactataaagtataaaagtaatacttttatacttttttccctaataagggaaaagtcacttattaggtaccaggagacttgtgtaattatccagctctattatgtacttgggtagttacattatctacttggggctaataatgcttgctgtggtaacctaacaaggaatgaacattcattcatttgttcattcatgaggattaagcaagataatgtatgtgagagtattctataaatggtaacatacaatgcagatgtaagtctgtacttctgttattgtgctaatacagagtctctgtgatggcataggtggcagtgatgtcatgatggtggtgggagtccagaaggaagatactgcaaatacttttttcaacatcactttctcataactaacaagatcttttctccagaatagctctattttt

SEQ ID NO: 8037 - DNA, 1181 bp, Homo sapiens
tcctcagccagtaccaagagatgcagcttcagcccctgccctccacttccggtccccgggctgctcctcctctgcccacgcagctacagcagcagcagccgccaccgccaccaccccctccaccaccacgacagccaggagctgccccagcccccttacagttctcctatcagacttgtgagctgccaagcgctgcttcccctgcgccagactatcccactccctgtcagtatcctgtggatggagcccagcagagcgacctaacggggccagactgtcccagaagcccaggactgcaagaggccccctccagctacgacccactagccctctctgagctacctggactctttgattgtgaaatgctagacgctgtggatccacaacacaacgggtatgtcctggtgaattagtctcagcacaggaattgaggtgggtcaggtgaaggaagagtgtatgttcctatttttattccagccttttaaatttaaagcttattttcttgccctctccctaacggggagaaatcgagccacccaactggaatcagagggtctggctggggtggatgttgcttcctcctggttctgccccaccacaaagttttctgtggcaagtgctggaacatagttgtaggctgaggctcctgcccttcggtcgagtggagcaagctctcgagggcagcactgacaaatgtgttcctaagaagacattcagacccaggtgttatgcaggattacatccgtttattatcaagggcaaccttggtgaaagcagaaagggtgtgtgctattgcatatatatgggggaaaaggcaatatatttttcactgaagctgagcaaccacatattgctacaaggcaaatcaagaagacatcaggaaatcagatgcacaggaaataaaggaaagctgtgctttgtcattgaatcctaagttcttagctgctgatgcaagttgtcccccaaggccatcacaaagcagtggggcatgagctgtgtttcaggggccactaaataacagctggtactgaccccagaaaccgccttcatctccattcggaagcaggtgacacaccccttcagaaggtgccctgggttgccgagtgtcagaatatactcaggactccagaggtgtcacacgtggaactgacaggagacccgccaccgtggaggcagggggc

SEQ ID NO: 8038 - DNA, 1105 bp, Homo sapiens
agtattacagcaatattcaaagaaagaaccacagatgtgttaaccatttaagcagatcatctgccaaacattatattactaataaaacttaaccaacacttacaattcagtcatcaaagtaagtaaaaattagatgctacagctagctaactgtatccctagaaatgatgaataatttgccatttggacagttaacatccaggtgttacaaagtcagtgttaattctaaagatgatcatttctgccctttagaatggcttgtcccatcagcagatgaatgtgttaagcacaaagcatcttccttaaagcacaaagagagggactaactgatgctgcatctagaaaacacctttaagttgcctttcctctttgtagttagcgttcaggcaggtgacgtgtggaaagtctagggggttccattctggccatgcgagcccagctcctaccaacgtcggtaacttgagcagtccctgttgctggccagagactgcctggtcgccagcgctcaccatgggtgccaggatgcttcgcagaggcactgtgctcacggttggacttggtgtcagtgggaaagggcagtgtggggactgtcatttttgtgatttaataacacacagtgaaaatccaggaagaatgaattaagcttcttctgggagttgtttattcctgctcgtgcttaagattgatgatttcgtgaaataaagaacatcatttcatttaagagatcatttcattaagatctctaatctgttttgagtctttacaaaatagccagttataaaatggggcttgatttgtttagactgaaggaagacgttttcccaaaatatactacagaagtgctacaatatttgcgatattaaaatgcctgcagattgaaaatgggggccactcatttcagaactgcaggaatggtgtagttacagatcgacataaactcctgccccccaacaatgccatgagctgcttagcccaggagacctgggagctatggcaggacggttaggccagccgatgagggactgcagagaggctactggaaggttaaggacccagagagaaatcgagaggtgccctacagcagccaggcctatcaggatccgtc

SEQ ID NO: 8039 - DNA, 2127 bp, Homo sapiens
gtttggatcattgttattgtgcttaatattcacatagatcgttcgtgaactttctgtaccactaacctgattttgtttggaattttccagttcttgcattggcataatgaggagcaggagggaaaaggcctttactagattcttgtcacaaatttctagtcaatgtgttcttaactgggtggagaaagaatggaaaaccttcaagatctcatccaagcaaatggcaacaacttagaagaaatcatttagtgacttaattctttctaaagatgaaatgggattgttttttactcgtcttccttgttaaatcattatttaagccgttcttattgaccaattcctgacacttgattgtctcctaatgctttatccatcaccacctgggctcctgcatcctcactgtggaatcaggcaccagccacataatgttccagacaaagcctggaagggtgtggacccagacgtggagtggagtgattctcttgacgtttacatatatctctgtgtctctccatcattccaaagctaaatgtacatgtttagaataacttattttataaactcttcgggagacatgttgagatttgaccgtaatgaaagccacattttcctgaattatgatggtctgcattagtctcatgtgaaaggggaatgtggaagctcagggttaatgtagtggttgttttggtttttatttgctcaattttgtctgtactcatgtcattcagaaacctgaagtgtggctgcatcttgctgctaatgtgtgatgttgacgcctaactgaatttgaacagctcaccactgtgcctacatttaaaaatacttctctctcttttctaaaaagctttaactgtagtgcctcctaataagcagtatgtttgtttcattgtgagattgcagttctgtatttcgaatgagtctaagaaccacagggataatactgtgcagatttcctgttctttacctggctctgcttccagcagtattgacacctagtccttgctgcattgtacagtagcttttcaaactgcagttttattgctaagtttttagtatgggtgatactggagtcttatcatttgaagtgtttgcttttctacttttacagtaaaacctcattaattctgaaatttaagataatgagttaagctgaagagtttactgaagcaaattaatagtgaggaagcctatttgaactacttaaacagtattaaagccctttttaaaaagcacctatttgggatcatttgaggtcaagaattcgagatcagcctgaccaacatggtgaaaccccatctctactaaaaatacaaaaaagttagctgggcgtggtggcacacacctgtagtcccagctactcaggaggctgaggcaggagaattgcttgaacctgggaggtagaggttgcactgagccgagatcgcgccactgcactctagcctgggccatagagcgagagtccatctcaaaaaaaaacaactatttttcacataatcaaactcaccttgtctcatgacttttggttaagggggttttcccatagtttatttttctctcagtgcatcttgctatgaggtttgcttgttacccttttggtttttgaattgttgattttgttcacaacctcttttaaatctaacaagtcctgttctgtttagtgaaggcccaaagactcctctaagactttgtatatttgttacataaaaccaagttttactaaatactttaaaatttgtcctacattcgaaaaatagaaattgtaaatcagaggttatctgtctgcattttaaactgccaaattaccttatagtaagtttctattttatgactttgggccaagaattaagtattttcctaagcacaaatctttttctatattctcattttaatatcttatgctattattctgtaaacattttaattttagtttcatgagtctttattttttgttacctgcaagttatgttcttcttcattgaatttcatatttgagagacatttgtcttcatgaagcagatttgcactggaaccattgctttactctggttggaaatgccattgttttggggacagacttttaaaatgcccttgtgtctcccagtgaggagccctaagcattgacttctc

SEQ ID NO: 8040 - DNA, 1135 bp, Homo sapiens
cacacctgctcagagtagcagttctccctcaaaaaagcagtgttcagcctgcactgactgttctgcttgccaaaaggaggaagcatgcaagatacttatttctccatagattgtggagtatagagggatgtgggactacagattattattttttttccccgagacagagtcttgctctgtcgcccaggttggaacacaatggcacgacctcagctcactgcaacctctgtctcccgggttcaagcaattctcctgcttcagcctcctgagtagctgggattacaggcacacaccaccaccgcactcagctaatttttgtatttttagtagaggtggggttttaccatgttggccaggctggtcttaaactcctgaccttgtaatcatcccgcctcggcctcctaaagtgctaggattacaggcatgagccaccgcacccggcccagataatttttaatagcctttgatcatggggtgagtgagggagtaggtatacttggcaaatgcatggttctctgatttctagctctaaagcagccttatctgaatccccaaatcttgtgatgctgagtaccattactgaaccagtctgcacggtaggcatctgctaccaaaatttacctcctacctggtaggtgtcatctgataagaaagaagacaggttattttaattttttgagataatcacagaaaattgcagcccatactctttattaccgaattcaagtttggaaatagaccctttgttttaaatcatgatgggtctttatcccaatcatttatctgggtcatttttccaactttggagttctaggaaagaaccttgaaaacctgatatgattctgcagcatgaggtctacggtgaccatttgggcaaagctccagtggcaatcatttattgtgttttgcatttcctgggatttattgaaataagaattcactgtgattatgtagtcttctggctagtatcaggcagctctgcttttaatttggttaattttattttctctgaagagggagaagaggtacaatttaatcttggcctccacaagcatattaaagctcacgtgttaatcagtgcattcttatgctcctacattaaatgccttgggtaaatggataaatggacatgtgc

SEQ ID NO: 8041 - DNA, 1102 bp, Homo sapiens
ttctaatgcaaaatgaagacctagagctattctgaaggatatactgtggcttattagggacaataataaattttcgtttaggtgacaaggtactcggccttgattaagtcttttatcgtgatctagtaccgaaataataggcttttctgtgccacttgaataaaatataatccttactacagattagtttatttattttaatcacatttagtaccattagtaaattctcccaagtgataaaattcttttttttatcccttgtttttcagatcttcaaagctgctgcgggcattctatgtccccttcctgtcagatcagtatacagtgtacgtaaactacaccatcctcaaaccccggaaagcaaagcaaatcaggaagaaaagtggaggttagcaacacacctgtggccccaaaggacaaccatcttgttaactattgattccagtgacctgactccctgcaagtcatcgcctgtaacatttgtaataaaggtcttctgacatgaatactggaatctgggtgctctgggctagtcaaagtctatttcaaagtctaatcaaagtcacatttgctccctgtgtgtgtctctgttctgcatgtaaactttttgcagctaggcagagaaaggccctaaagcacagatagatatattgctccacatctcattgtttttcctctgttcaattatttactagaccggagaagagcagaaccaacttacaggaagaattgaaaatcctggtactggatggctgtgataagctgttctccacactctggcctggcatctgagaactagcaagcctctcttaggccatatgggcttctccaccaaagctgtttggcagctcctagcagaccttcttattgaaatcctcatgctgaaaatgaacacagcctagttgccaacccacatgtccttttcacctccagcaagactaagcttctttaaagcacttcacaggactaggaccctgtcctggagctatctcaggaaaaaggtgaccatttgaggaactgtgacctaattttattataatgatgcctctaattttcatttcctttacaaccaactgtaactataaggttgtattgctttttt

SEQ ID NO: 8042 - DNA, 1223 bp, Homo sapiens
gtagtagtttcttatgcttcataaagaccctgtgtcagtcattaatgattaaattaaaacttgttttttaagtgttgactttagcctttgccttttacgtttgaaatagttttatagataaagatatgtttgagggttactccggaacaaagtatttctcccatagtgtgttctcagtgccatatattacatttcattctttttctctacacctgataatttgctttatttgataagtctctctgcccacatagtaattgacaataagcattggcacttctctggttttttgatgatatgaccatttggttgtgaatttcactgctaacagttggtgaaatgggtcaagagacatctaattataaatttctcaatgattttggactgacttgtgacctctgcctctgtgctccctggttgaggttttagcagaaatattttttcttcaagagaaatgtttttcacatgattttcctggcttgtttgtttcaagtacatttagcaatattatccccctgtgtttttcttattctccttgtgtttctgacagttggcagcttcagttcattccatcagagttcagaggtcagttaccaaaaccttttgcagaaggacctctggccacccggattgttcctactgacatgaatgaccagaatctagaagagccatccagatatgtaagggctacattctcttcttgcttctctgaaaagaattctatgcctaaaagtctgttggtgtgtatattagagcattgataaaatgagaatttcttagaaagcaatttttttaaggccgggtgctgtggctcacacctgtaatcccagcactttgggagacgggcgggataattgcttgaattcagaagttcgagaccagcctgggcaacatagcaagatcacatttctacaaaaaattaaaaaataagccaggtgtggtggcttatgcctgtaatcccagcctttcagaaggctgaggcaggaggatcacttgagcctcggagttcaaggctgcagtaggccatgattccgctactgcactccagcctgggcaacagagtgagaccctgtctcagaaaaaaaccggatattttttaggatgaggggtataacagcttttgttgaaaaacagtaaacagtatcacttttattttcaaattaacctctttattttctatgtaaaatgtataatttaattttgaaggttttgggtaggctgaa

SEQ ID NO: 8043 - DNA, 1229 bp, Homo sapiens
accccatctctacaaaaatacaaaaattagtgggcatgatggcacccgcctgtaatccagctactcgggaggctgaggcaggagaatcacttgaaaccaggaggtggaggttgcagtgagccgagattgcgccattgctctccagcctgggggacagagcaagactctgtctcaaaataaaaataaaaataaaaatagatgaaaagatgctccatacttagatgttgagaaattaattttgactgtctgaaagaaatctttcccatgtgcttgttgcatttaacttggagtgtgtgttagagtgtgggcgagagtataagagtatgggtcagagtatgagatttgaaggatgatttacctggtgggaagctattgaggtgtgaagcttttgctgtggtgagtatttggattatcatagtcaccatcattctatgaaaccacataagtctgccagacttttattatgtagaagtcttcctggtattaagcaataatatgtgtttgtttctgcaggtacttcttcctgccctctctcccaccatgaccatgggcacagttcagagatgggaaaaaaaagtgggtgagaagctaagtgaaggagacttactggcagagatagaaactgacaaagccactataggtgagatttcttcagctcttaatggttgaggcactgagtttcccaatgaggaagaggattgccattctttcctataatgagtgagtgataatatgaaaactttataattcttaggattcattttctgggacagaatattttatttttatttagttatatgtattctttagtttttatttatttatttgtttatttgcttatttttcagacagggtcttaatctgttgcccaggctggagtgcggtggcaagatcatagctcattgtagccttgaactcctgggcttatgcccaaatgatcctcctgctttagcctcacaagtaggtaggactacaggcctgaaccaccacacctagctgattttttaaattttttgtagagatggggtctcactttattgcccaggctggttttgaactcctggctcaagcgatcctcctgccttggcctctcaaagtgctgggactccaagcgtgagcccctgttcctggcccagcataatttataacaaaaataatgcgtagtcagatttgtcagttccatcctgtgctcactgaatcaaaggcaatcaatctgtcaattcacagat

SEQ ID NO: 8044 - DNA, 1138 bp, Homo sapiens
gctataaatttgagctaaaggtataggagactggaagagtagataggaagtattacctggttgggattatagggtaggagtgagcatttgggtggttactggctgaaatgcagtattttctttcagaatatctaaaatgtctttatctttttctaggtttgatgtggctagcatgatgtctgttacactcagttgtgatcaccgggtggtggatggagcagttggagcccagtggcttgctgagtttagaaagtaccttgaaaaacctatcactatgttgttgtaactaactcaagaatttctaaactctcccaggtcacactgattcattcttaacaagatatttatatgttattaaacaggtggttctttttattttaaccagttatttttattattgagtctgtccagataagttatttataatgggcattactgaatttttaaaatgccgattacacccaaatattgtgcacatttaataatcagacaccagatttttagctctgtactcctaattaagggacatgtatgtggccttgcctagccctttggtgataagtacttcctctaggaaatgtacgataggtagaattgtggttccctaaagacaagtacataaaggtgaccctgatgaaaccttgaagttctgaaatttaactgcctaaaatgttctccttagatgtgagagaaagagaaatcagaaaaattaattctcttgggggaagggcttgaattgaagctttactttagaatttagccctggtttgaaattttccattacatgatcttggtttatcatcgatgggaagggtagaaaacttcaaggaaaataagtgaaattttaaaagtcagcattttcttagacctcttcagctgattgtttatttttctatgaattcctacacatggttattcccccctacttgagataatctaaatataaaccagctacttgatgtaactgagaatttgtgtggatatttatttaaacaaatgtgtaattttgagtacagaattcaacagttacctccaaaaaagaaacattgttaatataatttaacagaagttgtgaaactaaaattttctaagattaactggtagttcattgtaaatgaacataatgaacagaatttat

SEQ ID NO: 8045 - DNA, 1675 bp, Homo sapiens
taaagtatacattaaagtgcttatttaaaattcagatgttaacctcaattttttaatctagaatgcaaaatattaaaataatacgctttttttttacataaaagcttctattttttaacttttcttattagtagtgatcagcaagatattaccaacgggaagaaaacatctccccaggtaaagtcatctacccatgaatcccgcaaacacaagaagtcaaagaaatcccacaaaaaaaagcagaaaaaaaggtcacacaaaaaacagaagaaaagcaaaaaggaagccacagatataacagcagattcctcgagtgagttctcagaagaaactggggcttctggtacaaggaaagggaaacaaccacataaacgcaagaaaaaatccaggaaaaagtctctcaaaaaacctgctttattcttagaggcagaaagtaacacttcacattcagatgattcagcatccagcagttctgaggaaagtgaggaaagagacactaagaaaaccaaaaggaaaaagagagagaaaaaagcccatacctctgtagccaacaatgaaatacaggagaggacaaacaaacgcacaaattggaaagtagctacagatgaaaggtctgctgagagctcagaggatgactaaatgggaaacacttttgttttccacatgactgtggatatttacagttcttactccttgtggttttgccagtgactcttgttcagcacggggcctgaggtcagagctgtcttgtgccatctgtatgttctgacagacgtcttgtcttctattttggcgttaagcttgatccccttttcttgttaaaagggaatctggtattttgttatgaaggtttcttgaagagattatttttttttgcaattaattacgtttagtgtagagtgcatatacagcaaattaaaggacccagaaagctggatccaatagtgacctgggtacaccaatcggaatattgaatttggggaagtcaagggctgggatcaagaggtggattggaactaatgccatgtaggatggtatgacaaggcaacactgtattgctctctgtttatatagcaggtgtcacaactaacttgtctttagccttggtgctttgatccttctatattttgaccccacaggtgtggtccggtttacttaatcaggacatgggcctaagaacaaaccttttcccttcatgataacatccatagacaacttattagaagggactagagtttttgcaaatttccctgctggatggggcctatagctatacttagtatatgcctaaacatggtaattggatagtaaatggttttctagttccattgctgtatatttgcctaaatggacttgtgttcaaattatttcttcaattgtcatagataatcctgtaccaaatggggaagaattaggaaataatcatgttgtctaatggtactctggattcagggcagcaactgccatttaaatgttgtcttgttcatttctaaatctgttcatgaagtttaggttttccctgaaactaagttgaattatttccaaaatgaaacaggcttctcagggacatatccacttcttcccagtctgcctttggattaaagcaccaagcagagaccacattaattccctttgctatactgtgatccttagtatgttaattcttaagaaacca

SEQ ID NO: 8046 - DNA, 1168 bp, Homo sapiens
ctatttgggtcctgaccttcccttcctcccaagttagcaggcttgttctttcgcaaggaatacacatcttgcctttttttttttttttttgccatgttttccttttcttggtcatgtataagcaataaagctgttttttgttcttcatctttcttaaccccaaattttcttctatgccttaggcttcgatggttcttccaacccccttaatatggcttagggtggtttttcaaaacctacaatcccccatttgcactactggccatggaacatttatttctagtgttcctgccaatcagagatctctatattaaattctaaaatgggattaaaagaagagttggagaattcacacttattgagtaactgatgtcatacaacctggaatttctgaattccaaataaataaatttcactctttgaacatttcatcttttactttttagcaccaacagacttgataacagcctgatgctgatctgacaatgggttgatagccttcccccactgacccttaaatctgcttagtaacaagtcctttgcttctgtcattctcctgggggatggcctactgccctcctttctgtacaatctgggcaaaccgactggtgatggcaagagtggtgtcaatgaagcggtctacacagctggagagacaattttcagtgcgagagtctaggcgattccctggcttctccacacatttatcccaacataactccatgaagtgatgcacctaaaaggaaagaaaaatagtaaccattggggtctgcagataggcctaactcttgtttattaacttctcactttttgacacctgacaaaaccattctttaaatcaaccacggagtcactttgggctcttctctttcttcatttcctaattagtcaccaatattgatccagatcctcgtccctacagattgtacattctcaggtaggactaataaccttttatattccccaaagtagctagcaccattgtgaaccaactagggaaccaattaattttcccaaactattgcactcattttattccaaacctatcccctagacaaggtaattcttccattaaccttttgggggttatggatccactccccagaaaaatgcacatacaggcacagaaattatgtgcactgtcattagaatgttcagggcccaaaga

SEQ ID NO: 8047 - DNA, 1406 bp, Homo sapiens
gtgagctatgatcaggccactgcactccagcgtgggcaacagagtaagactttgtctctaaagaaaagtcactagaaatagacttactgacatacacacgcaaaaggctatacagaatcccctaaagaagcaaacagtgacagtggagtggcaaatggagacattgcatttgaacttgacagattgtttttttgcagccaagttatctgtatagtcttctaatttcactgtggttttttattgatgttatgattttttctttttctttaggggccttggacaagttgttactgactatgttcatggggatgccttgcagaaagctgccaaggcagggcttttggcactttcagctttaacctttgctgggctttgctatttcaactatcacgatgtgggcatctgcaaagctgttgccatgctgtggaagctctgacctttttgacttcatactttgaagaattgatgtatgcctctttgcctctgctttgtcatgccattaagctcacaataaggaagaaataacagataagtccattggtggacagccttcttctcttaatcacaagattattttcagaatttaatctttgaggaaaaggtttgagaggaattatatctaagttgtgagactgagttctatattctggtgagttaatggggttgcctcccagcttcttataagactcacagtataactaaacatgatatatcagcttttgcctttcaatttatcaatctcttaaagagaatccaactttattacgattagtatatgatcaaacttccatatttgccttgggaataatggacaaagggaaatactcttaattcatgaataaaaactttgcagaaaattagacagtgtttaattttcgaaaacttccctctctagacagtagataccacctactgatggttacatatactagggaaattttaaaattaggaaatgctgatagctcatattataaatttctaaatcctaggaagaaacgcttggagtgcttctgaatatacagaagttccatttaagggcaagtttccctgtagatgtatcaaaatactaccaactgtaaattgagatttaattcccaaatgtattctacttgttctaaaacaatctgtccacaaatataaaactataagtaataaattgttattttcgcacaatgggaatctctaatgtgaaaatgtattctatgaaaataatttttttaaataaaatgttatataataaaagtgtcttctatgcttttatatattagctatcagtagttttattcattagaattaggtgtccattgcatccacagcatgaaaacaaaattgggtttttttttttttttgagacggagtcgcactctgtcacccaggttggagtgcagtggcgtgatctcggagca

SEQ ID NO: 8048 - DNA, 1148 bp, Homo sapiens
atgaatctggctctagcattccatcagattaccctcctttctcgagtgcccacccaccacccaacggaggttccgatgccattttccagtgccaaccgcaccctcaaccacctttccagtgtcaaccttagccttagctgccaagattccccagagctcagccttcaagcctttcttcatgattacacccaagagtatcagactcgaaggcttggccaaccaagtcttcagcagccccatcacagaggccatttatatcctgcttgcttttctcaccagcacacttctcttctaaagggaagccagggaaacaattgtttctgcctccactgcatcctcctacattcagttccaagctagtgctgggaaccgaatgtgtgtaaatgaaggctttacattctcaaatgtgcaactttgctgccacggcttcagaccaaaacaaagatctggaggcactcattggcaggcttgggtcacatagatgttcatctggatctttcaggacacatattacactttttgaaaatatttagaactggccggaacttagtcacctaggttctccctattggttgaacaggttggcagccaattccacagccaatctcaacttttgttcactgccaaatgattcccctgcaacctctgagtttctgtgggaagaatccttccttactttcaagatgatctcagatttctaaccaaacccattcaggttacaaggaacttctgtgactcatgtgactcaagaaagaaaggagaaaggagaaatagctctgaggctgctggcagcttcccatttgtccacaccagtagattttgaagggcaagagaacaggaacgaaccatgtctgagaagccaatatagaaaaaaactatgttataaaaacatttttgtcacaacaaataaattatactttaaacaagaataatgaatgtgttccattcaaatataagtctctaatgagtaagttaaaacacagagaatgttgtctaattgtattatttgtgtgtgggtattaaagaacgaatcaaatggtgagtgtatgtgtgttttcaagaccagactttggggcaaaactatctcaattttcatttccctcaagtgaaaactggtcatttttcccctaatagtaatttctgttaag

SEQ ID NO: 8049 - DNA, 1189 bp, Homo sapiens
tggcgactcagaaggagaagggaggttataacagggattgagccctatcctttatggttacttggctcctgagcctacagggcttggcctgtagaggattgtgacagataagcttagacacctgtcccagaaaagaagaagtgaggatgcaaactttgattctaaggtcatggcatcatgtcactgcagggcttcctccaatgactccacggagccgtggctttgtccaccagctactgaggactctgtgtaaatgggactccccaccagcagcatgtgtgagatgagaagccccctgcacccctctgtccatgtgctgcatgtctgagcatggcgccctccccagccattcataatgatattttttttctttagctactgacactgactcgtactaggaaacgctgattctgatgagctaagctctttaacacccactcttccttcttagattgaaaacatcactaaccaccccttccactccctcctttattttttcacagctgtgtgtctggattgccacgatctctggcaggtcgacacagacttttcaccagggtttctgctctaattgcctttatctctaaggattccctgcactggaggttcctagggtagagagtcagtgggaaggggctgaagaaaaaggcagtgaggtgtgtcagcccgaatcctgtgggcagggactgtgggcagggactgtgggctgctgctggccttggaaactgccagttcccttagggtcaccagtatgggggctgaaactccccaggagccacattcttcttcataaccaatctaatgtccatgaaatagagttgaagatgggcacgagcccccttgtggccttggaggcaggagccgagttaactgttgatgatagcagttatttctgtcataacttcctcagcctggatcagccccataaccacaagccataccttcctggtcatattttctttttaggatgatgaaacaaagataattgatcaattaatctgttggtgttttcatgacacctgcgagaagggaactggtatttttgtggttcagtctgtcagagctcgttggttgctgtttaatttgtaccttgtgctgccatttgccaccgtaccccaacacatactctcacattcataaattcctcaggaaactggtgctggaaaggatttacagaccagatgcctta

SEQ ID NO: 8050 - DNA, 1098 bp, Homo sapiens
ccacattttggtctgttctctcccattacacataggtttgtctcagcatgcaagagtttttcctttaaaaaaaaaaaaaaaaaaaaaaaaaaagcaatgctttctctaaaatcaaagagggagtcattttattccaagatgttttatcttttatgttaagagatcaaagcttataattttcttttttaatttttgaaggagggatcaactccagtttccaatgtctatgtgtctatgtgtgtatgtgccatacatatgtattcacatgaagaccggcatggccaagttctgctggaggagcactcaagtgtgacgagcagggccactggaccctgcagggctgtggtgtatatagtgcagctttggaggtggaactctattttcacacttttctatggagccttccgagtcccaggttttcacttgaggctgtctgtctggatggcggttttcagacctccattaacatccctacccagcattctgtacttcgggggccttctctcttgttataaaactttttaccaagtgaaacatcgataccacctttgtttccattctcactggtgtaaatactgagtactaactgagaattttgactttgcattctgtcggaatacttgtgttcaataaaaattgaaagaaaaaagctattatgatcatactggggtttatttcaatgcggtgagagtctgttatgtgcatcaaatgtggacatgcgtgtggtagttcctttaggaccttgtgtgcgaggaaggttagcgaagtctcagtgtcttgagttcatgtgttgcctgaatgatgctttctgtattttttctcacaggctgatagatgagagtcctaatttagaaggggcagacgtcagattcagaaaggtttccttcgaactctggttctgccgctccccggttgaccttgaaagagttgcttaatctccccaagattcagtttccttttctgacatacaggaaataccaagaaaagagagttagttagggtgctggttgatgaatgaaacaatgtacatgaaggcctagtgtcttctttcttggcacacagtgggaactcaatcagcgggagttggcgctgttggca

SEQ ID NO: 8051 - DNA, 2341 bp, Homo sapiens
gtatacactgatatattgtaaacatttgaaagaaaataattaccatcatatctatgctagagtatcatatctacttccttgtattttaagaagacaattggttagaagaccctttcgtaataaagtaattatatagttgttatatagcagtgagctaaagtttggtttatttgcctttgctcctggtttggcctgaaggaataatcatttattagtaactggccagcataatgctttgacctttgaggttaggtaaggggctaatagaaggcttgttcacttttactcagaaatctgtttagctgtatatgtaaccatctgttttccctccacagaaaatctgcagctgtgcctaggggagtttctacccagacttctagatccttctgcagaaatcatcgtcttgaaagagcctccaacaattcgacccaattctccctatgacctatgtagccgatttgcagctgtcatggagtcaattcagggagtttcaactgtgacagtgaaataagctcccacatgttcaaggcccattctggttcctggctgcctgcctcttgcacagaagttcgttgtcatagtgctcaccttgggaaaaggattaggtgggcacataagattccgatcagaccccaaccatgctgcatgtgtaaagaaggattgaaaataaaattgcactttttaggtacaaaatcataaaagctgtttcactagaaaaggcagaaagcagtgtattaaggtgttgaattacgccagaagacctgaaatgccttgtacctacaacaatgcttaggcttttctaagcctcttgccacttttaaaattatccttcaggcataaatatttttgacagcagaatagaagaatgattcatgagaacctgaaccagatgaacagctactagttattttatcaaatacagatgacatttaaaaattcttaactacaagagattagaaatataaaccttgcctggctcttgccaggagataacaaaatgggttgctgatgaactgcacccttttacatgtgggtagaatataagctcacatggcagtgagatgttgaaaagtcaaaagagacctgtctctctcctttcttttctatctttaaaccagaaaacctcatactcagtcctcagtgaaagaaagtaaagtattaaggactttagacagaagagcattgtgtaacttgactgaagatcatccattaatagttattaggcatttaggtaaaattttctaatacctaaaaattgtcaaaaacagtcaatagggctactgctggcccaaagaccatttaggtccacctcctcttttttgctctttttttttttctgtgacagtttcactgtgtcgcccaggctggcgttcagtggtgcaatctcagctcactgcaaactctgtctcctgggctcaagtgattctcgtgcctcagcctcccgaatagctggaattacgggcatgcaccaccacacctggctaatttttgtatttttaatagagatggggtttcaccatattggccaggctgatctctaactcctggcctcaagtgatctatctgcctccctcagcctcccaaagtctgggattgcagacaagtcatcgtacccggccttcttttttgcccttaaaagtaagggatgtgggtttgtacaaaaaaaaaaaaaaaaaaaaaaaaaccagcatacatatgcaaaactatatatatatgtatatgtagagaaaaatacttcccattgatcatttttaaaaggcttctgattggatattgtgttttaaccaaattttaaagattaatggaatcatgaaagggaaaaaaattgatacaactatgcagattttataaatgtgcaataaaagtatttgttttacctttggtgtgcagtatggtctttatttaaatatatattttccatttgggaaatggacatacttggtatttgtcttgttccaatttttcttctttaaaaccaaaaagcagattagagggttgataaactggatggggactgacgcgccagtgtttgaaataaaaggcaacagtcaattattgagcagcacctagtggtaactgaagctttttaatctcattggctatttgcattgcatgtaagcttatctactttgtcaaatttttgaatgcaaaaacagcaattttcttagaatggagtttcttatgtagtcattcctcagcagacaccggcaattgctgggacccctgcatataccaaaatccatgcatactcaaattctgtagttggctttgcagaacccacatataggaaaagttgaccctccatacacttgggttttcacatgctgtgaatactctattt

SEQ ID NO: 8052 - DNA, 1106 bp, Homo sapiens
aatacaaaaattaactgggcatggtggtatatgcctgtagtcccagctacttgggaggctgaggtgggaggatcacctgagcccaggagttcagggctgcagtgagctgtgatcatgtcactgaactccagcctgggtgacaaagtgatactctgtctcaaaaaaaaaaaaaagtacagtatgtttttggtgccagaatgctaaaagagtttcatcccttatgaaatgcaagaaacttaaaaattccatagttgtttttgtaattcgatatgaattttttagaagtctttttagagtcaagagactgcctagctcctaggcatcaatttctgtgtgcagaagcccacagcacactattttctaaccattgattctgcccttaataggcattccatgaagaatactccaggctctatcagcttgccaaagagacccccacctctcacagtgatcctcgacttcagcatgtccttgtctactttttccaaaatgaagcacccaaaagggtagtagaacgaacccttctggaacagtttgcagataaaaatcttagctatgatgaaaggtgagaagagaatattcaggtgaatcccttggtctgggttgggctagatggactcctctgttggggaagttttgccctgtgccttttcattgctttctgaactttgtcccacacagatcaatcagcattatgaaggtggctcaagcgaaactgaaggaaattggtccagatgacatgaatatggaagagtacaaggtaaagtgttttctttaagtctatagagcaaaaacattaattcctgaggtaaatggtacctgaggcaaaataaacaattttgtgctattacaaactgacttgttcttccactttcccctcaaaatcctggtaaagaatggataaatgatattttcttgccctcagaatagcaggtctctttattttcattcttcatttagagtgagtcaacatttcacttcccttaaatacctattttagccttgtcctaggcagtaaaattcttgaaatcatgcttttggtttgttttaaatgataaagttttaaaaatacgcattaaaatacatagctacacatgttttcaatt

SEQ ID NO: 8053 - DNA, 1600 bp, Homo sapiens
aaaggactcctcctttttccatgccctaaacagacctgacaggtgaggtctgttccttttatataagtggacaaattttgagttgccacaggaggggaagtagggaggggggaaatacagttctgctctggttgtttctgttccaaatgattccatccacctttcccaatcggccttacttctcactaatttgtaggaaaaagcaagttcgtctgttgtgcgaatgactgaatgggacagagttgatttttttttttttttcctttgtgcttagttaggaaggcagtaggatgtggcctgcatgtactgtatattacagatatttgtcatgctgggatttccaactcgaatctgtgtgaaactttcattccttcagatttggcttgacaaaggcaggaggtacaaaagaagggctggtattgttctcacactggtctgctgtcgctctcagttctcgataggtcagagcagaggtggaaaaacagcatgtacggattttcagttacttaatcaaaactcaaatgtgagtgtttttatctttttacctttcatacactagccttggcctctttcctcagccttaagaaccatctgccaaaaattactgatcctcgcatgatggcagccatagtgcatagctactaaaatcagtgaccttgaacatatcttagatggggagcctcgggaaaaggtagaggagtcacgttaccatttacatgttttaaagaaagaagtgtggggattttcactgaaacgtctaggaaatctagaagtagtcctgaaggacagaaactaaactcttaccatatgtttggtaagactccagactccagctaacagtccctatggaaagatggcatcaaaaaagatagatctatatatatatataaatatatattctattacattttcagtgagtaattttggattttgcaaggtgcatttttactattgttacattatgtggaaaacttatgctgatttatttaagggggaaaaagtgtcaactctttgttatttgaaaacatgtttatttttcttgtctttattttaacctttgatagaaccattgcaatatgggggccttttgggaacggactggtatgtaaaagaaaatccattatcgagcagcattttatttacccctcccctatccctaggcacttaaccaagacaaaaagccacaatgaacatccctttttcaatgaattttataatctgcagctctattccgagcccttagcacccattccgaccatagtataatcatatcaaagggtgagaatcatttagcatgttgttgaaaggttttttttcagttgttctttttagaaaaaaagaaaaacaaaaacaaaaacaaaaaaaaaaaatcacaccattgctcacagaattggcatctcatttttgggacctcccatctttctgttttgaaaagtgtacagtagtgcagtgttcctgatgtaactttatggcttacaatgttgacatgtctcaggttcatgtgttgcgattggtgttttccgtctcaggtagattgcaaagtgtaggccccacacattggaaaaaataataataaaacaaagcaaaaacaggaaattat

SEQ ID NO: 8054 - DNA, 1163 bp, Homo sapiens
tggggttagaggacagaggggaggacataaaaacaaactgatggaaattcacccaactctggtgtcttggtacattttctgttccccaggcaaatcggaggtggaagagtggtcagacatgtacactgtgaccagtcagctgatgctgaaggtgcacaaggaggacgatggggtcccagtgatctgccaggtggagcaccctgcggtcactggaaacctgcagacccagcggtatctagaagtacagtgtgagtaccctggtatcttattctgagggcgtagagttgcagttacatagaaactcttcagaagccatttattcaatgcattcattttatatagtatacatagaattcttatttttgctagaaaaataaaggattattttattgaaatattgtactgccatattacagagtgccaatgaggatttgaaaatgctacattgaacccaaaggtaaaactgaaataatatcaatctgctctaacacgtgacttaattaatttctttgcatatagactgtcatcatttctatgccaactgcaaaatctagggtaattttccccctttttttatcccatcataagtactgaagtttttatagaagggatttttttcccatttacgtcggcattttgttttaaatgacattcctcctctattttagcttaaattagagcaatgagttgaaaagtcgactctttgggatcattgccacaatcttgatggcttcatcaataaaagctagattgtagtgagtgaggttttctccttaccatgccctgtagactgaatatgttttcctcatcttctcctctggacccttctgcttaaaaggaaaaagtctttttctgcacaaagccattcttatgccaaggttgtggctaagtagccagcttctcactttgtatttggcttctgaaaaatcaaggtgatctttgagtatgcatactgaaatgttaccagagtttggttgggatggtagtgattggatgtctgataaaggaaaagctttaccctttgtgaatcattggattaatttcctagggctgccataacaaattgtcacaaacttggtagcttaaaatagcagaaacttctttccttacaacgctttaggccagaagtccaaaatcaaggttttggcaggaccacaccccct

SEQ ID NO: 8055 - DNA, 1215 bp, Homo sapiens
aagcagtaaaaattattaattttatgaaagcttgaccttgagttacatgtttttaaaaatagtttgtgtgaaggagaattacaaataaagcatttttgctacatacttgtctcaaggaagaagactggggagattgagttaaactatagttattcagacgcgtatttggcagacattttctggaaagcagtgagcctgtcattttaagagaaacaatggacattgttgtcagtgataaaattaaagatttcaagtggaaatgtgaattttttaaaacttgcatcttcctctgtgaacttgacagcttcctaatgaaccattgacttttcttatgatattggtggtgatactaatgaatgtgacttttttgatactgaataatgaaatgtgtcaccatttggaagagtgctgcataactcagtgaactaatattttccaaatgaccagtgcatgattttaaaacatcatgagtggctaaaagatccattcaaagtgcaggattgactaatgaattttaatgtgacagagtatgagaagttctttgatgtggtttcagattccacaatccaatttaaccatgaagaagccaccacttgttgagttttggtatagtatcaaaggagaataaaaccataattatctgaaaagactattaaaatacttttccttttacaactatatatatacatgaggctattttatttcccatatacttcaacataaacaatggatcacaacagattgaatgaagaagcaaatgtgaaaagccaattgttctctattaagccaaactttagatttgcaaaattcttttctaatttttttgctgtggaaaatgtagttattttcacaaaaacatgtcctttgtgttaacacgcgatgggtttattaagtggattcataagattctttaaaaaatattatcagttttatttttaagagtttaaagtgatcctgacattatgaactttgagaaccacacccctgacgtggtaaaattaaattttcctatgaatttttatggtttaccagtgcatgagattgccatcttgtgacaaaatagggaaatgcaagtatttttgaaaagctcatctttaaggacttggagtgatttctaatgactacttgttggaaatttatcaagagaaagatataagttcagatttccaagggctatgtcttaaaatatatgtgccaaaaatattaattttcaga

SEQ ID NO: 8056 - DNA, 1128 bp, Homo sapiens
gatatttcataagtatttcctattattattattattattagcatactccctacgtgcaatatatcttgattctgtcatgggtctatgtttcaggattggttccaatataattagagactacaactttaacaacacattgttttattccatttggttaatgtccatacctttcttaaacactatgtaagtattatacatcacaaagtattaaatattgtcatcgtatcaaatacatctctgtgttcatattgctgaatagtagtctactcttaactattttttagttgaagtataacaccagggaggtacacatagtgtaaatgtgcagctcagtaaattgtcgcaaaatgaacacccgagtaaccattaccgaggtcaagaactttgccagcagcaccccagaaggcttcctcatggcctctcaaaattactgcgcttccttcctccccagtgataaccaggatttgaactataatgccatagttctacatttttttgtttgcttttgcttttgacattttaaaaacttcttattgttgaaaatgtcaaacacacaaaagcagagggcatagtgtattgaatatcatgttcttatcactcaacttcaacagttattaactcatgaccaatattatttcacctgtaatctcacccactcccccaaccatggatcattttaaagaaaattatagacattgtactatctttccatcaagatttcagtatgtatctctaaaagacagggattcttttttaaaaagataaccacaataatattttcttacctaaatacttttgtaccaacaatatccaggcagtattaaaattctgtaattgccttatattattattactttgaaaaaaacctttttatttgttgagtcaagagtcaaatgaagtccgtgagtataactacttgattagcacgccaagtttttcttagcctatagcttcttcatcccttttttctccctcgaagtttaagaaactggactgcttgtcccataattgcccacagtctgattttgcttattatgtcttcctgatgttgtttaacatgttttttaaaaatttttttatttcttattagtcaaataagtctatgagattcagtcttacttttctttt

SEQ ID NO: 8057 - DNA, 1105 bp, Homo sapiens
aaaggaccttttaagttagaggcattaacctttctttccatcataactctcagcagatatatctttttcagcatgacctactgtcaagtaaataatgatttgatggcaatgttcaagaaaaattgtatctttgaaatacaaatttttgtcagtgtcttaatgtatagtatatgattggtattatccaagaagaagaaaagatgaatcaatttcttctagaattaggtggctaatgcttcaagcatcctatttaaaaacaattacatgtaggcctgtcggcaggattgcttatttcattattctggtcatttgcatgaaaacaagttgatgattctttaaccactgttcagttttcttttccttttgaattattattcctcaagcattatattccattcatgcaacagcatgaatcagatctagaaagttagaatttcagactaagatagtagcagattttttttcaccttttttaaccgaaaatgatctcccattttcatattaatttacctgtgattacatctctttatccttgtttcataaggtgagtgcatagagttatgttttaatagaatatttttcaaggttttaggatttttttaaatgaggtcatcaccttcaagattttgacctgaacttttcatgaactaaaggagcaagaaaaagataaattttttaaaaagatgaatatataatgtacttataatggaataactgatcgaagttaaattcatttgataacgtttatctggtgctagttcccaaagcactctaccatttcaacaagagaaactccatgttcatacattggatctcccccataagattctctttgaaaaaagtgttttacttttttaaaaaatggtttaaaaaccactggacttaatgaatctttcaatttccaaacaacaaggctggagcaaatgaagcctggttactgggagagcacatcagggctaagaccaaagccgtaggcagtaacaaagaatacttatttgcctgacctttcctctcttcgtattctccttggggttctggaaggtgggactgtggccacagcagagaactggttcaggagctgagatttcagatcacgggcacctct

SEQ ID NO: 8058 - DNA, 1332 bp, Homo sapiens
taagaccatttgtcatacttttcataagaaggtgcagatataacaaaataggtggattgttccctgattctggggctggggtcttctacccctggcccatgtgggctctgttgctacccactagttcagtctagccatgggaaattggaggccaataaaaagaaaaaaacccaaaactcattctgttcttgggaaggtgggaattggaagctgcctgcagagagggggagtggcacagcggcactgattgtctctccttgaccttgcagaatgtgtatgcgcctgaagatgatcctgagatgaaggtggagcgttacaagcgcacctttgaccaaaatgaggagctagggctcaatgacatgaagacagagggctatgaggcaggcctggctccgcaacggtagcagtgggtggctcaagggccagcctccagcgctgctctttctgtaggttatttattagtattggatgaaggcgaaggctgggagtgtctttcccaccagcccttgcccatggtggggaggacatctggtctgagtcagagatctgtgcacactttctaaacagcttgtgatgcaagtgtgagcctattgtgttacttgaccttattttggaagttttgaattggcctaggaggaaacccagaaatgaaccaggggtatgtcatcacttttttcatatcaagtcctcaccctccttccacataatgctctatcctctaaggttggaactctgaagttggagaaggtggaataaagttacacctggagtttgttgttggttttgagtatataaaatactgactttgaacaggaaaggagtctcctgaggggagaccgagtccagcacaagtgaaggagttaccattgaaatgatgactttcaaacagcactggcctctgtattgaccctatccttgtttgatatcatgctgttagaattcagcctcctaaagaaaattttcccgtgtatctactgtaatttggggattgcagctggcatttaattcattccttcagcagatgcttgcttatctactttatgccaagcacaccacagaacagaggacaaaataaatctctttcatggaacttgaagtctagtggggaaaaatgacaataaacagatcaggaaaacagtacatcagatggtgattagtgtcatggaggaatgtaaagcagggaatggggctgggttgtgcaaggaaatggggagtagggaagatcttctgaacaagaaggtgataatttgacatttgggcaaagctgaggaggaggtcagggagtgagctgtgtgggtatctgggggaagagatttcctggcagagggaact

SEQ ID NO: 8059 - DNA, 1099 bp, Homo sapiens
cacctgtcaccacccgtcaacttcaggcttgtttgctacatctcattgtgaagcctgagtcactctgtttccactcacactgagataggtggtgacttcctaatggaagtaacatgggcatgacaaggggcagggcataaggtacaccaccagggctgatgctttactctctgttcatggcaggcaaacaaagatgctacagctgaaagaattgatgagttcattgtcaaactgaaggagctaaagcaagtagcctcccctttcactctggtgagtattgagaggctggagttgcccttgattaggggaggagggaccattaagactgctgggattttccactgtgatgcctgcgtggtctgatagtaggtgatgtaggattgtttatgattttcttttgcagtgactctctcttctcccatttgttagatcattgatgatccctcagggaacagttttgtggaaaacccacatgctcctcagaaagatgatgccctggtgatcacacactacaaccggacccgacagcaggaagagatgctggggcttcaagtaagtggactgaaggatccagaagaatgctctggaattatcgcgcactctggattgcttggagtcagtggaacttattttgctgctgctgctctgtgtgccctatctcagcttgtttgtgcttctcatcttgcttatgtccaggacttgggtaaacttcacagaaaggatggcagtggctgtgatcctatcttaagtcctgttcttcctttggttggggctttactttgtggtttctctaactgatgaggtggcacctgacataactgatgaggtggcacctgagcatttctcccactccagggcagggtgttggggacactgaggtatacctgccaacttgcgacctgcatctttgctattttaggaagaagcaccagcagagaagccagaagaggaagatctcagaaatgaagtgagtcacattggctactggtgaggaaggagcagagttgtgggctgagactgatgctgttcagcatctgtcttccttgtcaccaacatagatgaccactagcataccaactgagtgtctttagcctgaaca

SEQ ID NO: 8060 - DNA, 2088 bp, Homo sapiens
tcttgtaacctggaaagttggttgcctttatcatcctgctggttttatccatggactgaacacccaacagcagtgcactatgctttctatggcatctttcattctcattttatattgtgctataaaaaggattgtttctccatatatatattatatatgtgtgtatatatataatataatatatgtgtatatatatattatatatataatatataatataatatattatatatatattatatatataatatatatataaaatatatatatatatgctctcctctttcagcctctttgtcacagggaagaagtgtaggaggttgccttgggccctgcctctctcctaacctcctcttccccactgggtaccctcagcccctatattttaattcttgatcatgtagaaattgtttttggtaaatgttgatattattgttattatcattattaataaataaagagaaaaggaatttttgtttaaatgagaaatgtttaaccagattctgttctatttgaattgtgacttgcaccttttgttcaaagtatttcctttaggcattgtaattgtgaacagctcttacttgtgccagtgacagatgcagtggtctcctttccccagttgaagcagtgcatacgcagtagctattatttgtgttatctttatttctcttcattgttagaaaccaaagtcttctctgctggctggggctgagagagggtctgggttatctccttctgatcttcaaaacaagagagagaccttgaatacactgactcttccaccctttttttttctgggaaaggagagcaagaggtcccgagtcccctcctagtctttcatcctgaatttgcacagaggaaagcgggtgcccggcatggccatcctgatgttgctggcgggatccccatgcaccttgtccttctccactgatactggcagctcggctcctggacccaagatcccttgagtggaattctgcagtgcaagagcccttcgtgggagctgtcccatgtttccatggtccccagtctcccctccacttggtggggtcaccaactactcaccagaagggggcttaccaagaaagccctaaaaagctgttgacttatctgcgcttgttccaactcttatgcccccaacctgccctaccaccaccacgcgctcagcctgatgtgtttacatggtactgtatgtatgggagagcagactgcaccctccagcaacaacagatgaaagccagtgagcctactaaccgtgccatcttgcaaactacactttaaaaaaaactcattgctttgtattgtagtaaccaatatgtgcagtatacgttgaatgtatatgaacatactttcctatttctgttctttgaaaatgtcagaaatatttttttctttctcattttatgttgaactaaaaaggattaaaaaaaaaatctccagactcaagttgctaagaccttttgtcctgccttttgtccttccttttgtgaggcacttacttacaacttggttacttagttggacagcaggaagttgtgtagataggagcctgattgtgttcttaggctgatagattatttgcctgtggtttggagtctagttggaagaagcctcaggtaggtgggagctggagcagtggaggctggagaggtctcccaggctaagggtggggctttgagtgacttaagaaactcgcattctctagaagcctgaactctgcttcacactgtgtccctgggcacccagctcggactctgccctgtcagaagggagcatttgaatttgctgggccaggtggaaaacagcttccttgaaagggcacttttgaagagtacagggaaggatccttaaagagtggacacaggctggacccttcatgacgtgacccccattggccgagtgaaaggatagccaaataagtatttggaaagaaagggaggggcctggcatggctcacgcctgtaaatccagcacttctggaggccgatgggggtggatcatctgaggtcaggagtttgagaccagcctggccaatgtggcaaaaccccgtgtctactaaaaatacaaaaattagccaggtgtggtggc

SEQ ID NO: 8061 - DNA, 1334 bp, Homo sapiens
ctctatcctctactagactgtaaaatgagggcaaggtctatgtctgtaaattcacattttatcctgtaacagtaagcatttggctatttgttagattaataaatgaatgaatgaagataaataagaggaagaaattctaattagtattacctaagcaaggtaaaaatggaaaaataggtatatgaaaatcctgtataacccaggagtctagaaaagttctgtaaataagaaagttaacagaaagtcctgccccaagcccagttactagagtaagaggcatgacagaataagctgccaccttgagcttttccttcctgtctctcttcaggcagtgccagcagttacccctgtggacgaggagagctcagacggggagccagaccaggaagctgtgcagaggtaatgtgacatctggcagtgcttgcagaagcccctgggcaggctcccctgcaaccagcgaaaggtcacctctgcccaaggaggtggtagagtgcagcttcaacatttgtgtggtctctttgctcaagccagatggcatgttccaccccacatggaagtaacagaagactacccagaaaatgtcatttctgtaagcaccattggaagtcccctaagtgacagcaataaccataagaactttttctttcctccctccttcttccttgtcccctgccttcatattgcaactctgatagtattcacaaggcacaaagcctgctcgtacctgccaagaactgtttactgaaaaggaattggagatgtgggatgacagtgatcctagctagtctggccatggacctctggcatggacttttcctttccaggagaatgaatacctcttgtactgtttgctgtgtgcttcttccacccccttgtaccaacaaagagatattgaaaaagagaatatgggattcgggccagggacagatgcaaatatccattgtttacagaaccttgttgagagatgcctaactcacagagaacggcagtgaccatcaggcatgctgtactgttcatttggcctcagttccgttagccctggtccttagctccatgcatgcccccttgtgggagttgattttcttattatccggggagggggtttcaccagaatccagcatgtattttcccagaaatacaggtgttcttcaagattatatgttttttcctttgagggaagttgaaataaaatggttttcatgggcttttggggaactttgggtgtctttatccaatggttattaaaacattaatggcttactctttggcaagttcacataacactgattactctacagtctgttaactgattttagctgaaaggggcaagatag

SEQ ID NO: 8062 - DNA, 1511 bp, Homo sapiens
tcagcttcctcagatcagttctatcactggcactacagaatccttctctttcttaaggcactttgcattgtagaatgttcctggatgttcatatctagtgtttgaaggggaggagggatttaaactggtcctgtacatagaaggtttgtttgacagaggagaaaaattagccaaggaagattgttgtttaaattcatttgaaaccagaaggggactttttagttgtatgtgtaacacattcattgaattattatcactgttttcttgggacaacatcaagcctaaatactgaacaatatgaagattcttttcttggcctttctgtggattatgtcatatataataattatcagaatcattctacttggctttaaaacatgttttctccaatttttttaaggttcataatttagccttttgtttttatgttgcttagattcttatgtatactgaatattttattaacatgtagcatcaggttgaacatgcttgtcattgatatatggaagatgctatagttagaagtgaatttgttctgctttcttaatcttttccatgcttagcagtgaaaaacaggttttgccccagtagagggattctttggagggtattattttttatgctgctgaatatcatgtctataatagacccgtgcatgcagcctttcctccttattccccttcatgcccccctttccccttcattccccccgccaccccgtttttttttttttttttttttttttggttcttgttgacattacaagcttttaacacatttttgacctaggagccctgttgctggaagtatagtctccagccagttactctcatgatagtactgctataaaactcattcttgtgtggtgttctgtgctatagattctgtgtattgctgttcatattcggagttctggttttgtttttcccttaaaacctgttaacagttttttttgggggtggggggattcagaactcttgtttcccattccatagcacctgacattatttcaagttttataatatcttaaggtgtatattttattttttttattggcttagttgttttttgttttgttttgtttgagatggagtttcactgttgcccaggctggggtgcaatggtgtgatcttggctcactgcagcctccacctcccgagttcaaatgattctcctgcctcagcttcctgagtagctgggattacaggtgcatgccaccatgcccggctaatttttatatttttattagagacgggatttcgccatgttaaccaggctggtctcgaactcctgacctcaggtgatctgcccgccttggcctcccaaagtgctgggattacaggcatgagccaccgtgcctggccttattggcttagtttttaaattatcctccaaaaattttgggcctttttctgtggggaaacaagtgaagctgctcttcagcatagacactacctttatcccatcattttagtaaaaactaggtttgtttcacttctgaggtgtcttat

SEQ ID NO: 8063 - DNA, 1627 bp, Homo sapiens
ttctctgtggctgatctggcgtccacaccccaggtgttgctgacactggatgacgacctggatactgtgcagcgggacaagatctatgtcttctagcaggagctgggcccttcgcttcacctcaaggggccctgagctcctttgtgtcatagaccggtcactctgtcgtgctgtggggatgagtcccagcaccgctgcccagcactggatggcagcaggacagccaggtctagcttaggcttggcctgggacagccatggggtggcatggaaccttgcagctgccctctgccgaggagcaggcctgctcccctggaacccccagatgttggccaaattgctgctttcttctcagtgttggggccttccatgggcccctgtcctttggctctccatttgtccctttgcaagaggaaggatggaagggacaccctccccatttcatgccttgcattttgcccgtcctcctccccacaatgccccagcctgggacctaaggcctctttttcctcccatactcccactccagggcctagtctggggcctgaatctctgtcctgtatcagggccccagttctctttgggctgtccctggctgccatcactgcccattccagtcagccaggatggatgggggtatgagattttgggggttggccagctggtgccagacttttggtgctaaggcctgcaaggggcctggggcagtgcgtattctcttccctctgacctgtgctcagggctggctctttagcaatgcgctcagcccaatttgagaaccgccttctgattcaagaggctgaattcagaggtcacctcttcatcccatcagctcccagactgatgccagcaccaggactggagggagaagcgcctcaccccttcccttccttctttccaggcccttagtcttgccaaaccccagctggtggcctttcagtgccattgacactgcccaagaatgtccaggggcaaaggagggatgatacagagttcagcccgttctgcctccacagctgtgggcaccccagtgcctaccttagaaaggggcttcaggaagggatgtgctgtttccctctacgtgcccagtcctagcctcgctctaggacccagggctggcttctaagtttccgtccagtcttcaggcaagttctgtgttagtcatgcacacacatacctatgaaaccttggagtttacaaagaattgccccagctctgggcaccctggccaccctggtccttggatccccttcgtcccacctggtccaccccagatgctgaggatgggggagctcaggcggggcctctgctttggggatgggaatgtgtttttctcccaaacttgtttttatagctctgcttgaagggctgggagatgaggtgggtctggatcttttctcagagcgtctccatgctatggttgcatttccgttttctatgaatgaatttgcattcaataaacaaccagactcagttcttggggcccttgtttgcactccctctgggtggagctgttgaggatgaggggagaggcggaggtcttccatttccccattcttcaagccatggccctactgggaactgcaattccttgattctcccgtttttcctgtccctccagcaacagc

SEQ ID NO: 8064 - DNA, 1166 bp, Homo sapiens
ggggcaatgtggcttctggaaggtctctccagtggctctgtagctggtcttggcaaagaatgttctagaccaagggttgtcaaactacagctcatgggccaaatccagcctgctgtctgcttttgtaagtaaagttttattggaacaaagccatgttcatttgttacatattgtctatggctgctttcacactgcaacagcagagaccatgtgtcctgcaaagcctaaaatatgttctgtcttatcctttacaaaaacagtttactgacccctgctctagacctccaaagacctggtatcctctttcctggtgttcaagttcagagaggtgtctggagtaggggctgagcctggcctggatgggcagtgctgtgacaagtgtctaggatggccgggtatcctgcacagagctagaaggctgcctggcacgggtgaaagcagagctgctccctgaccctctgcccctccctcctccaccctggcctgctttagctttccccagacatggccaacaagggtccttcctatggcatgagccgcgaagtgcagtccaaaatcgagaagaagtatgacgaggagctggaggagcggctggtggagtggatcatagtgcagtgtggccctgatgtgggccgcccagaccgtgggcgcttgggcttccaggtctggctgaagaatggcgtggtgagtggcaccctgggctagggcgctggggggctggggtgtgccaccctgtgagtcctgggccaatccctgagctgactgctaagctgcgtcctatgccctatgcctggtagattctgagcaagctggtgaacagcctgtaccctgatggctccaagccggtgaaggtgcccgagaacccaccctccatggtcttcaagcagatggagcaggtggctcagttcctgaaggcggctgaggactatggggtcatcaagactgacatgttccagactgttgacctctttgaaggtagagaggaagaggctgggggaggaggtgggcaggaggacagggtgctgggacagggagagggaatgaccagaatatgccacaactaggggtgtgcttgcccgcacacagcagggatgggatatgccgagaataacacgccacgctcacagggcccactgagaggcctcccttgaattggggacaactct

SEQ ID NO: 8065 - DNA, 1337 bp, Homo sapiens
aacataaccaggtcccaattcctccatgtaccccacaagcttctgtccaccctattttctggacagaaattagcacaacccacaggtttttcctgggccaagtcttcctttgctgccactgtcttggcttctaatcaagctctgacaggccaacattgtgaagtcctcaccctttcccattcacttctggtctcctagtctagctaatccccctcccccagaaggttaaggcagttggttcacaaccaagttgtttggtgaccttgggtgagctccagacaggcactggggtgaggagatgtctgtgcaaaattacttgtagaatgatcttgggatgctggattttaatttttgaagcaagaaagttagggggggacatatttcctgtcctgggaaaaatggagaccaaagtgatattaagaaagtagtttggatttcaaatttataaatcacttgctctgtgggtagctatcaggaactagatcattttccacctctgcttattgtacttcttaattttaggttttatacctgggaaagctgtgactctattagagctttgaatcttttcctatccttttatctttactcctacagggaatggcctcagctcccttctcttttagaattaaacaagtaaaaactaagagttaactttttaaaaaaactgactccagggaaaggacattattatattaccaatagctgatttttttttccattctgggacctaaaatgcttacaggtactagcagtacatgtcggatagcaaagacttttcctttcagacccaactaaatgatctcctttctgcctttgatactcttttccttctttgtctttcatccttgcctatcacctcacagatggattcttcctcatttctcttgcctcacttgcccaggtttattgactagcgtcagtttaaggagctggacttcctgggacctccttggcatcttgtagggtgattggagtggcctgagtactcagctcttcagaggtcaggtgacccactttctttggttaatgaaatgttactgtctccaggttagtagctgtcatgaacaggaaaggtggcaaaatggaagaccagttctattgttctttttgtttaggggattcgttttttatcttgtaatcttaagatttcctctcccctcaactttacagcagccttaggccacctgccgtatttttcagtatcccctgcaaatttagaaattgaaaatgagtgtaaagcatattgtttcttttccaaaatcctttgaagccaaaggagtaaagaaagaaaaaaggaaggggtgaggagggggcttaactgcttcccagtaaag

SEQ ID NO: 8066 - DNA, 4975 bp, Homo sapiens
ccactgtgtgatgctttagtcaaataaatggaggggccattagagagggtaggaaggcaatgaaaccactctgaattatgtaaagatcttgctacttcttatagcctaataggaagaaatccaggcaggggttatagggcatcagctgttgaatgaatgttcaacattatgcttttaaggattagatagaagaggtctcctacctattccttttagcaccttggctgcaaagctccagaggaagatttgggggaaagagtgagcctatgaccaggaagacagagcccagccctgctatagtccagttgctctcccacagggcacctggagcttagggggttaggatatttcagtgctgcctatcatatgtagaataaagggtggttcagatagagacaatgaaattaatatggcagaaattcatgtgttaagtggaacttcttagtgggcacttcatttaagagagctaaaaaagagctctttggctagataagcccttcccatctcacttttggtcaggctgcaaccacagaaaagaaaacattgaaaacaacacccatcttctgagatgggatgctatcttggagatgaggtctaaaactaggactggtgagtggttgtgtttctgcctttcctagctttgatcccactattccctgtctttgtactccctctccttctcctctttccagccgcccccatttgtataaatagtcaatctagtttttttttttaattcaagaggcaatctttgcaccaatgttaggcttgtttatacagtccctgtctctaaagcaaatagcaaactgtgcatcctctcctactgactttggccagcagggaaacaagcttggtctcttctctgccagggtaccacagggacacacgccaaggtaacctgcgtgtgatgccagtacttctgaaactaagaaaagaagaatactttgggttggagaatttaaaggaatggtggacaaaggttcagggctgaagtttcaagcagcagaatttcccgacttaaatttgaggtgaccaagagtattcccgccagcagagtgcttctttcttctcttttctgtttcctacaggtacagtccctggaacccaccttgccagccttttccttctccatcaaggcagaggcatttggtgggtggggagggtcctgaggtgctctggccacaggtgccatctgtgtctcctacttgtgaccaaagtgaaccacggaggtgtggtccaggggaatctctatcttctgcccatgggcctcctcacttcagcagggagatgtcatcagcaaagtcatcatgctgctggcgcaggcagcggaggcagcaccactgacacaccatgaggcagagtggcagcatgaagagggcgcagatggcagccatgacataggctatggtcatgagggttgactcatctgtctgtggaatgttgtagccacagtcttccatgtccaaggtgacaaaagggccttccaccgctgccgtcctgaactcatcgtgcactggggagagggcaaatgtgaatggacagctctcattgtcatagaggagttaacaaaaagaacttcctgatagtgaggccttgaaattagcccatgcagaagttatctaatctccttcccaggagatatttaggagcaggctgggaagccagcaccaggtagaggcctgtctcccttcccaagtcactgggagcagcagcccttccttgtatacccagctggtaggagtgataactaaaagtcagtagttctgagttgaccaaaagccacccccttgaccaaaagccaaatctagtaaacttaactttctgctgctgaaatccaactgcaaaaccctgccacctttctgaagtagcattcagcctcaccatgtggcagctgacagggtcactatagactcagtctgctacccttgcatcaagagcttcccaaggtacccaggtaactcttgctgctctgggtttccaacagaggttaccaatccaggcagtggtcattatggcaggcagtacaaaaaaaggacgagcattgacactagcttttgcacaactgttgacttgggtttgaggcaactgttactaccctcccctaaactgacagggacccaggtatactaactgttgtttgacaaggaaaatatggagagactgaccccaaaccctcagccctggcactctcaccatggcaagcgctgacagcaaagccaattcgttttcgggcccgatcaaagacaacgtagaagccctccatgataacagctcccataacagtgcccgtggatgactgtgagatggcaaacttgtaacagtcgtcttgggacgtggccacatcttccactggccgcaggtattgctaggggtaagcaatcacagggtgagtgtcttcctcactctccttcaccccatctctgccttgtaggcatctatgcccttccctttaccatccctgagctctaacgggttttctgagacccctttactgctggacactactcatctgttttgtcttccaagttctggcaagccatacctgctcactgtctcccagtgtgtacttttaagagagatccccctgactcaggctgggacatacctgcggaaggatggtgatgcggaaggactggttggtaacctcacccattaggtagagtgagatgactgggaaaatgttccaaggggtggtgcctgcttgccagcacaccagctgctctcctagccagaaaccatcagggaacttctccgtctgtgttggcaagaaggggataacaatgaggaaaagcctctttatcatctcgcccctcccatgttcagatacattaactgggcccttcatttgcttttccagtgaaatatctaaagtggggaggggtaaaccaaccagaggattacaggaagagagagggagtgtgatgtcaaacttttgtaccgggggattgtgtgatgagcaaagtgacagccataaaggggaagagttttttttttttttttgaaacagtgtctcactctgttgcccaggctggagtgcagtggcgcaatcatggctcaccgcaacctccaccgtcctgagttaaagtgattctcctgtctcagccccctgagtagctaggattacaggcgtgcgccaccacacccagctaatttttgtacttttagtagagatgggatttcaccctgttggtcaggctggtcttgaactcctgacctagtgatctgcccaccttggcctcccaaagtgctgggattacaggcgtgagccaccacgcctggctaggggaagagtgttttaagagctctgagtagaagggtctaagtgcagacatcttggctgttgctgaagaatgtgactctcaccgcctccctctgacactgtaccatctcttttacccccatccttagtccactcacggaggaggctgccttgatggatttgactgcagcttcaaacactttcttgggcaaacgaaggttggtggtgccactgtccacaatgctcttgtcatagttgtactaagagggaaaagagagagttaaaagagtcaaaaggtttttgatgctgggctctgggcagtagggggttactgctggggccccagctgggttggcatcttggctttggcacctcctaagtgtacctgcttggacaagttaacctctgtgcctcagttccttcatctctaaagtgaggataaaaatagcacctacctcaaagggttattgtaaggattaaataaatcagcaatgtaaagcacttagaatcgtgcccagcagagagaaggcacttggtaaatgtttattcttgttaatcttgggtgggcaggtagtctccaaacttgaaaataaaaataccttgtttagtgcttttaacttttcttttcttttttttttttttttttttttttttgagatggagtattagctctgtcacccaggctggagtacagtggcgtgatctcggctcactctaacctctgcctcctggattcaaaccattcttttgcctcagcctcccaagtagctgggactacaggtgcctgccaccacgcctggctatttttagtagagatggggtttcaccatgttgaccaggctggtctcgaatttctgacctcaaatgatctgcccccgccttggcctcccagagtgctgggattacagccacgcccggccgcttttaacttttcttagtacatttatatctattctaatttaacatacataagaatctagggaaggaagacataaatgatttagttaccttttattgagtactgccaaccacagagataaacactttacacattatctctgatattctgagaaagttgtttttacctgttttgcagataaggaaactgagacacagaatagtaactggcctaagggtacatagctagtacaaatcagagctagattcagatctgggtcttcctgactccaaagacaagactcttcattctatcaccctgtctcacaaaagacttgcccaaggctacgaagcaaggcagtgactagagtccagacatcagaactagttccatgttttttttttcactaccagtccctaggccccaaaccgcagatcctgctgtgtgaccattaagcccctgactgttctaggctcaacttccaaccctttctgcaggtcctattacctctgcctcatcctcccaacatgataaccagagtcttccttcacattgtactgcctacccccttatgttcccaggctctcccttggttttcttacctccttgcagtccattttcagatcctgtccattgatctccacccgcacaatgatcacctcataataccactcccgccggatgggtgtataccagagactgcctgtgtacagcgagtggtcgatacctccaatgatctagggaaaaaaagaggcaggtacccgtgtcctggcacagaaggagagtgagtcccccaaggaccaagcaataagatcagt

SEQ ID NO: 8067 - DNA, 1200 bp, Homo sapiens
tatcagggccgggagccctttgggaggaagggaggcgttagaggagctgccttcggaggctcagggagtccctttggagctggttgtttccttggccctgcagcgcactgctcggggctcccaaggaggttgtgtgtatggttcttaattcatcaggacaaagacccccagcatgtgtgtaccctgggacccgatttctctgggcccacatctatctccaatacctcagcctcagatcagaccctttcttttttgtctttcttctcttaatttttaaatgcctcttttcttgagcattccatctctctttttgaccctctcaggactgggcttagctgtccagagccctgccggagggtgctgggggctgtccctctgcaggcactgtgttttcctcaggggctgtcctcagaacacccctcctgctccctggggctcctcagggagccatttcagctggagtctcaggtctcaaaaacaacttctccaggaggccaaaaaaagactgggttggcttctggtcctcatgatggcttttatcctcctgggacactttgggtatattcatgggcattgtttccatctgtcttttctacctgtgccacccctgccctgattccacggctgcctcaggcaggcaggcaaggagctaggccggtgcccggccctggcagcaaggggtctttgtgcagttggagatgctgccgttgtggcagagcgtcctgcagccccgcttccatcagcaggctctggggtgggggctttgcaggggatgctctctgatgtttgttccgttgtttaaataaaatgcacttatttttgtttttttttttgcaagctgtggggttgcccttgcttctctgacacacaaattaactccttccgtcctccaactcatttcgtggtcatggaataagaaactaagatccaactggctgttgatctcctcagatgccttttaagcatcagcccactacatagaaaactccgtttcatcatgtgtgctttgggaatagcttatgtggtgcaccaactctagtgataatcctgggtattttctgcatcatttaaatctctgcaggtccattttctacaaggcagtcatgtaaatgtgtctccttcttttgggaggcctttgcctccttcctgagaagggaggaaggaaaaatgaatattcatagaacactgccctatgtagta

SEQ ID NO: 8068 - DNA, 1111 bp, Homo sapiens
tccttttatctgttttatctcattatccattcccatgtcccaggtcagtgttctcgaacttgtgtgcacaacagtatcggctggggggcttagtgaagcacaaattgcagggccccaaccccagagtttccgattgagtaggtttgagatggagtccaagaatttgcatttctaacagtctctcaggtgatgctactgggccaggccctccttcaagaaccaccatcctaggaaatctttcatggtagcctgtgcagtgggagtcaggagaccaggagtcaagtcccttccctgcctgttattagtgacattaatataggcatatcttctcacctctctgaggcttagttttctttctttatcaattggcaatggaaacctttgcttttattaccctgaggtattatttggaggatcagattagacaatatgtgttcaagccctacaagtgttgttcaaaccctacaaactacatgtgttgtttgaagctggtaatttcttctctggggtagaggtgttttccctctgtcttctggtggactgttctagtcttctccttttaggatgtgacaatacatctcttcatctcttaccatgaaaagtacccagatgcagggaaagggactgctgcagagagacttggagttgcatccagtagactgtcaaagtcagcacttccaaaatagagatacagttataccggtgcaaacctgcactgtggctccagaccacagaggggtggggctgccagcagacggtcatgaaagttactctcggagaggctcatgctaaacctcttccctgggcatcatggaaatcctttcagaccaaggaagaaatgcctgggcaagccaaagctttgagcctggagacccagtggaatgggcatgagtccagtcatccatgtttttatgattacacttgtaggtacatttcatatggacacacaagcagtctgcatgggaacaaatgtgcattacctgtgtgcgcagacacatgatagctggtgaggaggaagcatggttgacattgacgttgtatgagtaatgctgacgtcagccagaggggtctggctgacgtcagcatctaggggaagacttgagaaacacag

SEQ ID NO: 8069 - DNA, 2127 bp, Homo sapiens
cctggaaatgaaatgtcttttcattttttttttcccaaactagttctttctcagaaaccttttatcctaaggctcaggactgtgagcaaccactggggaggtcctgggtttaacaatttcctttccatgtctgccaggctccagcccacctgggagaggcttcttctgaggttcacccctcccctgtgtctttgtctcctttctctgcgtctcagacgaggctgtcataccgggaatttcagtgggcaggtgctcaaggaagggagagaagcagataaggataccagaggcagccgaagtgtttttaatttaaattatcctcctcctcagcctctggaacctgaggcggctgcttgaacctttggatgcaaatgtcgatgcttaagaaaaccggccacttcagcaacagccctttccccaggagaagccaagaacttgtgtgtcccccaccctatcccctctaacaccattcctccacctgatgatgcaactaacacttgcctccccactgcagcctgcggtcctgcccacctcccgtgatgtgtgtgtgtgtgtgtgtgtgtgtgactgtgtgtgtttgctaactgtggtctttgtggctacttgtttgtggatggtattgtgtttgttagtgaactgtggactcgctttcccaggcaggggctgagccacatggccatctgctcctccctgcccccgtggccctccatcaccttctgctcctaggaggctgcttgttgcccgagaccagccccctcccctgatttagggatgcgtagggtaagagcacgggcagtggtcttcagtcgtcttgggacctgggaaggtttgcagcactttgtcatcattcttcatggactcctttcactcctttaacaaaaaccttgcttccttatcccacctgatcccagtctgaaggtctcttagcaactggagatacaaagcaaggagctggtgagcccagcgttgacgtcaggcaggctatgcccttccgtggttaatttcttcccaggggcttccacgaggagtccccatctgccccgccccttcacagagcgcccggggattccaggcccagggcttctactctgcccctggggaatgtgtcccctgcatatcttctcagcaataactccatgggctctgggaccctaccccttccaaccttccctgcttctgagacttcaatctacagcccagctcatccagatgcagactacagtccctgcaattgggtctctggcaggcaatagttgaaggactcctgttccgttggggccagcacaccgggatggatggagggagagcagaggcctttgcttctctgcctacgtccccttagatgggcagcagaggcaactcccgcatcctttgctctgcctgtcagtggtcagagcggtgagcgaggtgggttggagactcagcaggctccgtgcagcccttgggaacagtgagaggttgaaggtcataacgagagtgggaactcaacccagatcccgcccctcctgtcctctgtgttcccgcggaaaccaaccaaaccgtgcgctgtgacccattgctgttctctgtatcgtgatctatcctcaacaacaacagaaaaaaggaataaaatatcctttgtttcctagtggctcggaggtgctttcctttctgtgaaagaacttgagtgtttgtagggtctgtggaacttaaagggctagagggagtccgtccatggtcagagggaagaggaaggactggatagccacccaggcaggcacagagccccgtcagctgctgtcactgttgcctcctccccgcttctcttccctcctttccttttcttccttcactttcctctcctcctgctcagcccttcgtcccgcaccttcccgccatttctattcctccctccctctctcccgccttcccaggccactgggctcaagccacatcccatagcaggacctgtacattgcacactgtcttggagcaaaaaagggagtcacaatggcttctccaagtactcagtggcctggagtaaaacatcctaacatttctctttggtcagttctggggccactacctaaggacttgtaaagagagccaggggtggtgactcatacctgtaattccagcaacttggga

SEQ ID NO: 8070 - DNA, 2311 bp, Homo sapiens
atatgtgatgtcacatatttcagtgacagctgatgttatcagaaaaatcctgttatcctgtgtatttactagtcctcatgatctagacttaaccccttttctgtgttacagagtaacttcacataaaagcagatacctttaagtttgtgtagacttctgaataagatgatagacgagaattttttttaaaaaaggaatttaaaggaatcttgtgcaacttctgttgatagctcttaattttgttatacagtctttttaatgaggattggtagggcaatcctaccaattgatgggggtgaggagactgttgggcccttattctcttatgaaaatctgtttctacaaggactaggcctaagtagatttaggcaacgggtatcatatccatgaaaaatgtcattttaagacactaatatcaacagtatatctcagtgtgtgagatatataaatacacatacaccccatgtgcttttttgttggtttagtgtaaactgagtaccactttatattttctcttccatagtgagatgtatgcagtatgtggccatgtttactaacatactcattcttcacaaaattctgagattataaaatgtatatagttaatatttgtttgagcttgtgacctgacttctaagagctacttctaacacagccttaggtcttcaattaacaaagtaggaagttgagcacaaccttgtccacagccattttaaatatccacttagccctgtgtagttggtaggtggacaccactttcataagtgaacttgagctcactactcaattgtgcagcttaatatgctgactagggacattcccctatggattatctttatatcactgtctttctaagcccagagatgtcataagtgacaagaaaagtgataggatcaagaaatgggtgtcactgcttcatttggaacatgttattaactatggtctctttcaaataaatagtagttttatatttcaacacaagttgctataagcagtccttgatgggtttttgattgcatcagctggaaagcctcaaatctaagagggcttcccatcctagatataaaataggtgttgcctattgctgtgcttataaaatgaaaaaggaaattgaggacacttttgcaaatgccagaatgtaagattcattcagtgtgctccctgggcctttatggcatgggttgacaggatttgtttattttctaaaattagcttcattcaatatttatcatcctcctttccctctctgagaatgaactatgtataaaataagcttctgcctatttgcatttatcttccaaacccaatctagtaggatgttctcattttaaaaacgaggggaaaagaccagagtttttcaggagaaaactggaggaaaatgggcacaaaaactcagaaggcagctattcccagcagcttcctagttaacaacccccatgctgcctccagtctttgtctgtattcttctgtatttaaccttcagattgtaagccttttctggcaagcttttcttctttttttaaactcttttcctgaaactttttatgaatggctatggcaccattaatgctgctgaatatctttaaactctgcacaagcaagtgtgtagcttaaggccactactggtaaggaaaccaagtgtcctctgtgccttttttctttctgtgaagtaatttaagaatatccaaaaaaattagactttaaaaagttatcttggtacaacaccgtgtgtatatacacttggaagcttaaaaaggtgttttgtctggaacttagaagcagctctaaatctagtagagcagactttctaacatacctagttttgtgtattggctttgctggagtatgatagcaaaatgaagactcttttactcagctctggtattgctcataacttaccaagaggctaatactaaacttggaaaattgtttaagtatgttttatcaagcagtctgggttttgttttttaatatactttttaatggatatgtgaaaactgaaggaaatgttaaaggttttttaatggtgcaagtgaaggtgccagttgctatttgatatcacactctacaaaagcttcattactttatttgatggtggttgctaagcagccattgcacagagcataagtctactgggtgcctttacatgccagaggctgatgctgcactgttgatgtcatgtgaggaaataatgcacatgctctaactgctcaacaggaaatgaacctagaaacagaaaatgaaaaggttgattgaaataaaacttgatcaacgcgactgtattttgaaacattccaggaaggttacttct

SEQ ID NO: 8071 - DNA, 1648 bp, Homo sapiens
agagggatctgcacataatgtggcttaccctggaattcctaaactggccccacaggttcataacacaacatctagagaactgaatgttagtaaaatcggctcctttgctgaaccctcttcagtgtcgttttcttctaaagaggccctctccttcccacacctccatttgagagggcaaaggaatgatcgagaccaacacacagattctacccaatcagcaaactcctctccagatgaagatactgaagtcaaaaccttgaagctatctggaatgagcaacagatcatccattatcaacgaacatatgggatctagttccagagataggagacagaaagggaaaaaatcctgtaaagaaactttcaaagaaaagcattccagtaaatcttttttggaacctggtcaggtgacaactggtgaggaaggaaacttgaagccagagtttatggatgaggttttgactcctgagtatatgggccaacgaccatgtaacaatgtttcttctgataagattggtgataaaggcctttctatgccaggagtccccaaagctccacccatgcaagtagaaggatctgccaaggaattacaggcaccacggaaacgcacagtcaaagtgacactgacacctctaaaaatggaaaatgagagtcaatccaaaaatgccctgaaagaaagtagtcctgcttcccctttgcaaatagagtcaacatctcccacagaaccaatttcagcctctgaaaatccaggagatggtccagtggcccaaccaagccccaataatacctcatgccaggattctcaaagtaacaactatcagaatcttccagtacaggacagaaacctaatgcttccagatggccccaaacctcaggaggatggctcttttaaaaggaggtatccccgtcgcagtgcccgtgcacgttctaacatgttttttgggcttaccccactctatggagtaagatcctatggtgaagaagacattccattctacagcagctcaactgggaagaagcgaggcaagagatcagctgaaggacaggtggatggggccgatgacttaagcacttcagatgaagacgacttatactattacaacttcactagaacagtgatttcttcaggtggagaggaacgactggcatcccataatttatttcgggaggaggaacagtgtgatcttccaaaaatctcacagttggatggtgttgatgatgggacagagagtgatactagtgtcacagccacaacaaggaaaagcagccagattccaaaaagaaatggtaaagaaaatggaacagagaacttaaagattgatagacctgaagatgctggggagaaagaacatgtcactaagagttctgttggccacaaaaatgagccaaagatggataactgccattctgtaagcagagttaaaacacagggacaagattccttggaagctcagctcagctcattggagtcaagccgcagagtccacacaagtaccccctccgacaaaaatttactggacacctataatactgagctcctgaaatcagattcagacaataacaacagtgatgactgtgggaatatcctgccttcagacattatggactttgtactaaagaatactccatccatgcaggctttgggtgag

SEQ ID NO: 8072 - DNA, 1954 bp, Homo sapiens
ttgtgccaattaattaccaaacattgagcctgcaggctttgagtgggagtgttgcccccaggagccttatctcagccaattacctttcttgacagtaggagcggcttccctctcccattccctcttcactcccttttcttcctttcccctgtcttcatgccactgctttcccatgcttctttcgggttgtaggggagactgactgcctgctcaaggacactccctgctgggcataggatgtgcctgcaaaaagttccctgagcctgtaagcactccaggtggggaagtggacaggagccattggtcataaccagacagaatttggaaacattttcataaagctccatggagagttttaaagaaacatatgtagcatgattttgtaggagaggaaaaagattatttaaataggatttaaatcatgcaacaacgagagtatcacagccaggatgacccttgggtcccattcctaagacatggttactttattttccccttgttaagacataggaagacttaatttttaaacggtcagtgtccagttgaaggcagaacactaatcagatttcaaggcccacaacttggggactagaccaccttatgttgagggaactctgccacctgcgtgcaacccacagctaaagtaaattcaatgacactactgccctgattactccttaggatgtggtcaaaacagcatcaaatgtttcttctcttcctttccccaagacagagtcctgaacctgttaaattaagtcattggattttactctgttctgtttacagtttactatttaaggttttataaatgtaaatatattttgtatatttttctatgagaagcacttcatagggagaagcacttatgacaaggctattttttaaaccgcggtattatcctaatttaaaagaagatcggtttttaataattttttattttcataggatgaagttagagaaaatattcagctgtacacacaaagtctggtttttcctgcccaacttccccctggaaggtgtactttttgttgtttaatgtgtagcttgtttgtgccctgttgacataaatgtttcctgggtttgctctttgacaataaatggagaaggaaggtcacccaactccattgggccactcccctccttcccctattgaagctcctcaaaaggctacagtaatatcttgatacaacagattctcttctttcccgcctctctcctttccggcgcaacttccagagtggtgggagacggcaatctttacatttccctcatctttcttacttcagagttagcaaacaacaagttgaatggcaacttgacatttttgcatcaccatctgcctcataggccactctttcctttccctctgcccaccaagtcctcatatctgcagagaacccattgatcaccttgtgccctcttttggggcagcctgttgaaactgaagcacagtctgaccactcacgataaagcagatttttctctgcctctgccacaaggtttcagagtagtgtagtccaagtagagggtggggcacccttttctcgccgcaagaagcccattcctatggaagtctagcaaagcaatacgactcagcccagcactctctgccccaggactcatggctctgctgtgccttccatcctgggctcccttctctcctgtgaccttaagaactttgtctggtggctttgctggaacattgtcactgttttcactgtcatgcagggagcccagcactgtggccaggatggcagagacttccttgtcatcatggagaagtgccagcaggggactgggaaaagcactctacccagacctcacctcccttcctccttttgcccatgaacaagatgcagtggccctaggggttccactagtgtctgctttcctttattattgcactgtgtgaggtttttttgtaaatccttgtattcctattttttttaaagaa

SEQ ID NO: 8073 - DNA, 2942 bp, Homo sapiens
gaaattgatatgttctgtaatgagaatgtagtcaacatgatggagactcaaacctcctgctttaccttactctttgtttattttcctaggttaccaaagtgacccaggtagatggaaacagccccgtcaggttttccacagagaccactttcctagtggataagtatgaaattctgtaataccaagaagagggagctgaaaaggaaaattttcagattaataaagaagacgccaatgatggctgaagagtttttcccagatttacaagccactggagaccccttttttctgatacaatgcacgattctctgcgcgcaaggaccctcgactcacccccatgtttcagtgtcacagagacattctttgataaggaaatggcacaaacataaagggaaaggctgctaattttctttggcagattgtattggccagcaggaaagcaagctctccagagaatgcccccagttaaatacctcctctacctttacctaagttgctcctttatttttattttattattattattattattattattattttttgagatggagtctcactttgtaacccaggctggaatgcaatggcatgatctcagctcactgcaacctccgcctcctgggttcaagcaagtctcctgcctcagcctccgagtagctgggactacaggtgcacgccaccacgcctggctaattttttgtattttagtagagacggggtttcaccgtgttgcccaggctggtcgcgaactcctgagctcaggcaatccgcccacctcagcctcccaaagtgttgggattacaggcatgagccaccatgcccagctgctcctttattttaatccctaaatataatccctaaatatagttatatttcatacttagtttgtttttaaaaagttttctctgtagaaaattttaatcattcataccctttacctttaggtttttctttctatacattcagtcaggcactgggatcatctgtttacaggcattatatttatttggcactcctggaacaagtatatctaacccattcttgatttttggactattcaggtgaactatttgaggggtatggggtctagaagttaaaagatacgcatgtcttctgttcttttcccgtatcaattcattccttcatctctttgccaagttgttttcctttcagggcctgtccttccagtttagaacagtaccatgaatcccacttgtgtcaatattaaagatagctgagaagcacctttcaaatggcacagtccctcttcaagatgtctaaaagaatggttatgtctgtccagttagggatttcacatccacatgtaatcatgtctgctgctgttgctacccaaattttcatttctccacattttgggtacttaagctaaaacgtaatggccacagtctgtaatccattcacattcctcagtttcaccacctccctcttccagactgcactctctgtcatcagtcccctcctttctaacagaaatggggttatgattttgaaggctgtgggttcagggagtctttgccaatcctgttggccctaaactatcaaggaggctccatttcaccatttgattttttgcatttcaggaggcaactgattgtttcgatatgtacatattactcacgtataccccatttccttccagtcagcccaacattttccaccagtctgtccccatctctgaaatccttccttctctttccccctaagtcttttgagtgtcatcatgtactggtggtttctcggttccatctcatccatttccttttcaatggagactacagcgtcagccagctcagccttggcttttaactcaatattccagtccataggggtggttaaaagttgctgcaaggctgcaggcactggcagtgggaagaggcagacgactagatgacttctgcacttttagctggttgaaaagtaccactcccactctgaacatctggccgtccctgcaaagagtgtactgtgcttgaagcagagcactcacacataaatggctgtgtgtggaattgcttgccaaagaagtttctagcctttccctttcccctaactgcatcagggaagaattcttatctctagcttggtttccacatgaggtttttctgagaagggcttgggacaagaagtctgtcatgttagttaagcaggcaagaaatcctactaatccagttttgtttgaaagttgtttgtccgtatgattttttaaaagtcaagtttaatttcaaaaaaccttttttttctgagattacttttggggtaatatttaaaatgagagacattttgtaaccctgtaaaatacatagggaatataacattccagtgtatacaaagaaggcaaattctttaatcaaataaagcgcattataaaatgagatgtttattggattattgactcactttggtgtctgcttgttgattcaggatgctgtaatgggacctaacattaaaaattaatgacatgttttttttaagagaaagtaatctgtgagagtattcattgcctttttccatcttatatgtattgtgcttccttgcgtatttttctacatttgatacatgcactcctgacagtgtagcttttgaatttgatgctacttctggcctttttggggattggagtcttaattttgtcagacggcagttggagagtcaaaaaagtcaggcttcatctttaatcttggagtcttggagtcttctcttccccattagaccgtgatgagaagtgatccagggatgagggataatgggaacaatttttgggaactgttgataattccctcagataaacctgcttactttttttttttgagatggagtctcgcttagctgcccaggttggagtgtggtggtgcgatctcagctcgctgcaaccacggtcgcccagcttcaagcgattctcctgcctcagcctccagagtagc

SEQ ID NO: 8074 - DNA, 1229 bp, Homo sapiens
ctatgttttttctttccccatatattctgatggggataaatactgttttgcctctcccataggaatggaatacatttattctaaaatgatctttcacagaagtaagagagagggaaacctaaatatacctctaaattgtttgaagttggtcccagcagcataaaatgggttggccccaaagggttggagggtgggcttggttatcagtatttgttttcagaatgagatgggagcatctttcctttgccacgtgctttgtgcttgataacatcatgcttggttcaaacgacaactcagcacaaagccttgagtataaattgttggaatcaaaacatctcattctgatgacgtggtttaattttttaatttttttttttaataggggtgggagggagggtactttgccccagaagggagggtgtctgcactaaggatttagaaacactttggaagctcataacctcatcagaaactgcctttagccacactcctgaccttctagatgagtaacaaaaaaatgaaataagttcttggaaattaagccatttattttaatttgctatttttttcaatgttctaggtatctttaaatttgttattgtggaatcattttcctgccagatacctttatcaaaattattggcctcatgagagctgaagtaagtcagctttttggtgaactttagtggacttctgtgagattgtagttgtactttgtatctctaaatctaaagatagttttttaaaactcccaaagaaaatctgctctcctttctgatctaaaaactcatctttggggtaaagagttaagtgtccaaaggttgtcacagttcatgaggtcagagggagctagcctggcacctggactctgcccatccacagctgacagattccaacagaagtgtatttaaattctccagtagacaatgctgggtaagggagggggtagggctgggttattaagatacaggctgctgtattttacattggttgtgtgggaaggggagcctggagaaaacaaagtcactattcccttttttgaaacaggaaaaaaaattattttttgttcagtaaaaatggtagagaattccaatgtccctagccacaagggaccagttccactgagaagtgaacagtgggaactcaaaatttcagaaacattgggggaagggaaaattggctttctcttaattggcagatgttccagtggggggggggggggctctgtt

SEQ ID NO: 8075 - DNA, 1428 bp, Homo sapiens
catatgacaagcctttgtgctctatagcagacactaaagactgggttacatatgcctccagtagtagtatggcacttgatgtgtagacatgtcagagcttggccctctttcctctgtggcaaagcgtgtcccatagaaaattgggtgtgtatacttgtataactttgtaaataagttttttttctgggttcatatatatatatatatatacatatatatatatttttttttggatgaaggttgctgggattaaggggattagagtgattatgggagcagctaaagatgagaggggctcagttttacgcaacactaaattctagaaagtactttggcctcgtgctgtagagagcagatttctatggtaccctgtgttagtaaaggggcccagaaatctgggatgtactgtttgctgccacactgtctcatctagtacctttggagtaggtttaccagagagagcaaggaagcttcaaaacattgataattcaacatttattttgagaagctctgattttgcttcttccccctttctaaaagtttgaggaatatttcaagctctgcaacagggggcaaagattaatctaccttgcagtgtaggaattctattgagtggcagtgtcattgagcagtatatatataaagcacagatttgcatttcagaatattagccagtaccagctttggtaatgttagcagttctggagcttaattttctgtggatcatttcctgtagtgtgtaaatgtgttgccctctgcccgctttgatacataaacttttgcaggaatgggcaacctgagagctgttaactttcatgctacagaaagctgcttgccattctcttgcattgtgacaagaattgttacctgtcattttgcactgtaaattgctggcagatgctttacagtcaatagtgttgctttaaattgtgcccctcccaacatgcttgatgtttggcctgatctccaggcaaaaggagtgagatgaatcaaaaccagtgaacttttttttttaatgtttttaattcccttttaacccagtgtactaggtcaatcaggaggcatctggaaagggggggaaaaaagcaaaaaacaaaattaaaaaaaattgatttccatattttatttttcaaaaccctaaaatattacaaaataagtcccgcatatactttaatgttttaactcttttggacaaaggaatcaattacttgaagttgcttttttgactctgcctacttctgagcaaactatttgcgactcacccacaattgccttggagatcaaaatcctacagatgcctcctgatgggacatagccctaactccttaacaactgtagcaagaactgcacggtacaaacccaaaaaagaacaagctcatctatttggaacccaagcctcatattttctgtccagtcaatgttggttac

SEQ ID NO: 8076 - DNA, 1069 bp, Homo sapiens
gcagagtattcagtttgtgtaaggttaatttttttcccccggatttgttacgagtgagggctgcctgctatcagaacattcacattcattcaggcccccaatctatctcagggttgcctaccagaaattatttaatcctataaccagtagattctatagtaggcacagggttagtagaaactactagaaaagagcatttgggatgaggattgtgaaaacctatgtatcctagtttgtgttgctttcagaatgttaattttgtattctcttcttctgtaggctttgacaaattacaaaaggctcgtttggatctgtgacacatcgttttggggggaatgctcctctctttgtgggtttttcatcttttattttggaactatgaagacttaaaagagctcagacattttctttttttaactggtgaagagaaaaaggctgaaaagaaggaatataccttttttgttccacttgtttgcactgtgtgctgactgaacattagttgcactaactgctggtttttaaaaaatgttttctggggaaaggggacaaggaaggaaaagaaagaagagaaggggagaaaccctaaaaagagaagaatcttaatgaacacacaagcttgtcaatgatttcaaaattctccaacagctgactctcgtgcatttcaacttctccctgattcctcatccgttttttaagcctgaagagcttattacttatttgtgcgaagtgccttatgctatgagaccattcagaatatcatcttttagacacagcccgaggaatcaacaatagtaactctttctttccgtttttttttctttttcttttaaaaaatgtcttcttattttggtttcaggttgaagtctcttccctttctacccagtactcgagcccagggctagaagttgaaactcactagtaatgttaaacaccattttttttttctttttggggaggagttgatatgcaactgcagttcatccgcactgtaaatacatgtatttaaaaaaacaatcccaagtaaaaatttcttctgggctgagtagataaaaaacatcatcgctcccaa

SEQ ID NO: 8077 - DNA, 1254 bp, Homo sapiens
acccagggacatgcagccctacatggccacccactgtttgcagtgtctctgggtccctaagggataccattcctgtctcgtccccaaatggtaagatgacgtaaatgacccactcctaaactgaggtcagaccacctaggcttccacctggtgagccctagcagggctgagacccccagggcggcagcctgtctgctgctgagtgattcagggagaacatgtgtgcacgtgcatgtgtgtttgcccacaccggtgacacggggccctggctttccactttggatgcccgggcatccgctgctgctacatcttagccagaacttgaagtcttttgtcccagtttgggatgaaggaaaggaggaagaggcggtggctgtgtggcccccttgagtggagccatggaaggggtggcatggtgccactggggcctgtggctgtagtagccctgggccaggtaacctccagggccctgacttttccagaggctgctgccacctacttcttatcaaagaagggggagaacagttcatctgagtcagtgcacctcccctccagtctccactccctgaggatggaatcggggaaacagcatcctgccgcctcctctctgcctgcccactcaccggcaaggttgtccctctgcccagggctcagggccatgtaccagatctgtctgtgcccacccaggcacagccactgcctcccccttggctccctgctcctacccaggagagctccctatccgcctttggtcagagctgaagccatatacgactgggtgtttgtccccctactttggccccaggagtaaaaaaacttctccttttctcacttcctttcctgcctcgggaggtggcagggcagttccctggctgaggccttttgcgccccacctccaggaccaagggccattctagacagggtgtcttctaccaggacccgtccctagccttcctggcctggagggcctggtcttgcactggcagctgtaatacaaagggaactcgccccacttctcccagcctggtgctgtcctctcggcccaccatcggccaggtccagcgcttcctctggggctgacaacaggcccctgactcaccccggtcacctcccagggtccatggccagggcctctgtgtttggggggccacttgcccttcatcctgccaggcgctttgcccgccctgcctcagcctgggccctgtgcccttgagccctccacccctggcccaagacccccccaaactgtctgac

SEQ ID NO: 8078 - DNA, 1192 bp, Homo sapiens
aagaaagacaaagacccagtgaacaaatccgggggcaaggccaaaaagaaggtagaaataagacctctctgaaagagactaggggtaactctctcgtaatcctctagtaataggtaacttgtatagtaagtggtttttcaggtgtagatttctagagtcaaaatgtgagagtttatcttcccgtcaccactcgttctttttcccattaggatcatgaaaatgggtctgttgtgcgaagtgtctgccgctgtgcctgctgtgttatttttaactgatctagtggggctcggcccctgtttgaaggccaaaaacgtgtcggtgttttttttttgtttttgttttagtaatgtgtaatttatccttgataacggtggaacagatttctctgacgcagattactcgagagggaaagggtgcttctgccagaaatactaacttgtttctgttttgttttggtgagcagaagtggtccaaaggcaaagttcgggacaagctcaataacttagtcttgtttgacaaagctacctatgataaactctgtaaggaagttcccaactataaacttataaccccagctgtggtctctgagagactgaagattcgaggctccctggccagggcagcccttcaggagctccttagtaaaggtgaggggtgtatcctacatgtgtgtttttgtaggttaaattgtcttgaccatgttaagcatcttcagtggttttgctggaaaagcagaattaaaaaaaaaaagcgtggcttgaccattggctgttagtaatgtaattctgacgtcttactcctgatcctgagatgaattctcagggttcttagccacttttgtgccgtggaccctgtggcagtttagtgaagcccaaggatcttttatgtttcgagtaaatggatgcatagaattacagggacaaccgtttttgaaataattagattactattttgaaacaactttgaaaatgtttaaaacctttatggtaaatattttgttgatgtattaaattttaaaaccagaaatttagtacggtctactcagtagtatggtctgattaccataattccacaataataaggctcagctaactatagtgactgaacgtctataattctagcactttgggaggccaaggcgggtgaatcaacggaggtcaggagttaaagaccagcctggccaatatggtga

SEQ ID NO: 8079 - DNA, 1192 bp, Homo sapiens
tttttttttttttttttgagactgagcttcactcttaaccacccaggctggaatgcaatggtgccatcacggctcaccacaacctctgccttccgggttcaggcgattcttttgtctcagcctccggagtagctgggattacaggcacctgccaccatgcctggctaatttttgtatttttagtagagacagggtttcaccatattggccaggctagtctcaaagtcctgacctcagctgatccgcccacctcagccttccatgatatatgttgttcttcaagcagtttcccctggcttaagtggggagaaagcctcaggcctcacactttttttcctcaccctgggcccggcttaggtgtgagctctttgaccagaacctgaagctagctctggaggtggcagagaaggctggaacttttggacctgggtcataggctgaacctgttatggacccccaaattctgagagttcctgcaacaagaatactgctgttgacactccagtggaaatcccagcagccttgttagtgcacttgaaagtgggagaatgctgaccctgatgacttgtactgattcctgagccttaacactgtgctctttccttctgtatataccatggtcttactttccaactctgtacagatttatttatggaggagctaggtccataaatgttgtaataaatattcctttgatcttggtgtttgcaatctgtcttaatcgatggttttgggggaaagatacaggaagtgagtcaaaaatggttagggaattctgggaagatgattatgtgctagtaaaaaacataacaaatatgtgttcattaaataaatgaacataagattttgaagcatgagcattggatctagtcccagaattgctgctgatttcctggggtcctggggtggtggcagcagtggtggtggctgttatgatgatgatgatgatggaacatatttcaagcacttacagccaggcattcctgctttatctcacttgatcttcaccctaactccagggggtacattctgttacagataagagatttagcagactttctgcctcaaagtttccaagctagttactgacagtctgggtttgaaccaggctttctggctacacactcagtaaaccactgttacacttcttccctccatcaagttatttaatctgtccacaacccaatagctt

SEQ ID NO: 8080 - DNA, 2189 bp, Homo sapiens
ttctgaggagactaacctgtttcttcccaaagcaggatccgagccaggagacactgagcctttggagttaggaggtcctggagcaggtgaggatggagccggggctacggtgggaagcctggtggggtctcaggaaatcctttgcaaagaactggggttggttcctctgtttcacctgcggtgattcctttgctcccccaaactcccaacagaacctgaacagaaagaacaatcgacaggacagaagcggcctttgaagaacgacgaactataacccccacctctgttttccccattcatctccacccccttcccccaccacttctatttatttaacatcgagggttgggggaggggttggtcctgccctcggctggagttcctttctcacccctgtgatttggaggtgtggagaaggggaagggagggacagctcactggttccttctgcagtacctctgtggttaaaaatggaaactgttctcctccccagccccactccctgttccctacccatataggccctaaatttgggaaaaatcactattaatttctgaatcctttgcctgtgggtaggaagagaatggctgccagtggctgatgggtcccggtgatgggaagggtatcaggttgctggggagtttccactcttctctggtgattgttccttccctcccttcctctcccaccatgcgatgagcatcctttcaggccagtgtctgcagagcctcagttaccaggtttggtttctgagtgcctatctgtgctctttcctccctctgcgggcttctcttgctctgagcctcccttccccattccccatccagctcctttccccctgggtttccttggcttcctgcagcaaattgggcagttctctgccccttgcctaaaagcctgtacctctggattggcggaagtaaatctggaaggattctcactcgtatttcccacccctagtggccagaggagggaggggcacagtgaagaagggagcccaccacctctccgaagaggaaagccacgtagagtggttggcatggggtgccagcatcgtgcaagctctgtcataatctgcatcttcccagcagcctggtaccccaggttcctgtaactccctgcctcctcctctcttctgctgttctgctcctcccagacagagcctttccctcaccccctgaccccctgggctgaccaaaatgtgctttctactgtgagtccctatcccaagatcctggggaaaggagagaccatggtgtgaatgtagagatgccacctccctctctctgaggcaggcctgtggatgaaggaggagggtcagggctggccttcctctgtgcatcactctgctaggttgggggcccccgacccaccatacctacgcctagggagcccgtcctccagtattccgtctgtagcaggagctagggctgctgcctcagctccaagacaagaatgaacctggctgtgtcagtcattttgtcttttccttttttttttttttttgccacattggcagagatgggacctaagggtcccacccctcaccccacccccacctcttctgtatgtttgaattctttcagtagctgttgatgctggttggacaggtttgagtcaaattgtactttgctccattgttaattgagaaactgtttcaataaaatattcttttctacagtttttgtgctgtgagtttttaaaaatagaaaaattttgggccaggcatggtggctcatacctgtcatcttaacattttgggaggccaagatgggaggatagcttgaggtcggaccagcctgggcaacagcaagactctgtctcaaaaaaaaaaaaaaaaagtatctgagtgtggggatgtgtgcctgtagacccagctacttgggagactgaggctggagggtgggtcccttgggcccaggacttcgaggcttcagtgagctatgatcgtgccactgcactccagcatgtgtgacagtgaaaacctcaaaaagtttgaataattacatcatcaaaatgttattgacactttggacttagttgagatttgtatatgtatttttttcaaggaaacaaaatactggttttattttactgctaacattatttggactcctatatcccaggcatttttaagtaacgtactttttttttttttttttctttgagactgggtcctgctctgttgc

SEQ ID NO: 8081 - DNA, 1233 bp, Homo sapiens
acctcttttcccttcagatacactggcagtgatgtctgtggacctgggcagtgagtccatgaaggtggccattgtcaaacctggagtgcccatggaaattgtcttgaataagtgagggtggcccccgtgttaagggtggggaacgagggagtctgggctccaagtgtgaatgtgttagtcatagtgcccacagcagacttcggcatctgagtggttaaatgtgtgtgagtgtcgaggcttctgagtccttctgctgcaggcacctgggcccaaaatctcttttcctcagggaatctcggaggaaaacaccggtgatcgtgaccctgaaagaaaatgaaagattctttggagacagtgcagcaagcatggtgagctagcagtccctcttcccagagtggtgggcagaggagaggagatggcagcccccagagtctgtttccttatcagtctctgtgatgtaagaggtaggtaatggtggacttgggagcctaatactagtctgctccttcttcacccctcaggcgattaagaatccaaaggctacgctacgttacttccagcacctcctggggaagcaggcagataacccccatgtagctctttaccaggcccgcttcccggagcacgagctgactttcgacccacagaggcagactgtgcactttcagatcagctcgtgagtgctctgttggggaaggtggtctcggcaacgctgctgggctcctcattggtgtgtgttcctgattgtcctgccttaatgcctggctttccttggctccaactaccttccttcccctcaggcagctgcagttctcacctgaggaagtgttgggcatggttctcaattattctcgttctctagctgaagattttgcaggtgagtggtcaaggtggggcccttagggccaggctccccaggatctagggcagtgattctccaacaggggcaagtttgcctcccagggaacatttagcaacatctgaagatagattttggttgtcacatctgaggggtgcacctgctatctagtgggtagaggccggggatgctgctcaacatcctacagtgcacaggacagccccacaacacagaattacctagtccaaaatgtcattagtgaccagattagaagccctcatctaaggtatggagccggcgggacccttttctgttgtcatctgtagagcagcccatcaaggatgcagtgatcaccgtgccagtcttcttcaacc

SEQ ID NO: 8082 - DNA, 1858 bp, Homo sapiens
cctcaccgctgagatcctggagctggcgggcaatgcggcccgcgacaacaagaagacgcgaatcatcccccgccacctgcagctggccatccgcaacgacgaggagctcaacaagctgctgggcggcgtgacgatcgcccagggaggcgtcctgcccaacatccaggccgtgctgctgcccaagaagaccagcgccaccgtggggccgaaggcgccctcgggcggcaagaaggccacccaggcctcccaggagtactaagagggcccgcgccgcggccggccgccaggcctccccatgccaccacaaaggcccttttaagggccaccaccgccctcatggaaagagctgagccgcttcagactgcggggcaagcgggccgcggctcccttcccctcccctcccctcgcccgccttcgccgcccggcctcgagtccccgcccgcccccgctcccgtcccgcaccgcctgccgcgtcggcctcgggccctgccctgtccgccgtccgccctccggtagggttcgggccttccggatgcggcttgggcgctcttcggggacctccgtggcgcggaagacccgagcctgccggggggaggccggcggcgccgcacctgcccgcctcggcgttcgtgactcagccgccccatcccgagtcgctaaggggctgcggggaggccgcagcaccttctggaagacttggccttccgctctgacgcagggccgaggtgggcagtccaggccgagaggccggcggccctgaaggtgagtgaggccctcggcagctgcagccggggtgtctggtacccccccggcgtggtgcttagcccaggactttcagacgcggccgctggccgggaggctttggtgggagagacgcgatcgccgatttcggtctggcgccccttctgcggccgggacccaggcctttcacatcagctctccctccatcttcattcataggtctgcgctggggccgggacgaagcacttggtaacaggcacatcttcctcccgagtgactgcctcctaggaggacatttaggggagggcagaggcctgcagtttggcttcacggctggctatgtggacagcaagagtcgttttcgcggaagccgactggcagccaggcctgtcgggccccccgacgccgccccatttcccttccagcaaactcaactcggcaatccaagcacctagataccagcacaagtcggttaatccctgtctggactgagcctccgttggcttctgaactggaattctgcagctaacccttccacgactagaaccttaggcattggggagttttagatggactaattttattaaaggattgttttttttttaaatggagcgtttgttttcattttgcaagagagttgtagaattagtgactttctatactttcctgataataggggtgggaggggccatgcaatataaacaggctctactgttaactgaaggggcaaaccataggaatttaagattgtggctctgtttcttggtgttcctgggagacaatttattctgtgtgaaatgaaaactattgaggcagaagcagaaaggacgtaccaggagaactctgggcaaaagtcccagcctctgaggtaaggatgaaagggctttgtgtttgttcctatcttcccgccaactccacacgcgcacacacaacaccttcagaactggtttattagtaggattggttacattcaaaggctgttgcttggacttctctaaagagatgaagcccccacatactgaggaggcaaggcagtcatcaaggccccaaggtgaggcaaatccctggaaggcttgaaccctgcagttcagtctcccggggtaatcactccccagat

SEQ ID NO: 8083 - DNA, 1180 bp, Homo sapiens
tactcaaaacaaaacaatttttagcacactgaaaaaaaaaaaaagccaaatgttttgtgcctttctaaggcagcactgtatcccaggctgcattttaggacttaatatggaaataccagagtctgagctcctctaccttgagtttcattagtccttagtgtctaggagacaggaaagaatgctctctgtgactggagaggtgacatgcaggtgcagtgtgtctggagtccctttcccctgctgtgagacttcagtggaggagagaagcattgtaccctgggatcatttggttggttccaatcacaagcttagttatcaggttgcatgccttgtctcctgcaaaagacagaatgtttcacaattcccaggtaaactctggaccattccaagtgtcctagccttctgatgacattaattacctagttgtgtcgaggagtataggatggactctcctgagaaggggaggttggtggctttgtcttttctttttgctggatcctgaactggtctagacctcctgcccccaccccccagcccccatcagatgtggctggcctttcatttgaaggcttcagacttaaagcattaagcagctagtgccctctgcagggcctggtttccccagggaagggcagcaaggaacatgggaccagaagcctgtcctcagtaatgtgactatagtgagctttagcaaaagtttttctatataatgacatcttacttatcttttaccctttcctcagttttcccctgcctttaactaataaagaattgggagacagaaattttaaagtcctccttattcaagattttgaaattcttagcctgggagtgctggagagaacctgatgctttctccagaatgaagagtcccaatttgtatatcagtgttaagaagaaaacaaaacaaacacataggtgagattttcgtggactattttaaaaatgtgtcattaatataaaaaatttatattagcagtatttaatcattctcacctgtaaagaataagaaaaacagaaggtaaatattcttacagagaatagcagagctttaagattcattttcattttaagtccattttattttgccagtgtattaatgtttagaagtctgttttactaatgttatttattaattttttttcatttccatacacagttagttaactaaagagctttt

SEQ ID NO: 8084 - DNA, 1165 bp, Homo sapiens
cctgcagaccctcaatgtctacctctgaagcctccttccctgcctgcccacccctccatgctccacgcaggcactcacgctaggacagcattaacacctcatctccgggtcctggtctgaatcccctcctacccctgtggccatcctgccatacatccaggacattgagttggaagactatgatctgggtgggggcaggataacatggcttctctttacccagtgggtcccttcgatgctgagggtggtgagtatgtcactatgcaagggccctgagactatttgctgtgggctctcctccagcctgcccagggcccacccagatgcctctggggttacccctgtctgcttctggtttttctgttggagatctataggtccttttcctgcctccttcacatttcctccccagcttttgcggccacaacacatcagtgtcatttgggtgttttggcaactcaggggccttcggatgatcttaaacctttgtgttcagccagagcccctgtgccctggtaggcgttggggttagtatctctcgggtgccctcagagccacctctgcctgtgatcgtctgatgaggctccctcccaacctgatccaaaagccagtctcaggagtttacccctgggatgggggatgcatctgcacctgactttggggccacgtgccctgtggcaccccagctcactgggagtctcaggagggataaccggatttctgctctttcccctgtcactcccacatcacacagaaaaatggcattcctctctgtctctccctggcatggagagggcagactgtgcacatttcactagggtccaaatacagaagggcccagggcccaggggcttgcagcttcgtgaggggtctctggcccagtttccaatgaataaagttctcttgacagctctgacagtctctgtgtgcatccctgcaagggagcagttggtcaaggcaacagaccttgcatcagggtccttcagccccgccagagtcagaagtgtgggctgtgggggtacctgggctttagaggggggacagggaaggagctaagataggctgggaagactatgtcatggggagagtgcatgccaggcatggctctgtgagctctcatcccttctgatttgtcccctctcgcaacacatggctttcgaaaagc

SEQ ID NO: 8085 - DNA, 1129 bp, Homo sapiens
ctgggaatctgcctcctccccacacaggcatggcccaaccctcctgggagtctgccgccctccaactctccagaagggacaaccctggctcctccccccggctccagggccaaggtgaagggaattttgagagaggacctcaaagaagtggcagattgccctgggacaaactcagccaccctcatccagaagcaactcataaggcactttagccgggaatgccctgcagttgagctagtgtttcattctgagctcatgccccagaagatactgccaaccagcagaggcctctccagggtcaatagtacaagacctttatttaacctcaccctgatctctccaccccttatcgtcatttcctggagcagagtgcgtcttgctgaggtgagaacaaccctgctcgtgcggcctggaccacttctttctaaaactgggtccagtttctttctagatctccatctggggatcttgccttctgaggcactcatttgtggtgctcagcttactagcagcgtgacctcagataggtcccttagcttctgaacttgtgtcctcctctgtaagatgagtgatcatagttcccacttcacagattacttgaggaatgaaaagataatgtatgtgaaagtgcctggcatgttgcttagtaaatgttagtcctcgttgttgtacccttctggtgctttggcaggcaagagatgtgtgcgagcaacagtccctgccttcagtgccttcacaattcacttagggaaataagtttgttttgttttgtttttttggagatggagtctcgctctgtctcactcaggttggagtgcagtggtgcgatctcggctcactacaacctccacctcccaggttcaagtgattctcctgtgtcagcctcccaagtagctaggactacaggcgtgtaccaccacaccaggctaattttgtatttttagtagagacggggtttcaccatgttggccaggctggtcttgaactgacctcaggtgatccacccgcctcggcctcccaaagcgctgagattacaggtgtgagccaccacgcctggccaagaagaagttcttaaataggtacaatgggaggcagccctgggtgttcttgagtgtcacaggtggacgga

SEQ ID NO: 8086 - DNA, 1866 bp, Homo sapiens
atcagtaatctgcaaatgggaaagatggctggttctgtgagaccgggctgttcctggtcccagctaagacattgcagtacccacctcccaaagggagtacacccttgctttgggcctgtgcctgcctgagtcctgatccgtcttccttcctaccctgcccccggcccccttctctttctgcagacaaactggtcaagtgtgagggcatcagcctgctggctcagaacacctcgtggctgctgctgctcctgctctccctctccctcctccaggccacggatttcatgtccctgtgactggtggggcccatggaggagacaggaagcctcaagttccagtgcagagatcctacttctctgagtcagctgaccccctccccccaatccctcaaaccttgaggagaagtggggaccccacccctcatcaggagttccagtgctgcatgcgattatctacccacgtccacgcggccacctcaccctctccgcacacctctggctgtctttttgtactttttgttccagagctgcttctgtctggtttatttaggttttatccttccttttctttgagagttcgtgaagagggaagccaggattggggacctgatggagagtgagagcatgtgaggggtagtgggatggtggggtaccagccactggaggggtcatccttgcccatcgggaccagaaacctgggagagacttggatgaggagtggttgggctgtgcctgggcctagcacggacatggtctgtcctgacagcactcctcggcaggcatggctggtgcctgaagaccccagatgtgagggcaccaccaagaatttgtggcctaccttgtgagggagagaactgagcatctccagcattctcagccacaaccaaaaaaaaataaaaagggcagccctccttaccactgtggaagtccctcagaggccttggggcatgacccagtgaagatgcaggtttgaccaggaaagcagcgctagtggagggttggagaaggaggtaaaggatgagggttcatcatccctccctgcctaaggaagctaaaagcatggccctgctgcccctccctgcctccacccacagtggagagggctacaaaggaggacaagaccctctcaggctgtcccaagctcccaagagcttccagagctctgacccacagcctccaagtcaggtggggtggagtcccagagctgcacagggtttggcccaagtttctaagggaggcacttcctcccctcgcccatcagtgccagcccctgctggctggtgcctgagcccctcagacagccccctgccccgcaggcctgccttctcagggacttctgcggggcctgaggcaagccatggagtgagacccaggagccggacacttctcaggaaatggcttttcccaacccccagcccccacccggtggttcttcctgttctgtgactgtgtatagtgccaccacagcttatggcatctcattgaggacaaagaaaactgcacaataaaaccaagcctctggaatctgtcctcgtgtccacctggccttcgctcctccagcagtgcctgcctgcccccgcttcgctggggtctccacgggtgaggctggggaacgccacctcttcctcttccctgacttctccccaaccacttagtagcaacgctaccccaggggctaatgactgcacactgggcttcttttcagaatgaccctaacgagacacatttgcccaaataaacgaacatcccatgtctgctgactcacctggctggaacaacatgcttactgccaacatgtgggccgaaccacatggccctggctctggaatgcacaagtggctttgcgtgaatctgcgctaagctatgc

SEQ ID NO: 8087 - DNA, 3154 bp, Homo sapiens
agaggtagggggaggggtgcggcttctccccagttcccagggagtcttgtttgttaagcggggccttgggcagtgttttcctgctgagggtggttttacattttttttcctcattggcccacagagagtggagttggcctagctctgacgcgtcccctctttatccccaatgtgccccctccattaggggctccaggtgggctccagcccacacttgctctctgcctctgctgacacgtgcacacacacacacatgcacacactgctcctctctgcctgctttcccctggagtcccatgccctgccccatccagacactgcccaaggcccacccgtctatttccacctcattccccctttaagctgagaatggggtctgcctatagaagcttccagagacagctgagactgggtccccggtgcctccaccctaggatctcaggcctgccccaaactgcttcttacagcgtggaggtttctctgatttctcccttatctagcaacacttggttcttttggctagtcagggctgggatcccagggggatccacctgcaggagtcagaggtaaagaagcatccacacggagggtagtggggaaggaagcccacatggcagaagctctgcaaacacagtccgagggactgaggagtccatacaatgcctcacacacaaaggccattgtcaaagcctcgggcctggcagaaagtgaggggggtggggccgctaggccacctcctgctcagccacccctggtcctcattctgggatgaggggagggcctaggagaagccctccctttcagtgcagattcccttcttgaatgggacattgagttcctatcagccaccccagactgggtcttcccatgtatataatggaggaagacccctcccagccctctcagtcccccagctcaaagtgcctcagttcctccatctgctcccagatcccctggcactctagacaggcatgcccatgggaaggaccctgggatggagaggcaggcttcgcggcccttcatgcctgcccactgggattccagttaactcaccccagggtgtcaggggctctgcaggatggcaagtgttggggaggagggaggcagaccactctgtgccccacgggcactgacccaccctgccataggcttcctaagggagccccccaacccctcccctcccctccctggtgctgctattgaaccccctgccagctccatttctgccctggcaaccctgggcccagcaggtgggtcgtcgttgtctggccctcactgccctggccccagcccaggctgcccagtagccacgtagcagaagtctgaagccatgccagccctggtgcggctctcccctctacacatttggggtactggatagggtgaagttaggggagaaaattgtggagtctttccagccacagggcagagggaggtggaggagctgggctgcttttcccagcagtattagtgtcccccaggacaggggaccttttccacattacatcactgccccatcccaccttacaacactctggcccctctgcttggtccccttttcccccaggcaggaggcaatcccaggggcctgcctgatagaggcatttcctgtccctgtctcctcctgcatctcctttatcctgcactgccaccctctattccccattctgtgttggactttgaaggccccaagcccagccaaagcactgagttcccccttaagacacctccacaccctccccacaagcaaagcacaaattttggggtccatgtagcatgggccacgtaggaggctcctgacttgccaggggcccagcctcagcatacccaccgagcagctgccagcctgggctgagggtgggcatgaggcaggagtcagcacttggacctagggatgtgaggttttctgtgccccaagtttgtgggaaggtgggcactactgctgggcccacagacacagccagctggcaaaagggaggtctagcccagcagagagatgaggacattttgcttctccttcatgcccacagcatgagctgagcttctgctttgctggaaatgaaataaacttggtatgaattgtgccaaggcctccccagttgtcatcctgcctcttgttgccctccctgtccttgccccccaccccacacccatgcccctgtttccttacagattttgatattgttctaatgtgtaatagaaccagccgagtccccttttatcagaagggtctgaaaagcagcagcacagagtaggtgaacacaggcctgcaagtgcgaccacctcagacccagtacgtgtgcccacagtggacacactcacacctccaacacacccacgcgcaggcatgtgtacacgcatgtacacacgcatgcatgcacagccagatggccactcagcacagatgtggcagagggaatggtctgatcctgctgaaagccattaaggagaaacgaatttcccagtgcccgggctgcaagagagccttataggggccctgtttcctgggcatgcgcttcctctgccagccaacccccacttgcccaagtcactggtgcaataacttttctgccttcctcagagcagagaaattgggaattgtgttaggtgggtgtgggcagctctgctgagccaagcagacacggatgtcccctcttctgggaggagggtagtgctcccaggcctcaggagtccagacagagacccccaaagcctgactgccaacagaaaccctctcctagtgaggggcaggtgggtgtgccccaggtccccacacccacagggaggcttcacacactgcccagtaccggggatgccaggaggcaggcccctctgctgctgccactgctgccaacactgcccagcttgtgaggccaggaggagcccctgtcccactcggtgctgctgctcttctgacccctgctgtgaggaatgggattcttggtcgaaaaaattggttttccttttttgtataaatgaaaagaatccaggagaagctgccaccctcccctcccagcgtgatgcgctaccttgcttcggcgtcttgtcgccctttccgcctttggtccagggacagcccagcagatcctcctggttctgacctggggggtgtttgcatcacccccttttacttgtattaaaaaaaaatgatggg

SEQ ID NO: 8088 - DNA, 1206 bp, Homo sapiens
aaaaattagccgggcatggtggtaggtgcctgtaatcccagctacttgggaggctgaggcagggagaattgcttgaacccaggaggcggaggttacggtgagccgagatcgtgccattgcactccagcctgggcaacaagaccgaaacaccaaaaaaaaaaaagaaaaaaagaaaaaaaagaaaataaaataaaatgcaaagaaactttaatactgtttggtttatgcaggttccagcatcagagattcagtttaacaaactttgcctttgagccttctgtgtgtcagtataacactgttctaagtgatgtgtatttttcttaacagatgatctctgtagtttatggattgttttttttttttctgattcttccctgaatgcttcatgttaaaagttaaaagctttgtttagatatagtctaccttttctattccattggacagacagagatttgggattagaatctaccttaatatcgtcaaaacctcagtctcattcactgagtacctctgggaaatcagaggtacgtgatctgtttgtggctgagagacagtttgcaaaggaacaacatacagatgggacactaaaggaagttggagaagattatcaaatcgcaatcccagattcacacctgcctgtctcagaagaacggtgggcattggatgcactaagaaattgtaagttttattcataacttattacagatacttactaagtatgacactcatgtgccatccctaaagtatgtggatttatcaaactccacttattcttctagttctattgtggagattatagtattctctacagtggcccatgccacaggcacacacacacatgccactctgttagctccccacccccctgcctggttcagaatcactgttaaaatgggaggatagcatatctctcagttgtattgaggtgggaaaaaggctgagaacaatttctttggctggggagaaccacttgaaatttttaaaccagcgtatgactaaaggtatgaaaaaagattaatctggctgaaagcggtggaaggatttgaatggaaagaggtatggaatggtgtacttactaaataagctattataatagtctggcctgagactaaaagagtttggactagaatgttatcagaaggaataagaagaaactgagaagtcatcaaatgcttaaaataattgacttctttgaatgtgaggtca

SEQ ID NO: 8089 - DNA, 1291 bp, Homo sapiens
cagttcttccttccgctaccctccctccttggcttttttggttcagttccatttttttttcattttgacatgtggtttacctaatagttttgttctgttcataattcttatttctcaacctgggtgatttttttgttctcatttctcccttttgaaataattgaaagtgttttaagcatttttaacctgattctaatctcaggtacgcagtaagaagctataactctgttagaacctcgaagagtagatgtagaatgaaaactccaggaaaacttgcagttattctggaagcaccggcagaacagtctgatctctttgtatgttactaactcacttttaatgtccctgtacattatgtcagccattactttcataacatgaaatatgtcagattccagagttcttttatttttgcttattgaatgtatttcctcatatctttctttttcattactttaaactattgggaattgaggcctgacttcataaataattcaatagagtcctggatacgtgcaccaggagagttgagaattagctcataaactatctgtggtgtgtgtggggaatgaagttgggggatgtgggggaagagcttatgactttcccacctgtgtcatccattggaagcccttgctcttgcactttgcattaaaagtgggaaacattaatcaaagggagattttattcccaggttttccctgggactttgtgatatcataattgaacagttcttttgttttacatttcaatttagttgcctcatagaagtataactgcccaatctatgagtaaagtgtaagtgtcaaaactttacaattgcctccaagtcatattttttgcagaagcacatttaaagcacttttctgtaaaagctagttccttacctgcttggaaatctttttgtttgttcttctattcctttgttaatcagatgtaatccctttctttaatgtgtatttttcttggtccaccatgtttacagatgggagacttgagagatacttagcataactggggcagaaagtgtgtaagtgaagtatttttcaaagaatgcagttattatctgattgcatttgaccttttgacctttgttacataattctacccctcctacaaatttaatttttttatgaaatttttaggtgacttgtaaattcttcatgtatgaggagttgtgtttattaatgctactttttaaattttcctgtgccatgtggcagatgtttattctcttaatgcacttcaggtttgctatctgtaaagcctttgacccaggcctactgagtca

SEQ ID NO: 8090 - DNA, 2157 bp, Homo sapiens
gtgtaacattaaaggtggaaaccaaagggtttgagaaagacgaataaggcctattctccttctgctgcagactttatctttcaaaatcataaaaatgagcaatggagatccaggctgggtatagacaagaataattattttgcaaacacattttcctgacagatttttggaagtaggaaaaaagtatggcaacagtgtcatgaagattgaaactgtaggtgctttgtgtatgtatgcatgagtgcagatgagtttgagagagaaaaagtgtaattgagccctttgcttttgtcagcctgggaaacagatgcgttcttattttttgaagttgtgtgaccctggactgtcccacagcagaaggcagaacaaacacttatgttatgctttaatcataagtggaatggtcacaattaataagatattttatatatggcaaagttttatgaaatgcttttttactattagagacctgtttcttctgttattacagaacacagtgtttatcaactgcggacataattcttttattatacagttgcatgtaaagggagcttctcatttaattcagcggatgtgggtatttttagggcattgtaattgatggttttaataattgctgaataatttttgattaagagaaaaatgtaatacaattactggtctgagttacagaacagaagttaatgaaaaaggctatttgagcatgtgtacttatagattcatttgggtggctgagaaaagatgctgcttttgaaataaaattggtgctgtgtagacacttgtaaccaaaattatttttataacagaactaaaagaaggagagaagaggccatggacctttgagtttacatgttatacctaattgattgtctgcagcttatctgtattttaatattgactttgtccagattcagtgagaacatagtattgacattatgaggcaaaatgctgtcatagccagtattactgatatgttgctacagacacaatgtatagaacataccttttctaaaataggaattatttccagttatgaaaaaggaaaagagtaataaagaaaaccaaatcaaaaccaagggatcctttctacatgtgggtgaacggctgctaaagccacagtagaaaccaatttttgaatttgaattgttgaaatatcctagattgctttaatggaaaaaatccagagtcacatatcttttttattatcaagtttttgcagccttttgccagcattgccataaatacgtaagaaagcagcagatagtataagcccctagttattaagacttctcagttaatattaaggccaaaatataacttgagctaggtataacagggctgaatgctacagtgttgtttttaaagattttgcttatttttaaagacaggaaaattcagttctaaccagatgttccagctatgttactcaaccagcagtggtaggagcagagagcacttgcactaagagctgatcaccatttgagatacgcggcttaacgcacatgtgagtgtagcttgctacatgaaaatgctaggctctagggcatgtaaaacatgaatacagaatactagattgttctaagtaatgtcatttcggtttgtgaatttgatttttcccttcatttcatgtcatattgaaaatgcaaacaaactgctctcaagaacacccagaagctatctgtgttaccagatgtgttgtgaacactctactatttttcataggtgcttccttgaaatatatgtccattgtagtggtggagagggactggactctctcaggctctttacttgccagttgtctcccgcagttaatggaaatatatatacatatatatatatattttatttagaatataatttaaacatgaaggtctattctttgcactttttattaatatatatatagataatctttaaaaaaattaaaattcaagtccattttatctttgtgttctgattttttttctggagtgtggggtcaaggtatgtgtttatttttatatagctaaaaaggttcattggttctgtggttgagttctctggaggattggcccaaactagtaaaagtctgaccattttgacaaatttaattggaattttgccagagttgaaaactacaaaacaaagattcataagaaacgtgttatggcttttctg

SEQ ID NO: 8091 - DNA, 1048 bp, Homo sapiens
cctgatcttcccaacttcttcaaattcacaacacttgaatgacagtcttatttcagcacttactgctatcacctattacttttatgtgtgtcttacctatttgagatgccagattccttggaagtagagaccgtgtctgaatcatcattgtattaaaccactcatccttaacaaatgcccaagccatggttaaagttcaataaatactttgttgaatttattaataaaatggcagaaatgtcattctcttccatatatgtttaataaatccctgataggtgctaagcactgcactaggtaaaaattctcttctgatgctgtctttttggccaaccatttttttatcatttattcattagctgacatttgctaagtgctttggaggggtcaaaaggggaagtaatgagaaatcaaagatggtccctacatcaaggataaactatctttttttagtcactcaaagtcataaccctttggaaacaaaacccaccagtaccccagattttgaccacagatgaatcagtactacaaggactggttagagggttgaatgaatctgtatactcagcacttaacacagcactctgggtaaaagaaaaaagatcctcaaagatattagttggttacatcaagaaaggacaaacttaggttaatctataacttcatctcagaggaacaggaactttggagataaacagggctctgccacttgcaagttgcaccatccctggtttctccatctgtaaattgattaaaacactgcctatctaataagattaaataagttagaagcattcagttaaatgtcaactgaaactattgttcatgtaaattgtgcttgatgctttttctttctagattcaatgattattgtcattttacctccataggccctcaatagaaatcagttgcagagggcagaagcctagatattttcaccttaaaattggagggtgaaagacattgaggtgaagtagagatagagggtacacagaaaaatcgtataagtaaaactaacatcgttaacattatttactgtaagttatct

SEQ ID NO: 8092 - DNA, 1201 bp, Homo sapiens
cattttccagcctctttccatggagatcctgtaccttcaagtagggccagcgagccctccattgccttcgggccacactaccagatgtgccctcactgcctgaggaagcaggccaggaacattaacccccaatggtattgctcatcaaggattcagctgttccctagttctctaggagagaaacacttctgagtactcatttctaaagggcactgctgactcttctgtaatgtttcggaaatttggatagtgcctaaaggtggcttgcttctttccaacttttccaggcagatgcctgcgtttcaggtatccttttcattggcatagggctgcccagcttcaaaacaagctgattggagggtctgtgtgcttgcggggtggcaacagatagacaggaagtgggggttgaggccaggcaccttgaggcatagcaggaaaccctacatgggcctgcctctaatgcttcgtgctgtgttcctttttctttaggagttccctgcacagagaatgactacaagctgtggtcaccatctgatgagcgggggaatgagtgtttgctgggacacaagactgttttcaaacggcggaccccccatgccacatgcttcaatggagaggactttgacaggccggtggtcgtgtccaactgctcctgcacccgggaggactatgagtggtcagttcttctttgatggctggggactgagttgtgttttattcactcagcagtgttgggggaagagattaggcatggtccctttccctgagcaaaggaagggaatagaaggaaacaagtatttgtgaagcatcttttatgtgccaggaactgtgctaagcatgtttcatgtaagttgttttctttagttcttatagccaggtaatgcggtagaggtgtctaggagagctgcagctatttctacaggaatagatagctctgggatttatttctattagggtaacccaaaaatatgctgaaggtttcattgtttttaatccttctccttaggaccctattctagaggggatttatttctttatctgaaacgaggggatgttagtgtgtgtatatgtgtgtgtgtttgcatcatttattattccttaagcaaaatatccaaggcactgctgcgaatgctaaaagtaggagaagtgatttgtgcatggctaattggcacaggagatagaagagagcaagtgcctcaga

SEQ ID NO: 8093 - DNA, 1184 bp, Homo sapiens
cttccttttcattcttaaccctttaccctcacacttcctagtggtaatcattgttaataatgtcttgtgtatctttcatgattgcttttacttatgtacaagtattatctttaaaacacacacatatacacacacatgcacgccaaataggattgtagtgtagttactattctgtacctttttaaacaaacttaatatgtattgaaaatagttctgtgtgagcatatatagatttttaggtttcacagtattctattatatgtaccataatgtgtcacttcctctgctgattaacatttagtttaatatacatacatatacatttctttgtatattatctttgcataatttgattttatctatagataaattctagtaaaggaatttccaggtgaaggaatttaagtagtttcaggtgttgtcattacatattgttataataatgctgaaataaccagccggatcattcgaaaggagtttctgaccttttctggagtagtatttgagctcccatttctctagtattgatgaggtatgtgttctgtccccattttcgctagggtgatgttctggacagactggggagacctgaagcctgggatttatcggagcaatatggatggttctgctgcctatcacctggtgtctgaggatgtgaagtggcccaatggcatctctgtggacgaccagtggatttactggacggatgcctacctggagtgcatagagcggatcacgttcagtggccagcagcgctctgtcattctggacaacctcccgcacccctatgccattgctgtctttaaggtgagtccatttgttgctgccggacagtctgctagagcgggtgaggagcatatgagatcaggagcctgcatccctgggctttgcagagaagctgtttaacttcttaaaggttgccttttttccaaatttgagataacttattttcagcctatggagggatgccaggcagaggcgccaagggtccaggctcccctgctgttcacatttcaaaaggttaaaagtgaaggctcttcccatgaacattcccagtttgcccctcagtgtcagtagcctcatttcagggtggtgtcttcattttttgtgcgctttgctcactttattctctgatgacttccggtgagctctgcaccacctatagtgccttgcagttctttttc

SEQ ID NO: 8094 - DNA, 1191 bp, Homo sapiens
aactgagccatgatgtgatgtgtggacggcacaccttgctttttggaagaagaggaaaagtgtcttttcaatgtgacgaccaagctagcagcctttctagtggatagtctcaatgccggctgtggagtcgttcttgtccttgttctaagcccaggaaaattcctctggttggctgctatgcagatgggttttaaccttgagttgactctttttctagtgccagatgcccctcgaaatctccagctgtcactccccagggaagcagaaggtgtgattgtaggccactgggctcctcccatccacacccatggcctcatccgtgagtacattgtaagtaccttccatgagttggctgtatgtgtgttgggggtgctaggagatttctgggtattctgtatgacgagggggttgatttggtttagctttgtaggtgatgacccatccgtcagaacattttgctcctcaccatcttttctctcctccagcctccttgcaagatattaggatgccctggacctttggttccctttactcacattttttttcttctccctttaggtagaatacagcaggagtggttccaagatgtgggcctcccagagggctgctagtaactttacagaaatcaagaacttattggtcaacactctatacaccgtcagagtgagtgtcgtcatccattccagccatccatgcagtcttagaactgagcgaaattgctgctgttttgtgagaactctctactcacctttgtgagatgcatattagtaatctgcaaaatacccaacttcttgccctgggacgggggagctcagagtttctttcagtctcttaaatggacaccacaaagagcttgacatcagagtttctgtagataaccgggcgtttatgggaatgccgctttccctgcttttaactccggtattctgctagctttccagctcctatacttttgcagtcagctctttcctgcttatctttagctgcaggatgatgcagagctatgataagtagtctttctaaactgattttatgaggttcttatgaaatatatttttagtatttttagcagaaagagatagattttgtgaacaacatgtttgctgagaccattaagtgtgcacattcatgactctcacactgataattttgtcagtaccctttttgtatatgtgtgtatttatgaacaca

SEQ ID NO: 8095 - DNA, 4280 bp, Homo sapiens
atgtgttggaactcaccaaggcctgactgttttgtctctaggggaagatgatgaagatgcccctatgataactggattttcagatgacgtccccatggtgatagcctgaaagagctttcctcactagaaaccaaatggtgtaaatattttatttgataaagatagttgatggtttattttaaaagatgcactttgagttgcaatatgttatttttatatgggccaaaaacaaaaaacaaaaaaaaaaaaaaggaaagaaaggaatgaataaactttgtagtaatcaactgtgaacttcaaaccaggttgattttagtaacccaattgctttgatttgacattaatgtagtcttacagggctgtgcttgctgggcatgcttttacgtctgtgagataatttcggttcagtaaattggccaatctttttatttttctaagacacagaaatgtatttaataaaaacctcgagagagtgatgggtggaaccccttctccttgaaagtgtgtacagatattccattttgtttggatatagtttataggaaagtgtgtggatgtattatggcggaaggtttctttatgttattttgttaatttattgggactctgtgtaaggccaggctttagtggtcattagacaccacatgtgttatgagccccttacccatagggttgggggtgggaagagaagcatatttttttgccattccggaagcaatccatttttattcacttgtgtgtcatgtaatggtctttggcaggagagagcactgagtcattgctggagttcagttcaacagagctgcagcttgggaagccctgtaagcccacagcttcctctcttatattaattgatggaattttactgtatgtgcctctgtacaagatgtagctttgagagctacaaaatgataacactgctttattacacactggtttcattgtcattgcaaaaacttaccctggttgtgggggagagttctagatctgtgccatgatccatacactggctaatagagtacataatttttccattttccattttttgtttttacttactactgaaggatctcagatgtaaaattatgtatttggtttgagatggccacttattgtccttaaaaatccatactgatatatgcagtcattttgaattggacagtgccttctctttttttttctcctcttcttccatctccctcacccatgcccccacccaatctaaagagacagtgctgtacattctcatagagatagagaagatctaaaaagttgagactactcaatccagttaacaacagcaggagcactagagtttgttcatttattctctctgtaaaacaagctgtgctttttttcttctgcctttaaaatgccacccgtgtattcaaaccatggccacttgatacttatgtagaatccatcgtgggctgatgcaagccctttatttaggcttagtgttgtgggcaccaatgtcgagcatcgttgtgacttgtgctgtatgattctcactgaagaatttcctttcagccaagaagcagtgaggtctgggaatattccaaagtcatgtctctgaatatgtgtccttgacgtgcaagctttgtaaaaccccatccccgcttaggtgcgaggcatcaccttctcacaagtgtttagtttcttttaaccacaagtatcattcttgggtgataatatagtttcattctacttagggattgtttagaaaacaaagaaagagccaattaaattttttagtttttgaaatttttatttatatgtatacttagatgagtattttaagctgtcgacctttagtttgccatacgggtaggactgtatttcatgttaacaactggtggtaatgataagccttcttctagcgtattttctcttctttcctgtcactttcctaagtttttttttttaaagactggaattttttttggctttatcttgtcttaccgtagagatttgttcaaaactctaagccctaccacctcccctttaataagctctttaaatagttgaatcattaacaacctggtgggaggcaagtcatttaattgaaccactaggaagtgtattttcttttctttttctgccaactttttggtggcatttgtaaaagctgatataaaaggctctgagatgttattttcagttattccataggcaagcctttttacagagcatatgtctccagttggcagcttgagatatttccgagcatccggttctagctaccagtgcctcccaatgcttagtgcacagtactgtagactggccatcacccctctccttggaaaatgccactgtgctgtttgaaaaaaagcagccttttagggctagagtattttatataaacagaagagctaagttcctgaagactaagctagatagctgcagctatatgtaaattgtatatttttatgaacttttgaagcacacactcctgtttccctctgtgtagctttgtggggatttcatgtatatatgctgtctgaaagaatccagaggttggagtgccaatagaaaatgaaaacaaatgccttgtactacaggcagcctctgaaggtgaccacataactgtcttcactgtgaccaatcggagtccctgcttgcttgtgaagaaggggcttttgtaccttgttggagatgccacctcagaagttcacactgtgcaggaaaaaggttttattctctcctggcatacattagaatgtcagatgcttgcatccatgtggaccacgatgggcctctaaaaattggtgggcagggggtttgcttatgagttttctctggaaaccgattttactcctggatgtattgaatgccccttgagctttatgagatacgagtccacatggataaaatgttagagagtggagttctacagaggattccaggaagaggccatgtctgtgcagtcctagttccagacaggtgagaagctccaggaactactggctaccttgacaagctgggtaaatagttatcattctgggtaactggttgaaactctgacttttggacaagtaattcctggggttctgtctttggtagcatcaccagggatatttgggtgggacagacagaagacacacagctgcctgttctctcctgcccatcatgtttggcccactagatgaagctgtactcagcaatttagggaatgtaacccttctcagaactggccattttcaggggaagcttgggagagcaatagtatggtgagccccttagagatgagcgcctactccttcttggcgaatgctgccttcagatgcttaccaagtggtcactgcatctagtaagattatatttccagtacacttccttagggcagaaacaccatcctatcaggtttggtcagtcccttcttcatgaagggagtcatggggaattcctgaaaattttcttccttctgcagacagttggatgagtcccttagagaaggcatccagagacataactaaactgaatatcatcccatattgattttaggaattgactctaaaactctgtgcagaatcttgtgttgggattgtatcttgacattcctgttgtgttatttttcttaactggagtgtgtgctgcctttcaggtacaatttttgtgtaataaaagccagtgcattaagtttatatagactactttctatgcaagactgagatatggaatagataggaagagatatgtactgctgggtacatggacagtaagtgtgttttcagatggagtaccagcaccgaaaatgggttgagggaggatgggttgtatgtatgtttctgcccactaattttgagcagccatattatgaattaaatcgtcacagccaagtaataacccaagaatggtatgagtttcatgtgtaatagctcaaatggaataagcatgaatgctggagtggaccattatcctcaaatattctatgtcacttctcatttaaagactcttgttatgaactattagaaactttaggcaaaatcaaaagtatttgcggcaaaataaaggcctattctactcttatttaaagtgaaacactgtatacttgtttctctccaaagcgaaattaagtatttataatttcaattgcctcgataagtttccaagtcactgaaatctgctgaaggttttactgtattgttgcacaactttaagataatttttgtctcaatgtcaacttttttcactgaataaaaatttaactgggtcaagaaaacacctctttgaaaatccactgtctctgtgtgtctcgagctgttctttagagcgcaata

SEQ ID NO: 8096 - DNA, 1107 bp, Homo sapiens
ctaattttttttttaaattttagagtaatcacattcaattttcctgcaacaaaacaaaacttactggggagaaatgtcccttgttaaatggctgggccttgatgtacccttttctatattgttcattagatgtaaataaaaccatcatagtcatgaaattgataaattgctttgctttgatgttactaaacttctacagttgtaccttcctacagagctacatctcttagtacagtttttgaagttttttttttaactaagaaatacattttatgatgatgttgatagtgatggtaatgatggcaatttattttgttagtattcactgtgcaaatgaaatagagaataaagaatgagttacttttttttcatttaatcataattgaaaagtccttcaagttaagtgatgtgcaattatagtattaactgtgtctagcaatgtctattcaatttgattcattggatatgtttattcttatgttttattttgggttcctaggaataaagtacataaatttctatatctgggaagatttcaatacaaccctgcctaaaaagttaatgttataatagttaatcacacataagttttctcagtcgattttattttggcctgtcaaataattcttaatttaccactcttgttttctcttttttcctatgtctacttacagttttaatctaccaataatatggtccattgacaatgtgttggaccttgttcaattttaactgttatacagaggttacatgtatatgtgcatatatctatacattatgtattacatacatattaagcatatgagaggcacatttattcattcattcatgtattaaatagtactttactgagcatttatgctaggtgctatggtaaatgcaagattgaaatggtattttctgctctcaacgatcttgaaatgtagtgtgaagaataaaataattacaaatacaaatgcgttaattgcagttccaaagtgctgtggcgaatccaaggaagagactatttccagttgtaaaatcagagtaggcttcatggagaaatgtactttgaactggggcttgaagaacaggtaaaattttgatggacagagatgaggggggcaa

SEQ ID NO: 8097 - DNA, 1468 bp, Homo sapiens
agacttgactgagcccccgttgggactgctgtgagaaagaagcgggataacatattataaacaatagcatctgcagctggagtgatgttgggtggtttgggttcctgtacgtttggagacagagtcaaagctggggaacgtctttaagcttctgaaagctttctttatagagacgcaatgaaaatattagagctgttctatctggaaagtacaaagggaggatgccaaagtttaagtaagcttcatagcacaggcatggagaggaactcaaactgcctggtttcaaatcctgcctttgtgacctaagatccatatattcccttgagtgagctatttaacctttcaaagcctctgttccctcatttgtgtaacagggataataatgagctgactgttgtgagggttaaatgatacaatgcaggtaaagagcatagtacatacaccacgttacacatgataagcttgtaagtagcagcagctatgaaatcattaactgggacaaaagtctgcacactcagtcccccaatcctgcaaaaggaggatcctgcaaaaggagagcaagaatacctcccttgtgttggaagaaacacattgtggcaaataagaaaaggtggagcgacttcacatagtggtttaaaactgacaaaatccatcattccaaacaaatcggtgtggacaacttcagaccgtcattctgcctttcagctgtaggtgggagttgagtagcagctgccatctttctttcattgttttaactttttggaaattatcaacattcacaaaagcagagaggatagtgtaatgaacccccatgtatcttcatccagattcagtaacgatcaacatacctccagtctggtttcatcccagctgcccctatagacgggcacgcgccatcccagctccctgtgcactcggagaattctcttccttacttgcttttccctcagtggaaatggaaaacagcctgttgttaatgtcatttaatctcagtttagcttcctttaggttgggctaaataatttacgtttatgcaatttattactacaaagcatttcttgacattttcatcttctccttgattctttgaatacctccatttcctcccgtccacagaagattgtgaacccagaacaagacacaagagctctgtgagtgtccatccaagggtcgcagtgacgtgaggctaaatgcaaggcctgctgcccacccaactctaagcgcctaccaaccccaaactgtgtcacagtccctgggtctcttgcacacgcttgtgcttaatactgatttgccacttaacaagtcccttggatgtcagcaaaagagtgagtacacggaaggaaagagagcccttgttttttctttcttttttttaaattaatttttattttttaaagaacacatcacctctgccagaaccctcaactttggctacgcctacatggagaatgttttcatggccaagaca

SEQ ID NO: 8098 - DNA, 2351 bp, Homo sapiens
ttttctttcacccagttccctgcttagtccagtcccaccgtggttcttcagagctgttcttggcgtgcttccagtatgggggtacattccggagtagttaaaagcccgttgactcccgggggcactggcacctggcgagggaggggaacagacagtgctcagttcggggtaagaccacgtgttgagcaacgccccacgccgtctgggtagatgggtccttcatctagggcgtgctctgctgcggttggcacggcaacctggactgcagcactagttctggacctcgcgcgtgcttagacaggaggtgatgggcactattacctcttggcagtggccatacgtttttcctggttaagtgttctgttaagggatgagggaaatattttgattaattgaatttttaaaccagatttttctttttttcagcaaccatgtccaagggacctgcagttggtattgatcttggcaccacctactcttgtgtgggtgttttccagcacggaaaagtcgagataattgccaatgatcagggaaaccgaaccactccaagctatgtcgcctttacggacactgaacggttgatcggtgatgccgcaaagaatcaagttgcaatgaaccccaccaacacagtttttggtgagttcctaattttaaatgacagaacaaatataacagggctaggaagcacaaaagtttatgaaacgtgaggagggaactttttgattttagaaaaactgagctgagagacttgttatcaagtctgttataaaacaggttgtagaaacctttcaggctgaaatctggataacgtaggaggttgaagtttgaacctttgctacctatatggtagttgaattcacctacctatgaactgttaggtatttgagtaatcatggacttgagttttatcagaagagctatgaaattgaaagtgttttcatttgacaccttttacagatgccaaacgtctgattggacgcagatttgatgatgctgttgtccagtctgatatgaaacattggccctttatggtggtgaatgatgctggcaggcccaaggtccaagtagaatacaagggagagaccaaaagcttctatccagaggaggtgtcttctatggttctgacaaagatgaaggaaattgcagaagcctaccttgggaaggtgaggttggtttttcagtatggggtgcattccggagtagttaaaagcccgatgactcccgggggcactggcacctggcgagggaggggaacagatggggctcagctcagggttaagaccacgtgcccaacagtgccctaggctctctaggtagatgggtctgtcaacaccagaaaccagtgaatcttgacaattacacagtaatttacattttggtggggggggtgctccagctgttctttcaccagcattaatccatttgctggagtttgcatatatgtaagtataatagttaccaatctgtggtcttttccttattcctagactgttaccaatgctgtggtcacagtgccagcttactttaatgactctcagcgtcaggctaccaaagatgctggaactattgctggtctcaatgtacttagaattattaatgagccaactgctgctgctattgcttacggcttagacaaaaaggtatgtaccatttgtgatgcaagttcggattattttaagattaatttgatccatcgtaaatttaaatgagattgtttttaacggcaggttggagcagaaagaaacgtgctcatctttgacctgggaggtggcacttttgatgtgtcaatcctcactattgaggatggaatctttgaggtcaagtctacagctggagacacccacttgggtggagaagattttgacaaccgaatggtcaaccattttattgctgagtttaagcgcaagcataagaaggacatcagtgagaacaagagagctgtaagacgcctccgtactgcttgtgaacgtgctaagcgtaccctctcttccagcacccaggccagtattgagatcgattctctctatgaaggaatcgacttctatacctccattacccgtgcccgatttgaagaactgaatgctgacctgttccgtggcaccctggacccagtagagaaagcccttcgagatgccaaactagacaagtcacagattcatgatattgtcctggttggtggttctactcgtatccccaagattcagaagcttctccaagacttcttcaatggaaaagaactgaataagagcatcaaccctgatgaagctgttgcttatggtgcaggtaacaatggtatctcaattaaccctaaaggcaggcaggcccaaggtgactcgctgtgatgagtgatt

SEQ ID NO: 8099 - DNA, 2109 bp, Homo sapiens
ggccagcaagatcagctgcttgaagctctgtgtaagagcactgcactgacggtttggagacctgagcctgggtcctgacttttccattgactaagctctgtggccttgggcaagtcactccccctctctgagcttcagtatcctcctgtcacaggagggagttgggctagatcatctttaaggtaggttctagctttgacatcatcttgggggttaggccagaggctgggaagactgggtggactttctcaattgctctgccaggagggaacaagcccagaggctgaagcttcccagtatttagaggtgtggtagggcagtgtctgcattcccaggagacccagggtgattaaaatttattctttaggtggctaggagggctggggaggcccagtggaagagagagagagagagagagagagagagagagagagagagagagatcgagcttgatgtattgctcagtattcacttagaagggtttctttctctttggcctagtttgtgaagggatcttcctttggactttctctaagttgggagaagaacattcttttcaatggagctcatcttctatctctagggtctgttcagcctttcatctatccatccttcctctttattggtagaagaaacagtggagagtagccacttctggttctagcacttctcttttgttaagatagggtttggatttagtatgaagctttggctaaaacccttgggtttgccttagaacactgacactaagaacctggaatgacatggggaggacaaagagagctcaagaggaatgctttgtgagaagtggattctctccgtgtccctgccccccacccaaacttgaactatacctattacatttccaggcagtatccctaagatgagatcctggagaaaggactaggggaagtatctttctggatgcttgtggtcccagaagggtactttctgtgtcataccatgccacttctttaagctcttcagggcagccaaagccagcccttttctcctactgcccccaggagaaatagcactcttctcccttcccccagatggcagggctctggcctccctacacctcataccctgcctgcctcctccaggaggaatctccggggccccttcctgactctccccaccttcgccacttgtctctaggctatgggacaatcatcccattcaccacttgacatccttgacatccttgactttcattcccccaacctccagcaggttggccccaatcctcttcacctctgtgttttcttctagaagatgcattttgggtctgagaggagcattttcctggaaggccatcttttaaggcccctgcttgctgtcatagtgcagagcagaaacttgcacactatttagagagctcccttcccacctctctgcccagccttgttacctcacttctgctctggccatggctgtgaagggcccagccagctccctgttttgatgttctgtgcaacagctccggggtcttgtgactggagatcctcaacaggccctggagccaggactggagtcttggcagctgatgagcagcaccttgccggccaggaggagctgatgctgacgatctccccaacatctgaaggcttaaagaacattgtcgttcttcagccctccttgcttctctcaatacaataagacattgcagaagcaaaagggtggcctctgctccaggcaaggcagctggctctgtctggggcatcggcctggggcttgggtgccacgtgctgagattgcatagtcaaaacagccatttttgccaacaatagcttgtggctccccacattttcctaccctgcactcaagggccagaccactctctgcatggaccagaccatcttcccaaacccatggtgctttttccccaactcaacctagactccaaggtggggagggatgggtcagaggccatagtggcccctggataatcctgacgtggggtggagtggggtgaggcagagggagcagccccaacacctgcactgggccatctatgggaaagaacacgggtcgagtgcagtcgagttgtctggccatctgtatttggatctataactgtactttgcctggcgctgtgcgcaaggt

SEQ ID NO: 8100 - DNA, 1164 bp, Homo sapiens
gtacacacaccagcaatccacattgggaattctaattgaggcttgcctctaaaatctaggttgttcatgaatatgtgacatggcttctctattttatgttggtttctattggccactggcaaatactgctctttttaggggctggtggggtggtgggaatggtgtctgaagtggaaagaaggcactaggtttggacccatgcgccacagaggcccttggaaggggtgcaaatggcattggccttgtggctccagtcttttccaactactgctccaagtggggcaacgaatgcagattttcctgctaagaacttgcagagaatcccaataggttgtacttcttttaacgcatagagttttcatgtgccagcagctgccataacacaaacacagtcccttactaactgctctcctaggtcgcttttcctgccacgtggcctccctgcccacgtcccctgggaggtggccggaaagctgagatgggggcggctgcagttgctgcctctggctgacgttcagctgcagcaggcagggttgttcaagcttggaagaatcaccactaaaatgatttgggtttgtggtggggaagcggagggcagtcccttttaagagtttcctttcacattccagccatccaccccctgaaatctttcaatcatccattcatgtattcattcaaaaattatttaacgtgttctttttctgtgtcaggcactgttctaggcactagagatccagtggtgaacaaaagaggcatgttccctgctcccaggaaattaatgttttaattgaagggtcgggggggatttggagataagcaatcagacaaataaatacatgatataatgtgagatagtgctgagtgtctcaaagaaaatgattatatggagccagagagtgacagaaatgctgttttaagctgggtgtcaggagaggtctccctgaggaaatgacagacactgagacgtagtcaaggagcaagctgtggaaatctctgggggagagtggccccaaagagggaggagaaagtgctaggtcctgagataagaaggggcatggcacttctgatgagcagtaggaagccagtgtacctggagtacaaggagcaaagcagacgtaacatggagttgcagaggcaacacagaccatgtaagggcttgggatt

SEQ ID NO: 8101 - DNA, 1666 bp, Homo sapiens
ggaaactccagtttcaatggagcaggcaaggaggagctgaaggttatcctccccaggacaaggcaggggatgcgcaggcctgcactgctctctcaccacccccagcctgggcccctgtcacccaaggttccttcccatctccacctgtcccacctgcagctctccttgctgcctgcttccctagctgaccagccaggaagggggatctgtgactggggatctatgagaaccttcgaggaagtcacaaaattctcctctccaggaacccacggctcaacattcaaagaagggaaaaccaaagccatgaccctttggtggctgagacccctcagatggtccctatacaggtgttccaatatccagaaagtcacattcatacacacacatccccctaatccatggggctcatggtatatgagcaacccaagggcagagcccactaataatttatggggatcctgcaagctctccccgcaaatccagccttccagcaaatagtccccctccacatcacacagatcaggactccccctcctcacccaccgccttggtctcctgggttgtttctgcaaaccctccaccagcgtcactgcctcctcgccactttctggccgttggccccgcacccagctctgtagttctccaggtaggacggtaagaaattgttccagcacaagcagctctaggatctgctcctttgtccgcctctctggtctcagccactggtgacaaagttctcggagtctgatgagagcttctctagggcttgctgcctcctggtagcggaagcgtcggaagttctggtgggaggtttccagcaccgggtcatccctctgtaagacagactctggccgacaggtgaaatcatcttccagtttcaccatcagaattccctcttcttcccaaagatcctggtcctctggttccacggctgtagccatttcttggctttggggtggtctcacaccatctagagctcacactgtcattagccccccgcctcagcctggacacagcgaggattttcttccaagggccctggatagagaagtaaagacaaacaagagtataagcatgaaactatacacaaggacaacagcctgagttcaatcataatcctctacacaaacttcttcaaatggttaaatcctcttttccccaaccaccatagccataaatcaacagatccagttgggagaggataatttacaactaaaggtatggtcctctactccctttcctaggcaaggttcatactctgcaagaaaatactgcatttccacttcacaaatactgccaattcccccgcttaagtctccaaaccggttcccttctcttccttcctacagactgctttagtttgagccttcatcatctcctgcctggactactgctctaacttcctaagatccctgcagtactcaactataagcaaagtacaacagaattacctgtggagattttgcaaaacatagtatcacacatcatttttcagacactctgattcagtcaattcaggtaactgtatgtttagagatgctacttgcagttcgaatgtgtatccatggttgagaaacaccaaccatgagggagatgtgtaaggttatgagcgaaagttctggagtcaagctgcctgggtttgaatcctggctctgtcgcttactag

SEQ ID NO: 8102 - DNA, 1180 bp, Homo sapiens
cttctcgccgagtaggagcctttctaggctgtgggaggtttgatcctctctatgcgccctccgcgggttgcggctcagtgctccccaaggacccagtgcgaagaagcctcggaccccacagctgccgtccgcgacccctaactccactctgcagcgaataaattaacatcttgggcctttcatttacaggcataccttctgcaagggttttctttttcttttcttttttcttttctgtttttgatcttttgtgtgtttgttttcatttggatacctctacgtgtttttcttgatttttttttctttgcattgtccgctgcaacatggtagaaaagggcagcgttaggtttgaatactggctcttgcagtcaccatcagcagcagggcctcggccgaatctctccatctttgaaccctattgtgcatcatataaaacgggcataataataccgttactctgaggactaaatgatacattgcacatgaactgaatggaacatcagaagctcagaaagaaaatagttatggtatcactgttctttcttttcctttgagtgttgcttcgtatttctttactttcaggctgtcttccctgatctcatttgttcatttttgtccgttcggtgacctttctgcccatacttgacattttcctttgctctctgtcccttttaccctgtaagtcaccactctccacgtgccatgtgccacttccttttcatgggacacattgctgggatctgtttactgggtttgaaccaaaggattagttacttttggtggagtggcagtgtattagcgaaacagaactaataggtgtgaacccagaaggcaggacaactcaaagcggggagggggcttccaggtcataggtagataagacacaaatggttgcattgagttgctgattagcctctccggaaggaggcaatcagatatgcatttatctcagtgagcagagaggtgactttgaatagaaggggaggcaggtttgccctaagcagttcccagcatgaattttccctttagtgattttgggggccccaaatcactttcctttcacacggggtatgtataaacatataaaaggagatttattataaggagttggcttacataattatggacgttgagaagtcccaccatctgcttactgcaagctggagaaataaggaggttg

SEQ ID NO: 8103 - DNA, 1135 bp, Homo sapiens
tgctgtgctctttcctaccgatggttcaaactgtagcaagggggaccattcgaattctgactacgccactcctcagaatcttgaagttaacatcccagactcctcagcatgacatttaagaccaccgatgatctggtcttacctacctttccagcatgattttctgccatttgccatttttccttctgccttcttctatgctccacacttactgaattactcaggtttagaggttagcaaactatggccctgtttttgtaaagtttcactaaaacatagccacactcatctgtttacctattgcctgtggctgcttttgtgctatcatggtgaagtttggtaattgtgacagagaccatatgacccccaaagtctaaaaggtttgctatctggccctttacagaaacagctggctgactcctgctctagttccccaattatgccatcttctttcttgcctcccagtcattgcacctgctgttctcttcaccagaaatacccttcccgactttctccattatttggctaagtcttgtctgaattctagatttaagtttaggagccacctccatgggaagccttccttaacttgccacctctagtccagttaaggtgctgctcctacacacttttctaatgccctgtgcatatctatacctgaacactttgcagaattgtgtttattgtttgcttggtgtctgctatagactctaagccccttgcaggcagcaacagtgtctgcagggccgaagcatagagcttgacacaaaataagctctcaaaacatagtttctaaatgattatataaatggatagcttgttgacactctgtccccagttacctagaagtttatggaaactgacacatgcacatgtttatacatgtcaccgtttcctgtatttcaagtgctcaagtcatatcataacagggactctttgctaaataatttgtctccaagttttcttctgcttccaactttttctgatgtgagttttgccgcatgaaaacctttctgctccatctttccctaatcagggatatgctggtgttttgttttgtttttactgtgttctggttcttttcccagcttcttcaggctgcctgagtacagataattttcttaactcatttaat

SEQ ID NO: 8104 - DNA, 1460 bp, Homo sapiens
tacacttctggtttcactagacaaacatttactgagtgcctacttagtgctagtattaaaactgcgtgttaaatctctcatcttccctactagaaagagccaaggcctttcttcctgttcactactgtgttcccagctcctgggaagatgatagcattaggaggccctgcaaacacatttctgtgagctgcagaaaggaacgaagcagggaaagaagcagagtcccagcacttgggctcactttgtcctacagtctgggaaagcctgtctgcacgaagcatgaaaaacgtattaaaacgcagtggcccagcgggggagcgtgaatgagagctcgcattggtaagcttcttgttagttcgttggttcaactatagtacccttcagctaagcacacggccgccggccctccctcctctcctcatccagcactagcccccagctgtctctttcctcccggtgcccacgatcgcaccgcccagaccaccctactctccctgccccggaagttacacactgccgacaccgggacgtaacttccgggaagggcttacttccaagacagacacggaagtgctgggaggcgccgggagcccgttcggttgcgggtgtctctggccctgcggtcagccctgggaacgtcccggagagctagattcctagaggcccgattccgctagcccggaacagacaaagccagcgctcccgcccgctccccgacttaggatccgatgccggcagcgtcctggggcccccgtagcggggctggaccatgagcctgctggacggcctcgcttcctcgccgcgggctccgctgcagtccagcaaggccaggatgaaaaagctcccgaagaagagccagaatgagaagtaccggctgaagtacctgcggctgcgcaaagcggccaaggccacggtgtttgtgagtctgacccacgttcagccggtcccctcctggagactccctcacaaaatctttccccaagctgttcccccttcccagtgtgacagtattaatacagtgttggcttttccgtatacgttactacttgttagccttgtgtccttggacaaattacgtaatttctctgtgtcctcatctgtaaatgagctagtaactgtcttgcagaataatgaatattaaatgagtaaagaaaagtgcttggtgcgtaaaagacataccaataaattttagtcatcgttgttactgcaggactctaggaaatgtgtttgattctcgagatacagccctgagaattaggcattatttgtaaaatgagaacactgaagcccagagagatgatttgcccaagggtactgtgtcagagccctgactccaacttagataaacctgattccgttttatgacttccagtacacagactattttctgagcacctcaaatccccataactgaccctttgcccaaagaggtacatgaaactgtcagtaatttcccccct

SEQ ID NO: 8105 - DNA, 1232 bp, Homo sapiens
actaactgacagacacacacagctgcagatgtacttagagtctcatctggttcttaaggagccctaggagcccttgagaaaacaaatgtcaaatgtattagagccactttgggtggagaaattcgagctagacttcgttaaatgcaaggggagcagactgagacttcccccttcccccaactctctgggttgcattccatttagtctttcctagaggcagggaaatgggctaggtggcctttggagcacactgctggcttggtaaatttctgatcttacagatgaaataagaggccttaaaaagtataaggcctttggctcctaagcactaatctgggcaggttagaaagctactcagggctttgggcgaaagccccatatgcccattcagtaagtatataaaaccaggattggcttattgccctcaccattcacgtgcaaatttatcccttcccttcaacattggaaggggcctaaagtgggtgaccccagatttgcgtttcagttctgaagaaaacatgcaagaaaaagaaaatggcgggaggtgctcgcaagctggttcagcccattgccctggatccctcaggacggcctgtgttccccatcggactagggggtctaacagtatatagcctgggggaggtgagtgagaccagcgatatatagagaggagaatcagggaaatacgggaatggggttgagccttccctccctgttcccattagcagcagcctcttgctgatccataccaaccccagcgtatctccagtccctgcaaaaccaggtcagtgttgtctgctacacagcctactctctgtctttgtgtgatttgtcactctttgcagccccaaagtggttctaaaggctaccacaggaaactggacttctaaattcttcagtgacctcaatcccaggttgggggaatgttttttatagatcatcaccgaccgacctggctttcatgatgagagtgccatctaccccgtgggctattgcagtactcgaatatatgccagcatgaagtgcccagaccagaagtgtctatatacctgtcagatcaaggatggtggtgtgcagcctcaggtaccccctctaataataaccactgtttgtctttagaaccttctctgtgctaggatatgtattacctgttctgataccttacaaggtagatatgtataatcaccatttgggtaatcccaagatgcagaaaagtggctggccctaagtca

SEQ ID NO: 8106 - DNA, 1281 bp, Homo sapiens
tatcaacctgtggctgtgctgactagatccaaagtgggctcaggtttgttctgcttactgtaggagtaggtccttggtgaagagtgtctcctttcctcccatccattctgtctgaaagagcagtgcccagtttcttggaagacccttctgacctaatcattcctattttatggctctcttattagatctcctgttgcagtgaccatcgatgcaagtggcttccagcttctatgaacaccgtctccacccagtccctgaccctggcgatcgattcttgtcatggcactgtggttgctctccgctatgcttggaccacgtggccttgtgaatataagcagtgtcccctataccaccccagtagtgccctgccagcccctcccttcattgctttcattacagaccagggtcctggacatcagagcaatgttgctaaatgactgtttcagtatgatcagaacttagatataaggatgggtccttcagattttagcatttaggagtttcaataataaccattgcttttaaaggaaattaatagaaagcctcattgaatggctttcagctagcacatggctgtttctatattctgatgagcccaggcttataggtaacttgaaatgcttgctttttgttccctagttggtctaagggtctgtattggactaattctgaactacagacaaattggacctcaatgtcatttacttccctcatattaatgggagtgaaatgtctaatacttttgcccctttttatccagagttgtgggaatctcaggattggaagagattttaaaggccacataggccagctagtgttcatgtgttctttataaaatttctcccatccaagtactaaccaggcccgaccctgcttagcttccgagatcagatgagatcaggcgcgttcagggtgatatggccgtagacgtctttacaaaattcctgacaggtggttactgaatctctctatgaactttccattcaaaactttccaagtttttccttatgtggaaccgaaatctttctttctcccgtgaaactttactactatcagataattgaagacagatctctttgtattctcttcaagcccaaaccaattctgttccttcaatctaaatagtggtaatatgaatgtttaagaaatgaaataagaaacatgtgcaggcactttggaaggtgctaagtgactgccctaaggaatgaaaagcaagggccaggtgggagtagcccagcgaaggcacttgggctgccaggaacaggaggcgtgggaaactct

SEQ ID NO: 8107 - DNA, 1211 bp, Homo sapiens
tatgaaacataaacccattcaatccttatgtttatttcttatgtgtaggtctgtcctcctcaacaaagctgtaaagtacttgtaccagttagctactgctgtgtaacaaactacctcaaaacccccggcctaaaatagcctttcttatataggtagctcttgtctggggagctggggtttgggtgatttggctaagctgcagatctttgggctctttcagacctctgtgggtcagcaggggcgctcttgtccttctccagggagcagcaggctagcccaggcacgtccttcttatggcgatagcagcagtgcaaatgagcaagtggagccatgcagagtcacttaggctaggaagtgacacaccatactttctgcttctgttgattggtcaaagcaaaccacatggctgagcttagaatcaagggtttgggaaacatacttgtcctgttaacgggaggaactgcaaatccacatggcaagagggtgtggatataggagggagtgaagaattggggtcactgatgcaatttagcacatgctcaagggcagattcttctctgcttgcctacagtgcctagccctgtgttgtatacagatgtatcagttatctattgctttgtaacaagctaccccaaaacttaggggcttaaaccatcagccatattttttgctcatgattcattgggttggccaggtagggctcacctgggatggctcatttctgccctacatgataccagctaggcttgcttatgtggctgcaattttaactggaggatctagaaatccatatgactggcccttatctgtgattgctggaacactagagcctctctttctatgatctttcaatttccaaggcccctctcactccataatctctccagcagggtaactggatggtgtttacatgaccagctcagggtttcaagagaatgaattcagaaggcaaggcctcataaggccaagactcaggagctgtacaacatcaattctcctgcattctatgggtcaaagcaaatcctagattcaaagggaagagaaacagaccccgctgcttgatgagaggtgtggcaaagttgcactgcaagagggcacatgggatgagagggactgttgcagctgtctttggagagacactgccacaacagtaagaagctcagtaaatacgtgttgaatgagcatttaaatgcaatgagagaagcagaagc

SEQ ID NO: 8108 - DNA, 1303 bp, Homo sapiens
atacttagggaatttgacttttatttgtctttccaggaagagagacatcatgcagaatattgtacagattttggaatcggtacagttgaaatgggaactttttcagagctggacagacttttcaaggctccatctttctaataaactggccatttttggaattggttataacacccgttggaaagaggatatccgttaccattatgctgagatcagctcccaggtgccccttggcaagcgacttcgggagtacttcaactctgagaagcctgaaggacggatcattatgacccgagtgcagaaaatgaactggaaaaatgtttactacaaatttttagagatcactattagcgaagctaggtgcttggagctgcacatggaaattgactggatacccattgcccactccaaaccaactggtgggaatgttgttcaatatttattgcctgggggtattcctaaaagcccaggcctttatgccattggctatgaagaatgtattgagaggcccctctcaccacacatggagcaaagttccctggacccaggaaaagagggccgggttgacctggaaaccctttcagcacaagcctcattacaggtggaaatagaacccacccgaattatctattgctacctcgggattgctgaggtcaggactctacagcagtgcttatttttacatttccaagcgaataccaaaaccttcagcaaagattgggttggtattaacgggtttttgtctcagaactgtattgtggatcccggagtttcccccaaatccatctacatcaaatttgtagaagtagagagggattttctttccgcaggctctttagttgagtgcctggaaaaagccattggataccccttaaaatttaacaactgaatgtcatccttcataaggatttgggctcttagctccttcttctctactcacttcccattacccggaccacccctcatccagatgccgccgtcagactcttcatggaaaccctttcttcaattgggccagtacgacttctaaggaatcatagtagacttgggccagaaaaaacagacctcacctgaaaatgctcattttgagcaagcaagatatatagcgaacttgcatggtgggtcagctatttcttttttaaaaacagaaaaacaatttttaaatggattttagagccctaatataaacaaatgtaggtacattccatattggacaaaacttatactttgagtttcatatgaaattgaaaaattgtatttttttcacaatgtttcatttttacacatctctatgtctctatat

SEQ ID NO: 8109 - DNA, 1099 bp, Homo sapiens
cttctctgtgcatttccccaagctgggccctcttctactctccatttaggcctgttgataactccattacccgcccatcactgctgttcctccagggccagcactcgggcgaggcaggggagctgccttcggtacataatttgaaggggcactccctcttgggcacatgccggccctgagtgcctcccttgcctcactctgatcctggccccataatgtcctcagtggaaggtgatgggggccggtgctgtggggagagtagaaagaggggttggcatgactaaaaataccagtatgtgtattaagtattttgagaatgaaatgccaaggagtgcctactatatgccagctctaggaatggagtagacagtggacacaagaaggacttacgccctgagcacaggtgccaatggtgacaagactggcaagacgtgagggcatgaatggttcattcaggcagctgctgcagatgtggtcacctggtgccatctgctgctcccttttccacttttctatgtcctccttccaccccaagtcccggatcactcgctgttttctggctagctcttggcatctccatctgagcctaaagttgcccactggcaccaatagattctgtttgacctgctgtgcccatgctcatctttgtcggggcttggcttggcagcgagcgaggctggcatggggtgctgaagtggggtctcagtgaggggtgacagcgtgctggcagtcctcacagccctcgctcgctctcggcgcctcctctgcctgggctcccactttggcggcacttgaggagcccttcagcccaccgctgcactgtggggagcccctttctgggctggccaaggccagagcaggctccctcagcttgcagggaggtgtggagcgagaggcgcgagcgggaaccggggctgcatgcagcgcttgcgggccagctggagttccgggtgggcatgggcttggcgggcctgcactcggagcagccggccggcccttccggccccgggcagtgagggacttggcacccgggccagcggctgcagagggtgtactgggtcccccagcagtgccggcccacctgcgctgtgcttgattt

SEQ ID NO: 8110 - DNA, 1682 bp, Homo sapiens
tcaagttgtcaaacaacggaaataattttgagtaactggggagctaacaagttgggtttcttgccttttagtctcttccagttgcgcctcttctccttggtggtcttcttaagcaacagactcttccacaagacagtctacctgcagtcggccctgagcagctctacttctgcagagaagttcccttcaccgcatccgtcgcctgccaaactgaaggctactgcaggtcactgagttgcctgccatccaaaggggatgggcgggattggaagaagctgtggcagctcttttccctgttcacctcccgcctgccagggaaggcaggacccgctctgccaagggccctctgcgtattcccttctctctgaggaattgaaatttttgtctctggtgcacgtaaggcagaatgttccctgacaccagtgtgtggatttttaacatcaccgtgagtctgaaaggaccacaggtttttctgcagctattttctagcatttgccagtccctgtgcctggactgattggaacactttgtttttctccctgtgccatttacccttccacctttccatcctgccttctaccacccttggatgaatggattttgtaattctagctgttgtattttgtgaatttgttaattttgttgtttttctgtgaaacacatacattggatatgggaggtaaaggagtgtcccagttgctcctggtcactccctttatagccattactgtcttgtttcttgtaactcaggttaggttttggtctctcttgctccactgcaaaaaaaaaaaaaaaaaaaaaaaaaaaaaaaaagcctgaagagatgagataggaggaaagacctcacagccagatctgctgggttttgaggagtgattttctttcttccccttgaaggggaaaaagctattttcattggtacatttaaagtcccccaactatggggaggtaccaattctggacaagtgccactacaacaacactaaacctgaacttttcaactccgttggtggtgggaggcagcgggcagaaatttactgttggccactgccaggtctatttcatatttcaaaggaatattgggtgctgcatataggaactgaaggggtcaatgtattaaacctgtgattggttgttttcctgtcattttgagagactaaatgtggggggcagatgtcaaaatacctgtacaattttaaaatgtcacaattaaacatgagctggtttcccacaaagtgtctaatggttgaatttgcaaatcttgatttcgagaaatgtattcatggaatataagactttgtcttggataatttagttacagttttgagaaattagccctgaaaaatgttccctgagaaagcctggattatatgattataatcacatttatatttggtagaagagtcagattattactttttctaaagtctatatgtatatcgctactgtatattcatgaagggagaaagaccctcctagatattggtgtattgagtattaatcgagggaagccgttaaacatctggttaacagagacctttactatgtgcaagataaaatatggaattaaaaattgttgctggggccaggcatggtaactgatggctgggattccagcactttggcaggggccaaggcaggaggatcacttgagtccaggagtgcgagaccagtctgggcaa

SEQ ID NO: 8111 - DNA, 1150 bp, Homo sapiens
tctgtgacctctctactggataatactgtcttcattataatactatatctgctgttctttcatggcacattaccaataaaatattaactctctggtttttgcagccttctccactcgtctgtttgctgtcctgagatttgaaagtgttatccatgagtttgatccgtgagtacctttgcttgatctggtattatttcctttgggaggcattcaggttcatgggtttcagattcaaatttcagtcagctctcagtgatagagatgtgctttcagtacatttaagggaaaaaaaaacccttaaattcttccaaaggagataattatctccttttaagacgtatgtgttggagtccagcacagtggctcacacctgtaatcccagcactttgggaggctgaggtggagggatcacttgagctcaggagttcaagaccagcctgggcaacatggtgaaaccccatctctacaaaaaaaaaaaaaaaagtatgtgttggaattgaccaagtaagtctctgaaactcaaaaaatgtgagaggcattgctagtatgtctgcctatcacttaagatctggctaggctaagagaattctggctgcccagtttggtaaaagtttgtgatgcagattgaaggaaagggtcctggtgtgtattccaggctcagaagagaatcacaaacaatggacttgagattcatgacattttgctgtttgtttgtttgtttagcaatttatgtgatagaaattgggcttcttagttaaattctagggcaatgaaaaaactcaaagttatcagtttgataaggaattttgttcattagatgaaaaagatatagtggaattccttagtggtattaataactagtatttactaagcattcattttgttccaagcactaatttacagattatctctaaatcctttcagcaaccctttgagatgtaggtactattattcccttcttagaaatgaggagactccactgggcacggtggctcacgcctgtaatcccagcactgggggaggccaaggcgggcagatcacaaggtcaggagttcgagaccagcctggccaacatagtaaaaccccatctctactaaaaatacaaaaattagctgggcatggtggcatgtgcccgtaatcccagctactc

SEQ ID NO: 8112 - DNA, 1248 bp, Homo sapiens
tccttgctgccctttcccaaatttgactctttcaacagacaagtctttacttttttggaatgtggcttatatctgttgctcctttctcctgagctcaaagggtgcctggtgatatttaagctttattgcctaagctcctggcatcttcagtttaggtagattatcacttagctttcttggctttttaactgaaataataattttcttcctttgattgtccttgcatggcttttagaggtgtgactggtgttccaatgatgtacagatattgttaggggtagagacttacgagcttggggagattggtagccaaacagcccattctgggacagtattgatgtttgacatctcacttgatttgtctgtcctcagcatatgtgttctcagtgtcaggtttggtgtcatcatggggaattggtcatgaagtttttagcttgcttgtgctgtgagcatttctagcatttctaacatctcacatctaccttcgaaattgttggactgttttctgggctcattataaacagaatggactagtggatcctctgttctttctcagcattgtattggtgttaatgtcttattaccctttttttcttacaggatgcaggggctgggcttcttgctgctgccatgattgctgtagttcctggatatatctcccgatctgtggctggctcctatgataatgaaggtaagacttttaaaatgctgaagaagatcatctcacctcattatccaacagagcttcacaaagtgcagtctatggtttagcaataataaaaatggtaactgggtgagaatattagaaatgggcaggaacggatcttggacaagctcatgttctcttcccatcatcctttccagaaaggtagttggtaacttttcttacaagtctttggttcatctctgcactcataaaatagttaactattgttttaacattataatcatttgctttattttcctacataaagggagtggatgtccttaaaattttaatgactgattgacttattctcaattcaacatacatttgttgaatgttattgggaaaacatagtattaagtgttaggtaatgactaagattactttgtgcataattataagaaattaaagagataggtaatgaataaggttatattggcccatcatctattaaggaagattaaaatggacatgtaaatataactccagtgacaggagatagtactatgtgccatgataaaaatttgaacagagtacttcag

SEQ ID NO: 8113 - DNA, 1244 bp, Homo sapiens
ttcctatgggtacttattgtttgaccaactttcttttctggtaggttcccctaaatttttttcttttccagtatattttttctgttcatacttacgtatacatgtagacttccttaattgcttccacttgctcacatatccctaaatcctctgtgtgaccttacagtagattgcatttagattaattctgaggcttgagtccctctcgttatgtgatcatgacatcagcaaccacaagggagcaggggattgagttacagtgatgggtttgaacttgattttatattttcttttttaaaatttattttattttgtgtgacctgtacatgtaaggacttgattttcctgtttaaaaaaaaaaatcagttatttgaactctttaagccatttggcataaataaagttatagttactataagtgttctttaaagagtcacaggtgatatcctacaatatagtggtggtggtctgaggaggcatactcagaggaactgtttttttctattccatcataggtctcgtcatggggaggttatgtgttcctgatcaacttaattcctctccacgtcctcgtgctgatgctcacaggccgtttctctcaccggatctatgtggcctactgtactgtttactgcctgggcactatactttctatgcagatctcctttgtgggtttccaggtgagcccttgactgagtagggttttcagcttctactttttctatgcagccccaactagactgatttatcttagattctgttaagaagagtacgacttattcacagcctttatattgaactacttgtgttagttgaagcaacagaattactggtcattaaagtttgcatccaggagtctgctaatatttgctccgtggagtttgaattccatggctcttactttggctttaagtttgtgggaaggggagggatatttagttgagttgagtttagatgagtgatcagagttaaaatttccagtcttcttaatgcagatgaccccatgtagtagcagagattcctgatcttaatggcatctaattgtaagtgcttcaggaagtaaagcacaaacctttaaccacattgctccacagggttaacagacaactgttaaatcaaagaataatgtggtatgtttgatttctcttgtgaaattatcatgaaaatgcaaaccttatctagaggtcaacaagtatttctttactgattacctactgcagattgtccccaacttatgaagcgtg

SEQ ID NO: 8114 - DNA, 1068 bp, Homo sapiens
gtggcactcatctaatcccatggaaactaaatcatagctgtttagttggttggaaagccaaattttccttctttttctctactttgctttctcagagatgaatttgattttgctcaagtctatctattgactaattcagagcaggacttgaggatatagttgatttaatctctacagttggccttggtttgaccaaatttggcctaaaaccctttcaggtagcatttctgcctctgttcttctctccaagtttatatacagcctggctttattctgctggcagtgctgacaaaagtactctcaggtttgaaagaaaggaaggagtgaaactctctaagtattggtggcaattaagcaaaaacctaatccttctctgtcactgagaatcttattaaaatgggaagttgtgattcatttggatcagatgtttgtttgaagagtgtgtgtggaatatttattgcctctttgctgctaggaaaaatatctccctggacggggcgtttctactcgctgctggatccctcttatgctaagaacaacatccccatcattgcttctgtgtctgagcatcagcccacaacctggtcctcatactattttgacctgcagctcctcgtcttcatgtttccaggtatgtggcctcgtgttctgaaatggccttgttcataagaatcacaatttgattccaaatttgcaagctaccctcattcgtgttttgtttttctttgcctgtttatgttgtgtaatacagaggacggctaagcaaattttctcatgtatgaagctgagcagaagtcagaagttcaacagttgtagatattggcaagttcagcctcacagttttctgttcatttgtcatttgtgttataagttaaaatttaacggtaatttttactccggttttgttttgttttgtttgagtacttctgtcgtactccttcccctttacccttgtttttcctcttggaagtattgaagtcccataatgagtactgctgattgtaaagcctcatcaatctcttatcttctggccaatccagatgtgttttagaatttaccggtgttagt

SEQ ID NO: 8115 - DNA, 1166 bp, Homo sapiens
ccccatctcaaaaaaggtacatattcaggagttctcactacccatctctagccactgttaacattttgatgtatatttatcaaataagaatgagatcatagttttttccctgatttttttcacttcataaagaatcaaatttctctgttacttagtattattttatagaaatacttaaaatgtatcatttattagttttttaaagtacagagatgtgtcaagatgtgtaagaaggcaagtagtacataatctcatgcagcaatattttaatatattccattttataaatatagtataattagctccttgtttttggacatttgggttgtttctgatttttttgctactttaaagtgtgctgtagtaaacatctttgcatgtttctatgattgtttttttaggataaattcctggaagtggaattgctgggttaaatgtgtggaatcatccagtcatataatgaagatactttaccttgtaggtttcaacctacaggactcagctgcttatttctccttccctcttttgtagttggcctctattactgctttagcaacctgtctgatgcccggatttttatcatcatgtatggtgtgaccagcatgtacttttcagctgtaatggtgaggatgccctcagtctggtagactttttcactctaactctgaggtgcttttttatctgtctggcagaattcagaaagtactgatgattgtgcacatgcttccctctgagcatttgagggaatgagttgtaagttgttgatcctttccaggaacgtatgggacactcatacattctggttgtggggtccaactttcttggattcgtaactttgtattatagaagcatttttgcactttgttggataatatgaccctgggtgtcttaaaacgggagatgatatttttttcttgaaggcttgggagtattacccagtgctagattgttagaggagggatttgaatttttttttttttttttttttttttttttttgagacagagtttcactcttgttgcccaggctggagagcagtggcgtggtcccggctcaccacaactgccgcctgctgggttcaagcgattctcctgcctcagcctcccaaatagctgggattactggcatgcaccaccatacccagctaattttgtatttttagtaga

SEQ ID NO: 8116 - DNA, 1190 bp, Homo sapiens
gtggaggtcatgtttgatgaaaacccctaaattgatgtcttgatctactaataggctgaaatctgtaaattgtggaacactgattagactgatcatgcttcctgtctctgttaggtgcgtctaatgctagtgttggcacctgttatgtgcattctctctggcattggagtctcccaggtgctgtccacatacatgaagaatctggacataagtcgtccagacaagaagagcaagaagcaacaggattccacctaccctattaagaatgaagtgagaagcaatgttaagagtagacttgggaaactctgtgtgtgtgtgtgtatgtgtgtatgtgggcagcggggggtgggaggagtaaagtagagcactgtcctaggtggtcagaattaactcatatagcctctgacttattttgatcaatctcatctatatgaatgtgtctaagaagttgtcctgtgttgtgtgaatttagtttggttaactacacaattaattctttttccttgtttaggtggcaagtgggatgatactggtcatggctttctttctcatcacctacacctttcattcaacctgggtgaccagtgaggcctactcttctccgtccattgtactatctgcccgtggtggggatggcagtaggatcatatttgatgacttccgagaagcatattattggcttcgtcataatactccagaggtgaagatttgggaggggtgggaattgtgggttaggggcaaaggggaagacatttgatgttacagtgaatcatacagcttttagatgggtggaaagctgggtgaaactggaactttgcaactctagtcttgaatgagccttaaaggtgaacctccattcaattctgggatcttttgtagttactcttactagtaattatctagactttgcatgcacacttttattgatatgatgattttaacatgaggtagaacatcccagttataaaagaagaaaaaagttatagataaataatacatgttcactttagaaaaatcagaaaattgaatcaagaagaaagatataaatcttgtgtaaagtgatcaccttatgataactgcttttaacattttaatttatatcttttgagaatctgaagtgatttcctttacaataactattaggaatatcatttctgagacaatttgttaggaataaaaacttttaagag

SEQ ID NO: 8117 - DNA, 1181 bp, Homo sapiens
attagtcacatcaaactaagtataaagaaacaggtgaaagtaattttaataattttaactgaatagtcatatcaaaacattattatttaatttaacatgtaaccagtatacccccttttggggtttgttttttttactaacttttcaaaatctaatgtgtatttcatacttacctagtgtgtattttatacttacagtacatcttaatttggactagccacatttcagctgctcagcagctatatgtagctaattgctgctatatttgatagcctagccctagctaatctataggaccaatctcagttgtggcttaagtctggactagtagcgtaggatttcaggagtataataatttctcagaaaagttgtatattttgacgaaaaatgctttgcccgtatgttgtcctcactatttttacaaattagagttaaatgataccaatccccattaaaaaaatgttgaggaattttcttagaaatactaacctgctttaactccagcaacttttgtgatgcagcagttctttttttttttttctcctagatatcaacaagtttctttggatggtccggattggagggagcacagatacaggcaaacatatcaaggagaatgactattatactccaactggggagttccgtgtggaccgtgaaggttctccagtgctgctcaactgcctcatgtacaagatgtgttactatcgctttggacaggtttacacagaagccagtgagtgactcataataatattaataacagtagtaataatagtgattactaatacacagtattttccatatgccaagcactagtaagtgctttgtgtctgttaactcatttaatcctcacagcaaccccaaaggcatatactgatattattgtcatattacctttatttttgttgtttgcatatttttttgagacagggtttttgctctgacacccaggctggagtgcagtggtacaatcatggctcactgcagccttgatttcctgggctgaaggagtcctcctgcttcagcctcttgagtagctgggactaaggtgcacaccacaatgcctggctgtttttaaaactttttgtagagatgaggtctcactatgttgtctgggctggtctggaactcctgagctcaagcaatcttcttgtcatggcctcctgaagtactgggat

SEQ ID NO: 8118 - DNA, 2260 bp, Homo sapiens
cagagtcaggattcaaactgacaaagagtggctccaaattctgtgcttttgaccgttactttttattgtccttaagggtattacagtgaagacaggaacaaaagggaaagaaagtgacttttcgtatcttctgatgactacattgagagttatttgattaggttaagtctctccttctgacttcaatttcttgattctgtactagggagaatttctgacatgaatgcaggtctttgacttctggtaggcttttttctctgatccatgcaagggttgctagtgtattagaggctctaaatgacaatcctcaggaatagagggccttggaagtcggctccctatgtctgtcttatcagagataagacattgactggcaagcatcatcttgcatagaacttaagctagggtaacacttgatttgcccttactacctcatgcccttttttgcaggctctactctcaacaaattgcaggctgaggaataatcatcaattagtagatggtttcctgaatccatatactgtctctctaggaaattagcactgtagaaagaagtgtgttctttttcatccctctctagagcgtcctccaggctttgaccgtgtccgaaatgctgagattgggaataaagactttgagcttgatgtcctggaggaagcatataccacagaacattggctggtcaggatatacaaggtaagcagatgctatacgtctcagaaagcaacttttatttttggagattggtttcaatgcttataaaatgggacatatatttctcaaatagggaaatttctcatgacacctgtgcttgaaaagtagcttgcaaactcactgaaaattttacttattttagattgttcttagagagtagatgatcccagtctgccatcattttggcggttgttgcagtgatacttttccagctggggcttgactaaaccagtttctgtgattatcaggctcacgggtggggagagtgcaggaaatagagaaaaagttcacatgtttatatttagctacattttcttctctctctgaagaacttaaggtatatagagtcatatagaaccacataggagtatatctctcatataagaaaagattgagaacccttgatctatgtggagggtagatcagtaatattggtcctcacagaggtattccaaaaggctaagcagagagaatctagtctctagtcagtgcttgtgtattcacagccctaaaccaggctgcagaacccaacataatcctgcccactctgggtgaatccattttagtagaaaatttctccaaagttgatctgattgtaaatattaaactgacatctttatgttgcaggtaaaggacctggataatcgaggcttgtcaaggacataaatgtcacgtccagctctgatatgcttcgcactgagcacatcacatttaggacgttgaagatttttttttttttttttttttaatatgcagtttgtaagaacaaaactggatggcatcagaattgtctggaagttttgtcttgggcagtatgggctgggccaaatgaaatgatttttataattctaaacaggttaccaaatgaaatgtcatggctttactttggtcaattaaaggggggaatttttttaaaaaatgtgccttatttgttttgacttataactgatttgagggaggcaaaagctatgctaggctgccagaaggacataagcagaccttgtccattctcttagctccctaaattagccaaatagagacttctttctcaaatcaggaaaactatcaaagaccaattcagatcctacatttacagacagttttgtcataaccctttgcattgcagcacctagtacaattccttggaaacagcgtggctcaataaatttttattgaatgaataaatgtgggaccagaagagtgctagaagagtgcctttctgggctactatgtctctgttctcaatgtcttttatccttagacgctctttgactttataaatcagcagttttgaagactcaagacaaacagtgaaattattggtttatcaatggagaggaagaaactcttccagcattacatatagagcttgatggtcagtaggtgtttttgaatcagcttaaatataatcatacatatcaatttgaaatggagcttttcagtactctcacttattcatgacacaggaatgaccctttactcaaaactcttgtggttgttcaaaggtgagcttctttttcccttagtcttagcctatgtgttgctg

SEQ ID NO: 8119 - DNA, 1153 bp, Homo sapiens
gcaagaaatgattcatctgttttttggtttttttttttttgagacaaagtcttgctctgtcgcccaggctgcagtgcagcagtgtgatcttggctcactgcagtcttgacctcttgggttcaagtgatcctctcactttagcctcctgaggagccaggactacagatgcacaccatcacgcccagctaattttatttattttttgtagagatggggtctcactatgttgcccaggctggtcttgaactcctgggctcaagcagtccttctgcctcagcctcccaaagtgctgtgattacaggcctgagctgccatgcctatcctgattcatctatctttgaagtgcctctaaagtttccaagttgggattcttagtgtgaaaaccatattgaattaattcaaaggaaacttttcatggatttatattattatttttccttgaaatctttataataagaacatttaaaaaaactgggacttgctttgtttttagaattgccatgggaccaacccagtgacagctgtcaggagtattctgactggaaagaaaaaaaaacatacctcaacccttggaaaaaaatcgattctgctcctctaggtaactgaattatcttgagtgaaagagtaccgatttcttggatatgaagtcttgtgctatttgaattttttcttacttttttttttgttttaaacttacaaataattcatgttcgttgtagataaaatagtaactataagtaaaaaattaaggaaaaaataactctttagtcccagaactctgcaatagatttttaaaaatattttggggagtgtatattcagagcaacttgaatctgctcttagatggctttttacttaaagttttcatatgtgctatactttgttgcaaatacactcgtttgttgcttaattatagggatgcactctaacaaatgtttcattaggtggtttcatcattgtgtgaacatcatagagtatatttacataaatctagatagtatagcttactataaatctaggctatttggtataccctattgatctcaggctgcaaacctgtacagcatgttactatactgagcactgtaaggaattgtaacataatggtatttgtgtatctaagtatagaaaaagtatagtaaaaatacagtat

SEQ ID NO: 8120 - DNA, 1141 bp, Homo sapiens
tgaagacgctgccactggggagctgggcggctgcgtgactccaggtgacgttgctgggggcagtagggccaggtccctgaggcccttcccactgcagttgggcaggcggaagccccccaggccaggcacagagcagggtcacagcctcagggctgggatgcactgcacaggagggctgtccctcagggggatctggatggggaagtgggtgaggctggagcaggctccactgccagtgccctgcagcccccaggcccaggcaggggagtctggaggccaggggtgtcagtgggtaggggagcagggagaagtgggttaggggaaagattgagtctctctgaggggctggtgaggaacaggctgagctctcaggtcaggggcaggaggttaccgagtgtacaggagtttggagtccccaaggaatcccagaggccccatggagggccctatctcccattctcgtctctgtccctgggcacccaggagccagcacaccttgcctcactgccatcgcccttctctgtgcctcagttcagtccgcagggccatgggaataatcacttagcggcggggtgctatgtagtgtcagtagcttccccctcccttccccttccccttccccttcccacagttttcttctcctctttccctgcctccaactccacttggttggagacctccctccaacaagagcagctttggcacacgcctctccacgggacggcggggtctgccccagaacagccccacaaaggctccagcgtgagttgtccccaggacaggtctgggcgtcacccgacccccacactcacagtagatggtgagctggacagtagtctgggtgcgggtgtccaggtagctgttgcgggccaggcaggtgtacaggcctgtgtggacacggccagctctggcgatgacataggtaggccccgtgtggacttgcgtgtggtcacggagccacacatagtgactaggtgggttggaggcagccagacagctcagggtcacctcttccctctcactggcccagaagccctcctcagtgagtcccagcggctccatggtgatcacaggcttgtcaggaccatctggagagcaaggaaggccagttacacctccccagcttcattccttcattcac

SEQ ID NO: 8121 - DNA, 1110 bp, Homo sapiens
actgtgtaccaggcactgtgctcggtgcttgttactgttaactcatttaacccccacaactcatctacaaagttggcattaaaatccccaagtcactcagtgagccatgggacctgaatccgaacctagtttatctggagccataatctgggctcctcccatttttccatactgctttccaaaagcattgtggttcactctttggatggaaccagtcccgttccgtatgctgtgatctatccctgccgtggaattcctccgaggctccaactccgcagccagagaagctgctctctggcctccgcgggcagagctctgcttatgacttcgtcttccagaggtccacatttctccccttgacgccccctgtctaccacctccacctggaaatttgatctttactgtgctcagtgatcacgaaattggtcaagcctattcatgttccttctcatctagaattctgtgtgattgttttagcataaactgccccgctcccactgtatcatttcacgatctccttttaatgtttttctttcagttttgcactgacagtctggtgacaggtgctgccagggtgcaagttacattgcaatgttctaaaccttttgaagtgttcttagcaaaagcctttctttctgggtgtttttgtcgaatgagtctatgaagactcaatgcatccatcttgggctgatcatgccacagatctcattccagctatagtactgccaagaagtgaagtttatcattgaattttacctgtgttgctctcttttaaagtaatgactttgagatgcatgctttgtatcatattgaaaagtatgttttattttccttaaagttgtaatattgtgtgtgaaactgtacatattttaaatgatgtagctttggcaggttttatttggttgatatgattttatattaaaagagaaggctgctttcatatagcatagcccctgaaggtgggaatactccctgtttgtacaacgctgcttatagtttgtgattggggtgggcgaatgtcttcctctgaaattctttggaaccccccacccctgtcctcccctgaaactcccctgtgcacacccctctgttctgactgcagagatcaag

SEQ ID NO: 8122 - DNA, 1821 bp, Homo sapiens
gcacctgccaccacgtccagctaattgtcttgtatttttattagagacaaggtttcaggctggttttgaactcctgacctcaagtgatccacccgcctccgcctcccaaagtgcgaggattacaggcgtgagccaccacgtctggcctgtattatcagacttcctgagaacactttgaaatcaactgcagttgtgacccatgtttataataacagacctggctgacggattttacaagagtgccttccacagaagtggtaatgtgacctgttgactttgtatctgcacgtgggcacgagtgatgttcagtttgctaggcactagtcatagtgttatggacgtggtggagtgtaaggtcttgatgaattacggcagtatgcagaaaaggaaccaaggccagagagacaaataatgcctcatgtcccactgctttaaaattacattaatttataaaatggccactatgggctctttttgactgtttctcggagtaggaacaaaataagacattaaatggtggcttgaagagaaagatacacattttcagaagaaagaaaggggagggctgcagggagcctgtcttggcgggagctctccagtctgttggattagcacagggacacgcttatggtgccatgacgccgaaactagtcatcccccatctccagcataggcaacggcctgcaggggtgagtgtcagaaaagacttactttggaagaaaagggtttttttttgtttgtttgttttttgtttttttttgtttgtttgttttgggtttttttcctgaaatttcctgatacctttttcagaatgtcacccttgtaaataggcacctaaagccaagttggtcagcagagctcctgaccacggctgcctctgcgtgacaaggacatttgcagctgcctttggaaggctcttcacattaaaaaacaataattatgtaagtgtgtttcatagcttgagtcaagctttcaaggatcactgctcctttgtgcattgtgcatccctttggggaaagaaacagaaaattattctctttctatagagtcaagcaattccagcagaagtgaagaaatgttagtttcccagaaatcgcagtggaatagaatacaatactgtgttaaccaactttctgtataaatgcatcagtattcccttacatatgtctatatattttataatagaactgttagtgaaaatgtgcttgtttaagctgggtcactatgcaagagttacttccagtagaatgtagtgaatgtaattccctagtcggatattagggatgctgtagacccaagttctacattccagatgtccgtgcctatagtatactggatttattcttcatgttgcttaaatgcagttagctctggagggggatagctgcatcccttacttctgtgactagcaaaggacaaagtcccagcgcacagaatatgaaaacataccctgtgttagccaatcaagttacagcaatgctgtcacaaagggagttttagaaaactggggagtcattgtccgtagacagccattttgatttaggaaacaggtgtattagcatgagccttaggtcatgaactgcttttaaagattgagtttgaatatgggatctgtccacgaggaagagaaaatggctttacctttaggacaatctcattgtggactgctttatttatattattagtaacgctgttttaagtgttattctttttattgtattttatttataaaaaatgcctttatatattgaaatatataaatatatatatataaacacacacacacacacacacacacacatatatatatatatatataat

SEQ ID NO: 8123 - DNA, 2201 bp, Homo sapiens
taataggacctacttcagtggtttgctaggaggattaattgagatgatacacacaaagcacttaatacagtgattggcaagtagcaaacactggataaaagtgtttttaacataaataaaagctatttataataataatagttaatgcttatatagttccttctgtgcaccaagtattattttaagcattagtcccaaattacaaatgagaaaactgagacatgaagtgccttgaccatagtcacacggctagtcagtgtcagagctcatattaaaactcaggtaatctgtgtctagaggctggactcttaattattacacattaatgtctccctacaataatgggaagtatttttattaatatcacttcaaataaattgatcagttaaactgatctgttcttttttagcaccatttgctcgcagtgccgcctcctgctcctcctgccgccactgccgccctgagtcactgcctgcgcagctcaggcctcctggcttcccatactagctgccgatatttggagttcttataacatggcagacactgacaatctgaacttgatcgagatttggatgatgttgaagaagtacatgaagaagaaactggtgaagaaacaaaaatcaaagcacatcagctaactgttcagataatgcaaagtcctcagattcttgcagtccttcaagaaagacttgatgttctggtagaaacaccaacaggatacactgaaagcctgcctagggtagttaaaagacgagtgaatgctctcaaaaacctgcaagttaaattaaatgtgcacagatagaaaccaaattctatgaggaagttcacgatcttgaaaggaatatgctgttctctatcagcctctatttgataagcgatttgagattattaatgaaatttatgaacccacagaagaacaatgtgaatggtaaccagataaagaagatgagatttcagaggagttgaaagaaaaggccaagatcgaagatgagaaaaaggatgaagaaaaagaagaccccaaagaaattcctgaattttggttaactgtttctaagaatgttgacttgttcagtgatatggttcaacaacatgatgaacctattctgaaacacttgaaagatactaaagtgaagctctcagatgctgaccagcctatgaattttgtcttagaatttcactttgaacccaatgaatattttacaaatgaaatgctgtcaaagacatacaggatgaggtcagaaccagatgattctgatcccttttcttttgatggaccagaaattatgggttgcacagggtgccagatagattggaaaaaaggaaagaatgtcactttgaaaaccattaagaagaagcagaaacacaagggaagtgggacagttcatactgtgactaacacagtttccaatgactctttaatttgtttgcccctcctgaagttcctgagagtggagatctggatgatgatgctgaaatccttgcacagacttcaaaataggtcactttttacgtgagcgtataatcccaagagcagtgtcatactttactggagaagctattgaagttgatgatgatgtttatgatgaagaaggtgaagaagcggatgaggtaatgtttaccaaatgagcaaataattctctgtgtttaacacattgagaagcaaattgaatgacttatgtattcctttgctataatcattctgcaatttgggttaaaaacattttggaggccgggcgcggtggctcacgcctgtaatcccagcactttgggaggccgaggcgggtggatcatgaggtcaggagatcgagaccatcctggctaacaaggtgaaaccccgtctctactaaaaatacaaaaaattagccgggcgcggtggcgggcgcctgtagtcccagctactcgggaggctgaggcaggagaatggcgtgaacccgggaagcggagcttgcagtgagccgagattgcgccactgcagtccgcggtgcggcctgggcgacagagcgagactccgtctcaaaaaaaaaaaaaaaaaacattttggaaaatatgattttagaattctacagccaaacagtgtatgtgtaaagtttcaataaataaactgaaaaaaagaaaaaactttgttgagcaccttttaagtataaagcacaaaattaaagacatacaaggaaatacctgtattaaaaacatcttggctgggt

SEQ ID NO: 8124 - DNA, 1238 bp, Homo sapiens
caaggttgcgggagtctcttcactctcgtctcaaagccattttgtgccgctgccgctgcctctacggccataaatgcccagagattagcggagaagctccgagcccagaaacgggaacaagacacaaagaaggagccggtgagtccaaagggaccagaactccctagaggcagtgcgctcattggtttcccagacggggagtaggtaggagggtcctctgagtgaaagcgtgtgagtcaatagcccggacgcaaggtgggagaatggggagaaggcggaggggaggggtcagtaagggtacggtgttttcccgtgagctggatctttggctactgtcaggctcagtcctaaccactgcgtcggtacgcaggttagacagatgggtatctctgctctcaaattagtcgaaggcggcgcgggtctgatgcaaagatagtcattccctactcagattctcacccagacctttatggaaggtcttctccacggcttccgcaccaggcattccccacggctccttctttctccctaggtgtccacaaacgctgttcagcggagagtgcaagaaatagtgcggttcacacggcagctgcagcgagtccaccccaacgtgcttgctaaggcactgacccgaggaattctccaccaggacaagaaccttgtggtcatcaataagccctacggtctccctgtgcatggtaaggaccacgcgggaaaggtggaggaacctgcagctgctttctgctacaaccgaggaaaactgagacgttacttgtggtgcactctaaagccttgcattcaaattaattaaacttttgtaaactaccgtccaatataaggaaccaccgagaacacagaaataaataaataagacagtcctccctttctaaacatctgacagtaagcaattcgtagaatacgctgtgtgcagactacagggatcgctgtagagatatacaaaggctgtgtggttctagactaaaggttatcttccatcagaactgggaatgagaaaatgatacataagaaaaaagggggtgtgtgtgtgtgtgtgtgtgtgtgtgtgtatgtatgttggagtatatgtaacatacaaccccagagtgactggaatttagtggaccttcaaatgtctttcaacagatgttgcatgtagttgtcagggacagctgaagtgaatcaggaaagattgatttaaaaaatgcatttgtgaaagagggaaaaggcccattttagct

SEQ ID NO: 8125 - DNA, 3888 bp, Homo sapiens
acaggggtcaaagtgatctttaacaacaaattgggaggaagtagagtgtgggaacgtgatactgggatttgaatgaggggtaagttatacttggagcttcccaaaatgaaagagatagagcaatgtggacgttttcctcagagaccttagtgttcctgaccccacatcctttccccgtatcttccagattcgagggactgggtctggggggcagcttcaggatctggactgcagcagctctgatgacgaaggggctgctcaaaactctaccaaacctaggtaggggaatttcaggtgggggttggtatatgcatctgcaaaactggtaagatacaactcctgcctactggttttatgtgtatgtgtaatctcctgtccctgcagtgcgaccaagggaacactgggtggcatgtttggtatgctgaagggccttgtgggttcaaagagcttgagtcgtgaagacatggaatctgtgctggacaagatgcgtgatcatctcattggtaagttctgaggaccgggctgactcatactcgcgggataggggtagttgagagcagaatcacctagcgtttctcacctgtaccataaagattggtcattgctgacatggaactgacatacctgtccccctctcctcagctaagaacgtggctgcagacattgccgtccagctctgtgaatctgttgccaacaagttggaagggaaggtgatggggacgttcagcagtaagtacttacctaagtgagaaagtgcttatgtgtaggttaagtgcatagacctcagttcttactaggtatgtgactttcggcaaattccttaacctctaaacctctgtaacctagattttaagggttattgagaggattcagtgagttagtccttgtaatgtgcgtctgttctggatttctgggacaagagtctaatttactgttttagtccccttagctcagaaaggtgttaggcatttttgagagcattccttgagtttcacagctgcaacctcctccacctcccctttcagcggtgacttccacagtaaagcaagccctacaggagtccctggtgcagattctgcagccacagcgtcgtgtagacatgctccgggacatcatggatgcccagcgtcgccagcgcccttatgtcgtcaccttctgcggcgttaatggagtggggaaatctactaatcttgccaaggtcagtgcagttccccagcctatcgctgatatttctgtacttcttgtgtctcaaaatcctggctttaggtgacttttcttacgtctttttcacagatttccttctggttgttagagaatggcttcagtgtcctcattgctgcctgtgatacatttcgtgctggggccgtggagcagctgcgtacacacacccggcgtttgagtgccctacaccctccagagaagcatggtggccgcaccatggtgcagttgtttgaaaagggctatggcaaggatgctgctggcattgccatggaagccattgcttttggtacagtgcatgggaagtgtgggggcttatttggggtccctttttctccttgggttctcttggaatttgcagaagatcaggcttgtgctactacagactcgttggtcaattacagtaaaaagtcagatcagttacttgccatgctctgcttttggataacagatgtagttgcaggcaaagctaatataccttaaccagagaaacctgaatttggtcaccttcatcctgttgtcctccttttcctgaatatgtttggtgatggccaagcatataatcaagtttttctcacattaccttggaaccaaatccagagcccaagacagtgaacaggtagtcaaactaggactttttgagaggaagctgggaacgagcatgagtggtagtccaggtgttcagagttgactactttctttctctagcacgtaaccaaggctttgacgtggtgctggtggacacggcaggccgcatgcaagacaatgcccctctgatgactgccctggccaaactcattactgtcaatacacctgatttggtgctgtttgtaggagaagccttagtaggcaatgaagccgtggaccagctggtgagagcgtgggcccagttccctttacaacttgagctttggtcaatttagatggttcttacacttctatcactttttctttccaggtcaagttcaacagagccttggctgaccattctatggctcagacacctcggctcattgatggcattgttcttaccaaatttgataccattgatgacaaggtaaacgtgagactggaggctggaatgggcgtcctgcacaaaggagctgaggctgcaaggaaatcttggctccagcgcttcctgttcctgagagggtgagtgaaaagtgggcttgtgttgatgggctgtcctctttctccacttaggtgggagctgctatttctatgacgtacatcacaagcaaacccatcgtctttgtgggcaccggccagacctactgtgacctacgcagcctcaatgccaaggctgtggtggctgccctcatgaaggcttaacgtggctcttgcccaataccaaatcgccgctttccccacaagcccttcttcctgtatcaagaatgtgctttagagtatgtgagcaacctgtcttcagtgtagtacaaaggcagagtgagggggcttgtggctccttccaaccccactccccgttcagcacagccgccatctgcaaggaaggcctaatcatgttacaatcactgcccactgaccctctcccagcgggcctcccccttcctactcaggcacccccttcactctgcctacagactcagtcttattacagctttgaccaatggttggaacccaacaccagagctttgctaataattagtgtggtcaagagccgtctgagcctaatgagtcccagctgcattaggttaagagactcttccagagccagcgccaggtcttgaatggcacctctccctaggatacacagcctgcaggtccccaggacctggatgacacccgcctcactgtggcagtgtattgcctgttaattgctgctaattctaattctgatgatgactcctactccattgtttaccccaaagcatcagctaggctggagtgatttgttacaaatgagcaaaagatgagtccttgcttccctcagaaataaaaggagctcagctgcagcgttgcattgggcttcttggcctcccaactcttcccactcccagaatccagaagtaagctctgcatgttccccttcctgggaggaaaccaattgtcagaaggatgtatgatgaccccctcccctcccatccttcacctcctaagcagtcctggcttttcctcatcactcccctctacagtgcctggtagacaagtgctacattgaagaacacaaacctcttgttaagacttgtcctgtagcttgatattacagatgtgctattagtgcaataaggtgaaggctgtctgcccagagaaataagtaatttatataagaaaataaatttcataaataaattgccttttaggtcttggagttcttttatacaggattcaaaactaaaattccacaacacacttaactgtagttctaggacatatgtatggtcaggacaacagagcagaagttgataatgctccgaggaatcaggtaagtaaacggttgtcctgagaatgagatcactccaccccaaggagaaagatcggaacctttaaactttgggttattaaaattaagcttattagtaccttgatgcaagttagagtttcttacaatgactctaaaagtagagccagggtcctggcaagtaaatgaacaagcttttaatacagcttagttatgtaaaatactgtacactgtaaaagatctagaaaact

SEQ ID NO: 8126 - DNA, 1210 bp, Homo sapiens
cttggttatcttatttctggtggaatgccagagagaagtgccccaacatcctcttgtcctggggacagatttgagtttgggggaaatgtttggctctttcccaaaggttatccaaacccagggcccaaacctgggttttctggggatagtctgaacactgagacatactctttctccaggaacggggaggtaacaactccttcacccatgaggcactcacactcaagtataaactggacaaccagtttgagctggtgtttgtggtaagtggggtgttgtagagggacgattgcattgttaacatagccctgatttttaagagaactctgattaattgcagccagtgtatatgatgacgtaactgaaaaaactagaaaggtagatgggggaaaacagcagctactgggcccaggcagggagcttggctgcctctcaggacagggaaaccggccaggtagctgaacctatctctgaaagccagggttgagttggcgtccctccattctaggctagtatgtaagcagatctgttggctgtttcttcccctaaacaggttggttttcagaagatcctgacactgacatatgtagacaaattgatagatgacgtgcatcggctgtttcgggacaagtaccgcacagagatccaacagcaaagtgctttaagtttattaaatggcacttttgatttccaaaatgacttcctgcggctccttcggtgagagacctgccttctctaaaatcaatttatttccatgatttgatgacctctctgaaggtggttcaaaggtggtaaattgatgtgttcaaagacattcctaatttgctacccagttctcattgtcctcttgggtgtgagagtcctttctctggaccgttatttttccttctgcatggggtagaaagataaaccattctcctttttgtttagtgaagcagaggagagcagtaagatccgtgctcccactaccatgaagaaatttgaagattctgaaaaggccaagaaacctgtgaggtccatgattgagacacggggggaaaagcccaaggaaaaagcaaagaatagcaaaaaaaagggggccaagaaggaaggcaagtttgagttctttggatatactgggacatgaaaggtgttaacacggtgctaaggactgaggtggtccttccttttgtcattgcttacctgcttctcactcaaatggtcaccatcc

SEQ ID NO: 8127 - DNA, 1162 bp, Homo sapiens
aatacaatccaagagcagaagtcctcatccctctttgtgagttctctttttcttatcacagggatggaggacgaaggttggtttgacccctggtgtctgctccaggggcttcggcgaaaggtccagtccttgggagtccttttctgccagggagaggtgacacgtgagtctgagcttgtttcctctagcaaccggggcataggcctagactaggtcttatcttctcactcacaagctaagcaagggctggagggggaaaggggtctccctgagagcaggtcctaggcatcttgacctgggctcctcactgatctgcgttgtgacttgtgatctgcttgatgattgcacctgagcactgtcctgtcagagtgtggccaagctcatgccagctccctcatctctgtttgcttcagtgtctgtgggaaagctcccatccttccagctttctttccttaagaaaccagtgaaatccccatttcattcctcttcagcacctctacggcctatttttcattttcttctctgcaggttttgtctcttcatctcaacgcatgttgaccacagatgacaaagcggtggtcttgaaaaggatccatgaagtccatgtaagtttctagtctgtgatgtcctttaccaaaatggagggacagggaaggtagtgactctccttgttttggttttctttgacccactttccagtatgggtaaactaaggctcaggaagcagtgcatctctcagggtgcctggtgtgtggtccgggccttcccactcctcaccctctggtgtctgcaggtgaagatggaccgcagcctggagtaccagcctgtggaatgcgccattgtgatcaacgcagccggagcctggtctgcgcaaatcgcagcactggctggtgttggagaggggccgcctggcaccctgcagggcaccaagctacctgtggagccgaggaaaaggtaactgccctccggacagctgaggaggttggtgagaaagaaagaaatgacatcgaagttggatagcgtgtgtgtgtgtgtgtgtgtgtgtgtgtggggtgtggggtggacagggttggggagggttgccggccatgctgtttctgcagttcgtaaccgcactggttgtggcaggtatgtgtatgtgtggcactgcccccagggacca

SEQ ID NO: 8128 - DNA, 1168 bp, Homo sapiens
tgcgtggagaatcagacggactttcccgaaacggtggaggcggcctgtgcacccagcctgcacacccgctcccggcccttcccgcccctgcctgggctccgaggcccggggctccacgcactgctcctccgcggtcgcggcccggccccgcgctcgccagcccttcctttcgctttgggccgcgggcggagattggccgcggtgctcggccccgcccccggctccccgccctgccccgacgccccgcccctcgctcccccaagcggacatcgcccggcccagggcgcgcggacccagcggccgagacgcggcgccgcgagaaacgccctaaagaggaggggagagcgcgggagggcgagagggagggagagcggccgggagatcgagagcgaacgaggcagccgccggcggagaggagggagcgggcgagggccgggcaggaggagcgggcgcggcgcgggcgaggctgggacccgagcgcgctcacttcgccgcaaagtgccaacttcccctggagtgccgggcgcgcaccgtccgggcgcgggggaaagaaaggcagcgggaatttgagatttttgggaagaaagtcggatttcccccgtccccttccccctgttactaatcctcattaaaaagaaaaacaacagtaactgcaaacttgctaccatcccgtacgtcccccactcctggcaccatgaaggcggccgtcgatctcaagccgactctcaccatcatcaagacggaaaaagtcgatctggagcttttcccctccccgggtgagtggcgacggccgaggcccccacccaagctctcggccagaggccgggggtcccctggacttcttccccctttcgccgttcccttctgggcggtgcatttcttcaggagcgggggatgctgttggcagctggatctggaggacgaggaggagaaggaggaggaggaggaggaggaggactgttggtggccctagacccttggtttggggggtggtatttattttcacagctgtgtttttgtgagtggtggggaaaagcttatagaatttccagcgccccattcctgctttttttattttcccaaatgagcgagaaccctctggccttattccttaatgttaaggggagatggacgctgcctcagaggacatcatcgcctgactccacgt

SEQ ID NO: 8129 - DNA, 2606 bp, Homo sapiens
ttccatgtttgtttctgttcctaaaccagagtacgaggtccctgggaatttaagtagctacgcattatctattattagactgcaagttcctgcaataactgcttagttcacagccccgtttcaccagtggagttctgggcagttattgctgtcctaaggcattactgtcgtttgcttactctatacttgtgtggtcacagtcttcttgtaattaccatctacaccagcatttcaggtatagctctttataactctggagacatgtaaaacatgtttaacacccacgagttttgaaagttgcattccttattagagtaggaactctctagcccaactccattctatgttctcagctccctccaccccccaaaatacatcagactagcaaggcagtcctatgtttacaaaacgagtttagattgtcatttcattccataactcttaataatactcaagttttatacattcacgtattttaaatgctcggtctgtagaagacactaggagaattgcattccaattactggatggttgctgctctggctttttagaacttgaaattaatttttatttagagcaaaggaggaaatcttttaagaggctaaaatcatgctgctattattgctgtgaaattgtataaagattaggattcatgccagtttttattttaaaaaataatgtgcattttaagggtttatatttagaaaaaaataaaatgtttcaagaacaacacattgatatgtggaaatattctataaggttttcttttgttcccttagaattcattggagggatgcagtaaaaactgtagtagaaaccttgaaacacccatatgtgaaaaggtctgtggaaattgaggcctctacattaaaagtgcagaaccaactgttttacagtcaaagtgctaggaaacctgataggatacttccctttggcacaaaaacaccctgggtgctacatacaggagtatgacctttggtgaatatgtggcactaattttttttaccttaatcatattcttgtcaagtaggcaacccattgccccttggagaccacaccagccctgtaagttctcaccagcagcatggagattaggaagaggggctgctgtgaccaggagatacacacggctttaagtaactgagagcctaaagaaagtaacccagggagtccggtccagttttaatatttgtggatttgttgtcacacacattgtttagtcctgaaactaaaacctattttataaatagtagggttaattcctcgaaacaatttctttattaataaatgtcctgtgggtttagaaatatcaggtaaatatttgaatacagaatgatgattgcaattactgttacaagcgtgaaacacaaacttcagatcaaatctagagttgcttcatttaatgcatgctagcaacagccttaactttggattcagttatttgaaacacttttccggcatctttccctttctaatgttgtggggtggaaaccggatggcaaatcactgtgagccggatacctcagcacagtccaccttgtgtgtgacttcacaaatgggggacttcacaaatggggtaactgaatgttattactttcaaattttgacatggagcattatgatcaaggaaatggagctgccttatacattaaacccgtgatttaatcctattgacattttcatagccatgcctccagattttatctttttggcaaaattctgattccacagtttggtctgattgaaataaatattccctggacgtctggctaaaaattttgctaacaatcccagaggtgccattttcttattaataaatttcattggagccttatttcttactatattcaatttcgtttcaaacctgcaagtccctgggatggtcccacgactagggcctgcacatttcttacaatggcaaagcattttttaaaatttagggtcaggttgaaaaattctaggactaattctgtagagaggagggactgttaactaacgtgagtggggacggaggagtaggttaccacatttggagcagtaatagatgcaaacgatgtaaatttgaaatttgcccctttagttaaagaaggagcctgcaaagtccatttctctgttttcagccctgtcagtcacccatttaggatgttggcaaagtactgcttgagcagaatgtgtaagaaagtaataatgaaagcaaaagtatgtcagacagttacttcttccacatggttagaggcatgtgattttcagcactgtgtgttacagaaatgtcaggaatggtgtattataacgtgtgcaagataatgtcagtgtgcacagagggtcttttttccttatctgattagtactgttaatgttcaaagaataaaaatggttttacagtttagattctgagatagcaaaacctgatttttcaaccatgacctgcatgagagaagcatcctaggaagtcttagatcatacttttgagtttttaattttaatttatatagtgtttttttatgtcttaatatttttgtgaactggtgtaaattgttaatgcatataagcttgtgtatttttgtaaatagttttgtgatttatttcttgccccatatgtaaatatt

SEQ ID NO: 8130 - DNA, 1523 bp, Homo sapiens
agtctgtccctgcgcatccctgtggctttcctgcaccactgccccccaccaggatgatggagagtaagatgattgctgccatacactccagcagtgcagatgccaccagcagttcaaattatcattcctttgtcactgcttcatccacctctgtggacgatgcattgcctttaccacttcctgtcccacaacctaagcatgcttctcagaaaacagtttactcctcctttgctaggcccgatgtcaccactgaaccctttggtccagataactgtttgcatttcaatatgactccaaactgccagtaccgtccccagagtgtacctccccatcacaataaattggagcagcaccaagtgtatggtgccaggtcagagccaccagcctccatgggtcttcgttataacacatatgtggccccaggaagaaacgcatctggacaccactccaagccatgcagccgggtcgagtatgtgtcttctttgagctcctctgtcaggaatacctgttaccccgaagacattccaccgtaccctaccatccggagagtgcagtctctccatgctccgccgtcttccatgattcgctctgttcccatttcacggacagaagttcccccagatgatgagccagcctactgcccaagacctctgtaccaatataagccatatcagtcctcccaggcccgctcagattatcatgtcactcagcttcagccttactttgagaatggccgggtccactacaggtatagcccatattccagttcttctagttcctattacagtccagatggggccctgtgtgatgtggatgcctatggcacagtccagttgagaccccttcaccgccttcccaatcgagactttgctttctacaatcctaggctgcaaggaaagagcttgtacagttatgctggtttggctccacgtccccgggccaacgtgactggctatttctctcccaacgaccataatgtagtcagcatgcctccggctgctgatgtgaagcacacctacacctcatgggatcttgaggacatggaaaaataccgcatgcagtccatccggagagagagccgtgctcggcagaaggtgaaagggcctgtcatgtcccaatatgataacatgaccccggcggtgcaggacgacttgggtgggatctatgtcatccatctgcgtagtaaatcagatcctgggaaaactggacttctctcagtggcagaaggaaaggagagccgccatgcagccaaggccatcagtcccgagggagaggaccgcttctataggaggcatcccgaggcagagatggacagagcccaccatcacggaggccatggtagcacgcagccggagaagccatccctgcctcagaagcagagcagcctgaggagcaggaagcttcctgacatgggctgcagtcttcctgagcacagggcacaccaagaagcaagccataggcagttctgtgagtcaaagaatgggcccccttatccccagggagctggccagttagattatggg

SEQ ID NO: 8131 - DNA, 1098 bp, Homo sapiens
atttaatagttttataatgttaaagaagttatttgaacttcttagtgtcataatttccttggctgcaaaatgagaataatagtacttacctcatgtggttgtatctgatttaaaggagatattacatataaggcaggtagcacagtgcctggcattcagtatatgtttgttattattcttaatccttgtcttctttgtttgcctttattctctactcacacctaaaatcattttctttaactctgtgttatttttggacacttaatatttcctattcccagatacgtcttattttcacttatttttcagtttgtgaggttggatccaaatatgaagatatatataaaaatgatctttgtgaaaatatttactagtactaaaatctgcatgtttactatccattttctgctttggctgcactgtgtagagtgtgctgtctggaaggtggatgtttgcttactgtttcacttatgcttctccagcctgtttggttctttctgtcatgtgttcatttcttttctgtaagaaaagacagacccatggctatcttaatgttgattattttttctctttcatagaaagaggcctcaaaataagatgaaaaagtctcctgtgggtagctggcgttcctttttcaacttggggaaatcatcatctgtttctaaacgaaagctgcagcggaatgagagtgagccttcagagatgaaagccatggctctgaaaggtgagtgcctgggagattctcacttctgctgctgtcatgatggtcttcggttgttctgggcacgttcttcacatattgttatgatctgcttccataacgtgttcacagttgtgtcacacatacagagtgtcttctctcaccgattctttattcctaaattgaagagtaacataaattatatataaatatgtagaagtatgcaatttcttttcttaaggaaactatatagattatatatagtgtaaatgtgattaaattcacatataccttgtatattgttgtaaataaatactgctatggtatctaaatttattgatctgtatttttacagatctaaaaaatttcaaaactgtttcaacataactttcaagttt

SEQ ID NO: 8132 - DNA, 1161 bp, Homo sapiens
tcacaattcctaattcctgggttagctcttgattggtccaactaatactggggcatattcctggaccaatcggctgaaccatggtataggatcacgtatgaacatggctgctcctgccacaggccatgtgcatggaagattacagtgggtcttggggaaaagggtttctgagtagtagggggaaatttaggcagaaaagccaaatatgtatctgctatagttatctttttgcatattcagtacaaaaatagaaagtgtcaaaattagaaaccatggaatagtatgatcgctgatgataaggggctagaaattgaagctctgcatgagacaggggctgacttgctatgtaagtgcccatagtgctactggtaagtttctgtgaagagtcctctgtaactattaaaatgcctaaagatctatagatttttttcttccagaaaccatccagttttccctgccagagagcatagtatctttactcagagttacactgatctttttcttttcagtcggtcactcagatgcttatggcttacctgtcacgcctttcagctatcgctggcaacaagatcaactgtgggcccgcccttacctggatggaggtatttcctaattcacttttcatgaaaaatgtatatttaaattatctacttaagaaatttgatattaacataattttgatgtctattgagcttcaggaatcaaagaaatgaagtatattctcagcatctgggaggatagatacgtgatacacgaaatattttttcatctcaaatctttctttgataatcttggaaactaatcttaatatattttatgaatctcgatgatacctgttattttggtgtttagtatactaatgtatatattcagcaaggtgtacatttttttagttgacttagtaattgaaaatatttttcagttattagcaagggacaactttttaaagggtcctttttaagagtaagtattgagtgaaacattattcagtaaatagattacatatttattcttaatgtgcatatgtagagttatattgttttctcctcccactggaaattgggaatgcaagatggaaagtggaaagaatatagaactatgggccaacctgcgttgagatcttggaaaaagtattgaatctcttgtaaattacatagcctc

SEQ ID NO: 8133 - DNA, 1182 bp, Homo sapiens
tctttaccatctcagtaagtggcatcatcatccaccacttgcgcaggccagaaccccggattcttcctcctccttgatttctttttttcctcctcatctcatgttaagtctggtcacctccacctttataatataaaccgaacctgactacatctcacttttttcactggcaaaaacctaggctaggctaggctagtaggctttgtcgtctggcaaactgccagcagacttccctgcttctactcctgtccttgtccttcccctcattcttaccatacacgggagccaaaataatgttaaacgttaatcagatcgtatcattctgcttactggctttccaatatacttaatgctaaaacaaaaacttaacattttaccgtggaaataaacccttcattttggtcgcttatgaggctccatatcagtggttcttaaccagggaagattttcccctcaggtgatgtctggagacattcttggttgtcacaaattggggtaggttgccactggcatctagtgggtagaggccaaagtggctgctaaacatccaacatccagtaatgcacaggacaactcccagcagcaaaaaattatgtggtccaaaatgtttgtaatgtgtgatatggctcctggctgcttctctgctctcatcttctgctctctcttcttttcttctttgttcactgagccacagtctcagtgatgttcctttttttttttaagtagactatttttacgttcacagcaaaaccgagctaaaggtgcagaagtttcctgtataccccttgtctttacacatatgcagcttcccccattatcagcatcccacatcagagtcgcatatttgttacagttgatgagcctacattgaaacatcattatcacccgaagtccataggttacattaggattcactcatttttcccacttgttctgagaggagaaaaaaaaaaaagactgactcttggtgttgtaccttctatggatttggacaaattaataatgacatgtatccacatcatagtatcttatagagtagtttgactctgctgaaaatcatctgtgatttggctattcatccctccctctccccagcccctgtcaaccaccagcctttttactgtttccatacttttgccttttccagaatgtcatatagttagaatcatagagtatgtagcc

SEQ ID NO: 8134 - DNA, 1258 bp, Homo sapiens
ctgtcctggctgagaagggaccagggaggttgcatcattgttttaagcttgcctgttcaaggcagccaggcgaggggtgatggcaacggtggcctggattcgtggcctggattctgctgccacgtgccatagtggagcaccctgagaaaggttcactccagggttccaaggtctgctctctaccaatctaggagaatattctgttgaaattgcaggaattaccagttacgtccaacaagccagagttctgagagtaagacccccagggaaggcttaccagttgcagagtgcacacagcgaataggctggttctccatgaggattgtattttttggcttctggtcttctccatgactagtggtctggataggagttttgtgtccagaaaattttatgtaatttatttttttaaagaacctgttgtacatctttctcaaatacaaacttgggctttagctgccccctccactaaaccgatgacttacttttttgactagaatgagaaaatggcaagaatcttagtaaggtggtagccagcttggtaactgcatagtaatcgagaggctgtaagatgggaattcatcgtaggcagcgaggtagagtgggtcccctgaaatgggattcgcttggcactgcctcttaaagataggggtgttgggatcttgattgtggccgccccccccagctttacctgcccactttgtccttcttggcaagcctgttcacatggacgtccagagccagtggacagagaggaggggacggacagcagaggtgctgcttttgcagcagaaactttgttgcagttcagagtataccttctgctctgctccagagcaagagttgcaaaccaggcccttggggctggccatttgtttttgtaaataaagttttattggaacacagcccagaccaatttgtgtttgtattatctgtggctgctttcagattcgaaggcagaattgagtagttgacatagagactggatggccctgaagcctaaagtatttcctatatggccttttaagtaaaagcgttttttgtttgtttgtttgtttgtttgtttgtttgtttttgtggccagaggcggtggctcacgcctctaaatcccagcactttgggaggccaaggcgggcggatcacgaggtcaggagatcgagaccatcctgaacaacatggtgaaaccctgtctctactaaactacaaaaaattagccgggcgtggtggtgtgcacctgtagtcgcagctactcgggagg

SEQ ID NO: 8135 - DNA, 1141 bp, Homo sapiens
taagtatgttggacttgtagacctgaagtcccagggatactgctgggaaaatatattgtttgctcctttcttgaactcttttatgactgctaggaggcttgggcgcctgaatcaatctagggatgtgttcttggtctttttggttcttatatttttcttccctcattaggccccttgaagacctcaagccttgccttggaatcaatgaaatatcttccagcttcttctctcttctattagagatcttgctgctggagagtcaggctagccttcctatggtaagcgttttggaaaagttggaggtacattagagttttcaaagtgttcaaatcctgaatggtctatagcttgagaagtggaactctgagttcctctcaacgctctgtagttaacttgctttgtgattcggacaaacaccggatgcatatactgcaggttgtggtggcacttgtgtggaattgctggtgtggaagagaagtctgactgggttctgcctttgctttccctcagctagaggagcgagttttggattggcagtcatcgccagccagctccctcaacagctggttctctgcggcccccaactgggctgagttggtactaccagccctgcagtatcttgctggagaaagtcgaggtaagatgctcttttttgtagggtcagtatttttcccccttttgtctaattaattattagaataaactgcagctttgctcgtgtaatccatcatgcctttgcataatgctatgccttgaaggttcctgcttttctaatacattgtggaacactcaaaagctgtttcggagctcagggacgcacctgtatggtttgtttatgtggtccatttcttgcagctgttccttccagtttctctccatttgttgaattcaaagagaaaacccagcagtggaagttgcttggtaagtgatccgtattacctaccccaacaggttttcgttctcccatttcttcccctaagtttatttgccttccagtcaatatagtcctgcagattggttttaaaaagcaatatcagaccttattttgctctgtgaaggagtccttcaacaccctttttgtactctcaaggtgggttaactaactcctctggttggaccaaagctgagatggaaggaatag

SEQ ID NO: 8136 - DNA, 2137 bp, Homo sapiens
cctgctggagactggcctagctgtagaatttcagaactgaaaaagaccagagatcccctggtcccaccgtctgcttgctagcctactgctgactggcttgccttggctggcccaggtagtaagcagtggcgccgagccttgcttgtcaccacggtgctaggaaatccagttgactgtcatcttccgtgagggctaagctttcagggctctcgtttcgaaagcattgcctctttgatccccttattttctttctcctgtgtttcaccaccggttctcatttggcctgtccggtgggaacgggctgctggctgcatttggtcctcaggggattgtgcagcaaatggctcaggtctcccagcaccctgtgcaggtctcttcccagacaccacaatgaccctcaggttttgttcttccaggttgatccaatgctcaccccagaagagcgtcacctgaacaagatgcagaaccatggctatgagaaccccacctacaaatacctggagcagatgcagatttaggtggcagggagcgcggcagccctggcggagggatgcaggtgggccggaagatcccacgattccgatcgactgccaagcagcagccgctgccaggggctgcgtctgacatcctgacctcctggactgtaggactatataaagtactactgtagaactgcaatttccattcttttaaatgggtgaaaaatggtaatataacaatatatgatatataaaccttaaatgaaaaaaatgatctattgcagatatttgatgtagttttcttttttaaattaatcagaaaccccacttccattgtattgtctgacacatgctctcaatatataataaatgggaaatgtcgattttcaataatagacttatatgcaggctgtcgttccggttatgttgtgtaagtcaactcttcagcctcattcactgtcctggcttttatttaaagaaaaaaaaggcagtattccctttttaaatgagctttcaggaagttgctgagaaatggggtggaatagggaactgtaatggccactgaagcacgtgagagaccctcgcaaaatgatgtgaaaggaccagtttcttgaagtccagtgtttccacggctggatacctgtgtgtctccataaaagtcctgtcaccaaggacgttaaaggcattttattccagcgtcttctagagagcttagtgtatacagatgagggtgtccgctgctgctttccttcggaatccagtgcttccacagagattagcctgtagcttatatttgacattcttcactgtctgttgtttacctaccgtagctttttaccgttcacttccccttccaactatgtccagatgtgcaggctcctcctctctggactttctccaaaggcactgaccctcggcctctactttgtcccctcacctccaccccctcctgtcaccggccttgtgacattcactcagagaagaccacaccaaggaggcggccgctggcccaggagagaacacggggaggtttgtttgtgtgaaaggaaagtagtccaggctgtccctgaaactgagtctgtggacactgtggaaagctttgaacaattgtgttttcgtcacaggagtctttgtaatgcttgtacagttgatgtcgatgctcactgcttctgctttttctttctttttattttaaatctgaaggttctggtaacctgtggtgtatttttattttcctgtgactgtttttgttttgtttttttcctttttcctcccctttgaccctattcatgtctctacccactatgcacagattaaacttcacctacaaactccttaatatgatctgtggagaatgtacacagtttaaacacatcaataaatactttaacttccaccgagactgctcgtttcactgactgcggcattgatctgcgtgatggtcctacccccttcctccaggagggtgataacttcgttccacgaaggaccccagctgcacctcacaggcggaaatacgtctgctcaagctgtgactcaaggcttccagcgccgtttcgcatttagaaagcaaagtaagagggaacatctgcacagagcatttgtctggcaaaatttaggctactgatatttattaatatgagacttcttaatgctac

SEQ ID NO: 8137 - DNA, 1410 bp, Homo sapiens
agaaaccaggggcttggagtggggttatttgggaggaagtgaaatttcaggagggtttggagtctcagccatccttggcctctgcagaaagtttctttcgtctctctccttccccgtcaaaaggcgctttgggacctcgcagaggacaactgggaggccagggctttggctgccatacgggctggagctaagaactccagagttgggcttgcctgggcttctcgagaggggatggagccctttgggaaggcggctgtatgggaagggatgtgggaacacacatgtcttgagccttttgcgaagtaccgaaacaggaagctcttctttggcagaaagaacaatgaaagacctattgaaagatctcaaaaagattacatgttcctgtatggagttggggatgggtcgctagtcacttcattgacggacccacctaggtggtagtgcccgggcgggaccagcagccaggtctctaccctctctgtccaaggcagacccccaggtttcctggaaggccagggcataccaggtcagggcggcgctgagaggcaggggctgtgtggcagagagttttgctcctctgcaaatgatggcctccctgccctgccaaccctcactttctcccctccttccgggtgcccctgggctccatagtctccgccgttgctccctaagtcaggcctgattttggtgctgtctcagatcaattccttttgtccaagcagcatcccgacctagggagcttgcagaaaatcagacgctggggctttggaggctgcctgcaccacagacaggacctggggctgggctctgctattttctccacttttcaccctcagcaaggaggaaagcttccagtggacctgaaggcttgggcccttcccctggctgtgcctgtgccctgctgtgaggcagattcaccttctcttccttgctgtaattgctatgtttgtgtccttgctaattgcctacttggggttctagactccctgcctcttcagcagagaacctgctgtttggaatttgttatttcagggcagtccggtgcccccaccccaagtttgttctccctgacttccctttctaggactctcctgcccacacggggaaagcagggtcttcctggtcgtgtggtccagcctcctctctgagccatctcaccacctgacaagcagccaggctggggctcaccttccactcacccccaggatcccacattcagcggacttgtcttgtcacctgcaagccctggctttagtttcccccatccctgctcatttcctcctcctctgcgaagctcatttgctctctgcgcccttgggctgttccttccccctctgccattttcattctcttggcttgctctttgtcttttctcctgccgagctttattgaactaactcagtacctagt

SEQ ID NO: 8138 - DNA, 2159 bp, Homo sapiens
tcatctttcaggtacctgaaatgagtgacatcaggtatttggaaggagtaagatcataaactgtattcattttcttccttgtacaaagtgatgacttctaatgcttatatctcaaggtattttttaaaaaagcaacggtccctaatagagtaaaatttggttttggtccaagttcccaataatgtatttaatgtttctgttgtttactggtgcctcccgttgcatcaggtagagattgcctgcctctttgtagggcagccttgtggcaccttatgtccaacttggaggatagtatatggcttctttgtgcctctactatcttttcaaaagccattttataaaaatcctaggtagcctattttaatatttaaatatatatatttgtgaaagaacttttagaacagaccttttctttttactttaaaattcctgtatttccatttttaagagtaaatttaatctccaggatttagaagtgtctttccagagaagcataatgagaaagtcagactgaggtaataagaccagaattaagtgatagaagaaactgttgtttggttaaaggacacagatttgaaggaaaaaaattttgatgtaacaattttttaaataaaattttgtttttctgtaatgtcatatttgctgctacagtagctcaatattttacagggctaacataaagctggctccatttaaaaactggagtacttcctagtgcagccagcctaggcggaaactgtacaccatggtcttccagatgggtgactgatggctttgggtagctgatgcatgctttaatatttgcctatagcccggcagcaaggaagtcggggcggggggacttttttaccctgccagttatagcattgtgattctttctgggcactggcattttgtgaaactctcaagggaaggtgatgcaggggagaaaatgtgaattaaattacatagatgggtgtttttatgtcttctacccctttcctagaattagtacaactcttaactgtgccagtccccagttcaccagctttgtatccagtcgtcatctcattcaagtatggctttacttggtgacactggccatagctaagttaacttggcatgtttgacttttgacaataacaaaaatggttttggattttgttttatttccaaaaaatgtatacaatatcagaacttcacattttatatactagtatctggctattagtattttacaggaaccatagttcttggtgactacatatatatatatatttttgtgaccttttttgtaaactaagtgccgtttcaacgttacaatcatttttagggttattgtaatcaatgtgaatatcatgttttttcaaatctgttctgagcctatagtgtttgctttgtgaacatgtgtattgtatatattctgtatagttatattgtactgaaattagcttgtttgatataaggaaaatatgtattgagtacctttttgctagcctgattgtttaatctttttaaaaaaggtttaaactttttttaaaaaaaaaatctttaaactggcctttattacatggtcacacataaagttgcagttaggaaagggatgggcagggaaaaactagttttgagtgtctttagatagaaacatgagactaaggtttgattttgttttcgttttctcattaaaatatcttatgctttatggaataaaacttcctgctgttgttatttattgtttgctgggcggcagtgttgcctgcggtcatgtgagtgagaaaaggcatcagagtaattcattacttaaataattatctacttagagtgcacagagtagagagggttatattagacagcacatgtcaatttttggtgaagtagagcttaagtgcaaagatctcacaaacaccataccccaacttggaaggagagtataaaggcagctagttagaggacatcatccaatcctagagctattgaatcaggttcttgtgtaaagctgggtactaatgggtgggttgcatctttcaaagttgctctgattctttataaagtcacattttattgactagagaccaattggtgccatttcaatgatatcttacaaccaaggagtaaaaagtgggtacctagcaggggaaaacagctcattacataggtatgaatctatgagatcctgagga

SEQ ID NO: 8139 - DNA, 2916 bp, Homo sapiens
actaaccagtatttaacataaaatgatacaaataaaggcctttttctatttcagtgagggtacatttttcttgatatatatgtactttaaggatattggatctgtttatggatctgttttaggaaacagatttgcaagggataattgtatatatagtagtatttaggtttatttcaaattcatcttagggatgcctagatgcataatttttaccaggacatattgaaaatattgcaaagagatagccagttatattatcccattcattagaaattaccagtgtaactaaacataaatattccagtttagagtgcttaaacgtagctatctttcttaaggccaggagggtaactttgtggtatctaaagggcttaaatttcagaatgcagaataaattgcctttttaaaaccaagcattttgtacaagcttttattttcagttttttaactaccaaataggtgtgatgtactttagaagtaaacaaagatgttcacccatgataatggatgttaaagctcctgcagttgttcttttcgtgtttaaagggtatattctaatagtggaagcatcaaacatgtcagtgatttcatctcattcagaaataaagagattaatattggtctttattttttggcattttaagttttatataaatggatgcagatggagattatcacccacaaatatatttaaatggatttttcttaatttgaatttcaagtaatctttttatttcaagtaattagttacgcatttagttacattgccagttttttttttttatcaatttcagtaagacaaaatatactaaaatgtttaaatagcctcattcaatcttacattttgacatttcagcaatcattctggcttacagtaattagatcccctgttacgacacatgccctttgttcttaataactagcaaaaaaaaaaaaaaaaaaaaactttcatcttgttaaaatactttgccaaatgaaatagactagtcaatacatctgatgtccataattattggtaactcagttaccttctaactaataggctggttcaggagactctcccagtttataaatggttctcttgggagcctttggaagctgtattaaatctttcagtcttttatttctaattttttctcttaatctaaatagaggccagttatctattttatcagcttttattcttgaagattctcagattatgttttagtcccttttagctttaatagtccttgaaaaatacattactgtataatgtggcaattctgtaacagagacttattacttgaatgaataatcctaaaattttaatattttagctgaagtttgagatttgtggaatgaacaaaagaattagaaactttcatatgttactttgtttcagtcatctgcaaagtatgaagctgtaattctgaaatacacatccaagtgaatgagaattaaaaattttctaaatattaatactaactgggaaaaaaaaactagtgtgaagtttacagttagaagaaacagacccaaagttgccagaaggtaataaataaatgtagttttcactgtaagtaagttattgacgtaagatgctttatttgtaatatatttagattttgaaagttattgagagatgaatgtataaaagctaaattttcttttctgaagcagtgaaacaaaattggggtaacaaggaagctctgttgtggcaaacatgtctatgaggaatattaaaactaagcatactcccacaggctttaaactcaaactatgaacatttaaattaagttgttccttattttgcctatacccatttttatctttcattgtcgtttttgcttgacagtatggtgacagagtatttttatttggaaagtcctcagcaagatgaattagccaaaagcaataatggttcagattaaacaataaagtggaattgattcaatcccaggctcaactaagaacagtcgctctctggatgtttcattttagacgatagataagttgagatgttgtaatatttatggggggttaagcctgtgtcagttatgggatgaagacttgtagtaccagtaccatcagtggtcatacttttttttaactttttactaaactaatacagttagacatttccactctatcgtgattatatttttatgatgggaaaataaaaacacttccatgtttttataaatagtctctgcaaagatttcagatgttattggtatctcggtttggcagtatctgaaaaattgagattgtctttgaaatgtttgtgctacttttacttaagtaaacccccactgtgcaagacccaggccggcttcagctaataccaaggtttctgtgtgcataatagtttacagagaacttaagagtaaggactgcggattaaaaacaaaactttttttaactttaaaatttttagtttttgttcaaagtacctggtttataaagtcaaattcttttattagttcctttctcgtttaaattgactgatgttgctgatgaagcttaaagtcccaggcacggttgtggcgatatactgataaaattggtgcctagtggtgggaggagctccagtgtcaggacttttattaaaaggcccttgttttcccaaatgccaatctagccacatttagatttcattattcaataaaacagatgaaaaatcatcccataaatgaatgttgaggttaccaaagtacatcacctgctgaggaaggataaatcttcctgctttaagggagccctgtcatctctcctcttaatgcacgtttcccttggtattagtggaagctgtgttcaagatgggaagcctttcctgcagttcttagaaacacctgctttctaaggagagccttttctaggattagcttatgtgtgttttctctaggcgattttttatttcagttaccaatttaattt

SEQ ID NO: 8140 - DNA, 2356 bp, Homo sapiens
catatttcatcctttgcctcttatctagtgatttcctagtaccggactacttaaaccaggaacaagaagagacccttgttcaatatgatcttggagaacacggttttgaaagcaactcctctgttcaaatgcctgtcatttcacaggtctcctcaacccagaattgtgaaagcacttttcccttggggtctcttggtgggctggcagaaaaagaggaagaagtgccagagcagccaaagagcagtgcttgtgctgaggcaaccagagatgaccccccaaaatcagagctgtcttctataactattgagtagttttgtgatttggcttcagttttgttttttggaaagtgcctgtgcttggtcttgtacatttaaatttaatttaattttttaaacaaaaaaagccgggtgggagggagggggagattgggaaagaatttccctttttactttctgagccctgaaactgattttatttttcctaactgagagattgcttctgtaagtacacaataacatgatgttgaaacagaaactatgagacttaaggagaactggttgacttaaaacatataccagttccttcttccattgttaaaagtaggctaacaacagatcattagctagagaggaaatcagatgattattgaccttcttgagacaagagggtacatgagaaactaattactaaacagcttgacaaatggcctgagtagatacttactgctgtacacaggatgttgtataatattttgtaaagcctgttgtttttggaagtatttatggtaagctttcttaaaaattattatggtaaatacttctgaaatccggcgtacttttctttaagctttgtcatttctgttatgatttttcatggtgaaattttggtactgagatgggcattctctgtacctttatagtaccactccaaaggcaaggaaccatgattgacaacagtcaagctgtggatgaaatgaccaggaacggagaatgaagtatgtaaatcccagcttcataggaactcttctcatactgcttttcagattaaaattgctgtttacctggtctccgaatgtaatgcctgactgtgtcattgcccggatcagttttccccctgccccatcaatatgttctcttgcatatattggcgtgctgccatataaagtaaaaatactggagatattctatattttatatataggtttatgtgttgttggggatgttttcattgtgctcttttggacataataaataattctctattgaggctacattctttttttttttctttttttttaaaagaatggcatctcactctgttgcccaggctggagtatagtggctaagtcatagctcactgcagcttcgaactcctgggctcaggccattctcctgcctcagcctcttgagtatctaggattataggcatgctccaccacacctggttaacttcatttttattttttgtagagatgaggtctcactatggtgcccaggctggtcttgaactcctagaccaagtgatcctcctcctttggcctcccagactgctgggatcactgcaccggccaaggctgcattcttaacccaactagattgtttactgaatcccatatgacagcgatacattgtccttacatatttatttttagacattgcaaagttattaaaaacagttaactatagtttttacacaacgtaggcaacaatgaagagtatagactgtaagattttcatctatgactcataaatctgggagaaaaaaattattaagactaatgagaaactgaaaaccttaaactaatgaatattatttctgctgctaaaaatatgaaactttctggtctgtagttgaaatttgtatgatcctctagacttgggtatacttttcatctggtgccattaaagcatctctaatattgatcctaaatatttgtaagtccatgagcagtgaactttggaataagtttctgtgtagatacccaaagtttaataattatgagagcacctgatttgatagacagaaaatacagttctttagtcaaaacacaagatctgaattttgttcaggtgctagaccatactaaatgtatatatttttaattatagtgatttgtttcatttttttagattggctaattctgtaattttttccccaaaaacatgtgaagaaaggaaaagtaaattaaattccttagaactgttttaggttaagattctctgtgtctgcccatattctgcagtccttaacttgttttcaactctttacctcactcatgaacttgtttttacccatttgctgccaaacataggtgtgttcccttcaggagaatcagcatatacaggttatgataggc

SEQ ID NO: 8141 - DNA, 1099 bp, Homo sapiens
gaaataatatgtgctgttagtggggatttgggttctgtctacatactgtagttaaattgtgttttgaagttagtaaaatagatgatctagaaaagcattcaaaaatcagcttcagtagacgttacctagtttgcctcccctactgcctttttttcttttcctttttaagcacttgtgacttttcacatattctgcacattttctgagatactcaattagaatatgtttttgctggtaattcttgccttttcagatgatctgttgctacagaaatatagttcagaaatttgtagggtttatgacttttcagtttatttttgtttttagatattttgttttgctttatttacaggaattaaaccatttcagtgtgaccgctgtgggaaaaagttcaccagggcttactcgctaaagatgcatcgcctaaagcatgaaggtaaacgctgtttccggtgccagatatgtagtgccactttcacttccttcggggaatataaacaccacatgagggtttcccggcacattatccgcaagcctcggatttacgagtgcaaaacatgtggcgccatgttcaccaactctggaaatttaatcgtgcacctgaggagtctgaaccatgaagcatcagagctagcaaactacttccagagcaggtgaggtgcacaacgaaaacccaaccaggaaaactgctttctaaactctcttttcctgcttttagggcagccttctgtgtttttacatcaggttgccagctagtcagtcacatttgttacggattcccactgttcatactctaatctcctgatctgataaaattttgctgagtcttctacgtatataaaattataaacattttatagttggtattaaaaatattttcctgcagaagtagactacttgtcctcttgagatattttttaaataatacaaggtttaagtaattctgtaatggaccttaaatagatcttactggaaattttaccatgtcagatgatgcttagtgatactggattactccagactctagatgttaataaaattctttaccacttctctctatttaaaaatattctatataaaggaatagccattggccagt

SEQ ID NO: 8142 - DNA, 1825 bp, Homo sapiens
ccgggaggcagaggttgcagtgagccaagaccaccccgctgcactccagcctgggcaacagagcaagactctgtctcaaaaacaaaacaaaacaaaaaaaaacattggttcacagacttcactgattggacagtttggaaggcagataaggagaatatatttctatacagtccctaccttgaagtttctctgtcactaccatctttcagctttttaatttagtacagtggccacatgaaaatgatctaaatcacattttaaaccactaaaatatcaattaatgctttattttatgtattttttaggacatttctgatttatttgcatccttgaagagcatctgtagaagaggaagtaaaagatgggtgtgaaaacatttactcatagctcctcttcccacagccaggaaatgcttggaaagctaaatatgctgcgaaatgatggacatttttgtgatatcactattcgtgtccaggacaaaatcttccgggcacataaggtggtactagcagcttgcagtgatttctttcgcaccaaacttgtaggccaagccgaggatgagaacaagaatgtgttggatctgcatcatgttacagtgactggctttatacctcttttagaatatgcttacacagccactctatcaattaacacagaaaatattattgatgttctagcagcagccagctatatgcaaatgttcagtgttgccagcacctgctcagagttcatgaaatcaagcattttatggaatacacccaacagccaacctgaaaagggtctagatgctggacaagaaaataattctaactgcaattttacttctcgagatgggagcatttctcccgtgtcctcagagtgcagtgtggtagaaagaaccattcctgtctgccgagaatcccggagaaagcgcaaaagctacattgttatgtctcctgaaagtcctgtaaagtgtggcacacaaacaagctcaccccaggtattgaattcttcagcttcctactcagaaaatagaaaccaaccagttgactcttccttagcttttccttggacttttccttttggaattgatcgaaggattcagcctgagaaagttaagcaagcagaaaatacccggactttagaattacctggcccatctgagaccggtagaagaatggctgattatgtgacttgtgagagcacaaaaactaccttgcctttaggtaccgaagaagatgtccgggtcaaagtagaaagattaagtgatgaggaggtccatgaggaagtgtcccagcctgtcagtgcatctcagagttcgctgagtgatcagcagacagttccaggaagtgaacaagtccaagaggaccttctgattagtccacagtcttcctctataggtataatgccttctgtgtttttcttggtgctataaagtcaattcaaacatttttaagttcctgttagataaaaagttttgtgctcggtcatataggaaatataaagaagagtaaaacatggtaactggatttgcttgagatgctattagcactatcgtttattttttacaagttgcacattggggaagataaaaataattgaatggtatctgctgggacaaaggcagatacacatacacaaaaaagcagttaaatccagtttgtgttttattcttcattaaaatatgtattgaaaacttaccatgtgccaagcaaacatttatgatacataaagaaaaacacatagtccctgcaatgacaattaggttaatcatctaattggggaagcagatatgaaagtaaatgattacagtgaactatcaaaagtgctcatctggaggtgtgaa

SEQ ID NO: 8143 - DNA, 1184 bp, Homo sapiens
gcttttgccatcagtcactttacaaaccatttcaaggaaggacaacctctctggctcctgacacaagccaggcctcggtgcttttatctgttgtggtggtttttcttctttccctttttaaaagacgcatgaccaagacaacctagggagtttgtcttgcttgcctttgactatttccttaatccaaccatgctctcgagggctgagcagagactagactcaaggcacaggtttctggtgatggagtaaagttacagcggtatctcatgtctacacaagaagaggaacgttctgaaagctccaacaacttcttgagggggatggaccaatacagctttgggctcaggattccctagcctcctctgcccatcgcgtgcactgattggaggagtctggcccaaacactctcatatgaacctcgacatgctggagtggggtctggcaggagctgatgacagtttgagggacttgagtgtccctagcctggcagttggctcccggaagcactagacactgacactcattggtagaccctccctccccgccgttgtgtttggttcttttgcactccatgtactgcagaaggatggaaggacctgggtgctggctgggctgtgtatactgtgtatacaagggagctggctgctgaggtgaccacagccttctcctaataaagctgtaagtatttaaaacctgtgtcctgcctctgtgactgcttctcattcatgcatgcattcctcacatccatggaatgcccagcttcgccagccactgtgctaggagctatggagacagcagtgaccttgacaggcacagtcctggtcctgtgcagctcccaggttagctgaggaggcagagctcaagtcagcaagcagagagttgtggcagatcgtgctacaagtgaaggagacaccaactgatgctgagagtgggagcttggatgtgggcgtttgatcgcatttgaactttttcagagagaaggagctgaaaaaagaaacgaagaaaaaaaagcttgggtgtgggagagagtgatcagggaaagcccctcagaggaagggacaacgaaacagattgaagggtgagacagcagccctgttaaaaggggacgggccttgtagcagacaagcagaaggcccagtcctgggggccgctggggcggggtttcaggagtgcttgagagaagc

SEQ ID NO: 8144 - DNA, 1310 bp, Homo sapiens
gaagaagaggtgcaaattctgttcccttcctaccttgaagccttcccagaccaccacggtctctgcacaagggaggctcccattactgttctgttggcttctagacccaccatcccctctctttctgtggactctgcccgacttctggccacatgcaaccagcagagtaaactgctccaacacctcgggcatgtcctagggcttgccctcccaccagggccagcccaagattaggtcctcagcagcatcaaggtctgggagagccactggcccacatgtcaccattctattcctcagcctccaacaggactcttcattttggggagggaaagggaagatggggccatagcccctaccttgaaattgtacagtgtggaggggatgttagtgcctacctgtgacctttctgctccactgctcagcaagatgaggtaaggttgggtgtcagaggggacctccagcttctctgaagagccagcccttaaggcacttggagcaaaggtcattgagatcagctttatgtggagtaaggaggaggcctgggaaccgcttgtggcatcagttggggcgacaggtggatgagtgtgctctgatggagcttttacggcccacagccactgccaggagcctgagctcttccccatgcttgggacacgttccttggtccccacagcagaatggacattgaattttggtgcttttccctttggtagaaggtggaggtatctgaggagttgtttctgtcttgctacctctgtctactatatagagcaagagtcgggaatagggagatgtgtgagaatcactctcccatggatcagtgtgggccctgtccctcttccccactgtcaccaaccagcagcttggggaaaaggctctgtcgtggatttttgctgcctgcttcccgcttccactcttcttggcggtagatgttcatggtgatccactttgggcggtctgaaagtaggaggtgggggaagaggcaagcctgcacacacacttcctgtccacagggggttgcctgtggcattggagggtggagtctcagagtccagggactgggaggaaggtacttgatgggatggtcttgattctggaactttagactgaggtgttagaaaggggaattgttggctaggggagaagagcagtttaacgctccacttgctaagtcgtctgtatcagtgtcagaaggtcttgacctcccattcagatttaatttcctaactgccaggtgtggggctggggatagagggcccagaagggggcgcagtcactgacgtgaagggaccacatcccgcttcatgtca

SEQ ID NO: 8145 - DNA, 1310 bp, Homo sapiens; identical to SEQ ID NO: 8144

SEQ ID NO: 8146 - DNA, 1516 bp, Homo sapiens
caaggatcagatgcaatcgtggagactgggagcttcgggcgagtggcactcgggtgtggggagcgggagggcaagagatgagtgccgggcaagatgggcaggggcccgtgccctctgcacacatatataaatataaagaacacctagataaagtctatatatctctatatctatatgaagtcatagtttgctttatttttgtacctgtgcttagagatgttttgagcagtgctaccttcccaggcagtctgggatactagctcatgccttgacgccacctccttccctgctcttcctttggtattctctctgttcagagttgcttgggtctttctgatggaaatgtgtatatatgaaaagtttgtaaaataacaaaacaaataacccacctgcaggaaggacaagtgagctgaaggttgtgtggagctgcaggatctgatagccctaaagaaccaggaccaatgtgtctcttgccacttgggagggatgttgacttgaacttctttgcagaggggcttaacagggcaaggctgaggagatgaaaactgtgactccatccccacgtggctgtggaaaggtaaccagttcctcagagaaaacctggcttcacagcattagaaagggggtggttgagactacctagggacctacggtgacacctgtcttggtttgtagcactgtagctcagacagctcagaccgctcatagagggcatggcaatgggagagtttgtgaggctggctgcctgggcttggtcttggagaacacatggcctgtttagtgttgctgcagattcttagagccagtgtgaatgtggtatgtagtataaatatgtcatctatgtttttttcagttatttttaattggaaataaagtgccattgcaaataggatgctccaatcctgggacactgagtggaggatgaggagggagagatgaactgtgggccggcctgggagagggggtcttagtggaaccttccttctggcctccagccggggacttacaaaactgaacaatgtattggcagaactggacccacaatgggagattctggggagcaggagttcacttgtatctgagcaggaagcagtgtgccctgaagaatacctctctgagcaaattccagacctcacacatatgcaagggctctgccttgcagcctcagcaagcgtctcctggtgctagctccttcctgacttgcccggagctcggagtgatgtatttgaagctggtgctgggccagatggtgcaggcagtgaggagagactcaggactgcaacctttcggctccttattcctgctcatcactcagaaaagggcagtactaacccctttcctaaccaagacatggcactccctaagagctcttgtctatagagtttggtccttagaggaaagcagataccttcagcgtgagaagggcttggttgacagttttggggtattatgggaagagtaggttggggtaaagcttgagtctaactcttgatccttacatggacctatgaggccc

SEQ ID NO: 8147 - DNA, 1387 bp, Homo sapiens
gggcacagagggtgaggtcaggcatgggttaggatggtgagaccaccccaggggacaccaagcctcagcatctctttgagtcatgtgataacttagttacttgtaagggtgcagggtacacactgggggatcatcccaagatgacgaagaatgattgcctggtgggcatctggctggggagtggtagccatgcagggcatgtgggagggggatctgggcatcagggacggattgtggggtggggtcctgcatgtgaacgcagactggatcttgggagaggtcttgcttcttagctagatcttccttgcttcttctagaattagcctctaacactaagtgcccaaaccaaacatggacatcttctttatattgtatttcaacttcatttgttttgggggctcctcaggcccaaagctgagaaacttgtcttgagatgcccatcctatcaccagctcttcatcagtggagaaggaagtgccattctcattttcctaagctgcagcggtgggttgcctctccgtccacaatctgaaaatgttcatgggccttggtgatggtgatggtgatagagagggggagctggagcctgacgtgccttcatccccctttcctcttgaggtagagaggcttccttccggccatgaagttgcacagtggcttcgtgaggccttctctttactttctcttcttttgataggctaaagtcactagtctgtggtggaggtgggagggcaaaagagtttcacctgaaactcttggcttgaccagccattcttctctctttaatgtctccagctctgcttctttttagattaagaggcagaatgaaaaatctcttctttagaagaagtcagtaaaccaaggatcaaagcccagattggactttcgcactcttaccagcttgctgtttggctaggggtaccaatcaccacccttccctctgactgcgagtgaatccacactggttcagagccttatttctgggttcctgtctgtactctcaaaaccttctttcaggagcaagtataataaccccaccagatgttctgtgtgttgggttgccgagaaggtggaagtttttttcaacctcattttaagctgttagaaaaacactcagtagattgaatttggtccaaagacaccaccatcccctgagggatcccatgtaggataaggataaatgaagcatccatacaggggtcattaatggctgctcacatcttagagaaggaagagtctgggtatcttggttgccatatactctggtggaacagtggccagtcattaaaatcacatgggtgttgtcttctgcggtgtagaagacagtagtagtagttagggtttcggacgagagctggtgaaaagctaccggctttggagccctggc

SEQ ID NO: 8148 - DNA, 1101 bp, Homo sapiens
acctggatgatgggagttgccgcagctcacctcccgtccccttactctgttcctcccgcagcagcgtgggggccctaaccagcctgcccggtggctgctgggagaccggtgctgctcagcgcctaggtgtccagggtgggacatttggtgtggtcaagctgtctttggagatgcctgggtgggaggtctgggcatacgatggggggctcaggtgtagattggggctcccctgctgcttgcggtgctgcttcacgctgctgctccacgctgctgctcatctgcactgcttttccacacgtggctcctcgctgctttgttgcctgggccagggaagggcggggccgaggttggggaggtctcctttctttctgcctgcctctaactctgtgcactgactccgacgtttggcgccggcttctttttgtactgctttccgctgcctcatctcaccctcctgggcgtgcacggtagtgagccgggacccgggagtggatcctggagggcacccaccaggttacagctcagggctgcaaggagagggccagtcccacaggaccatgtctcctccctgtggtgacgtggcagcactgcacccatagccctccggctttgctgggagttgggagcctgtggaacaagggaacaccctcggcccgtcttcctactctccatgcatagcgtgaccttcttccaacccttacggccttagggatcctggccccactgtggggaaacccctggtcattatggtcttataccctggacatctcaggtgactccagtctgattggatgaatgagccctgtgggttacccgaggccctacttcagctgtccctgggggtgtgtgcagccaggtcctgggctccttccctcatcctgccactgttgagccgcttatccccataccccagagccttactctcccaaggcagagcttgttcttagggttgtgaccagggtgggattctcccacaatgcagctggtaatccatctgaccagtgtcctgagcacgacttgcacctaaaggcccctttggtagaaaagatgccagctgtggttggtgacccagcatcaggaggattggcacagccaaagctg

SEQ ID NO: 8149 - DNA, 1214 bp, Homo sapiens
ctgtctgctctcccacctggcttccctgtgtctgtctgtctgctctcccacctggcttccctgtgtctgtctgtctgtctgctctcccacctggcttccctgtgtctgtctgtctgtctgctctcccacctggcttccctgtgtctgtctctgtctgctctcccacctggcttccctgtgtctgtctgtctgtctgctctcccacctggcttccctgtgtctgtctgtctgctctctcacctggcttccctgtgtctgtctgtctgtccctgtgtctgtctgtctgtccctgtatctgtctgtctgtctgctctcccacctggcttccctgtgtctgtctgtctgtccccgtgtctgtctgtctgtccctgtgtctgtctgtctgtctgtctgctctcccacctggcttccctgtgtctgtctgtccctgtgtctgtctgtctgtccctgtgtctgtctgtctgtccctgtgtctgtctgtctgctctctcacctgcgcttcctctatgcagacccagcgcgtgtcctcaacatgccccctgtgatttacgtgcccgtggggatccatggctacatccgctgccctgtggacgcagaaccaccggccaccgtggtcaagtggaacaaggacggccgtcccctgcaggttgagaaggtgctagagagatgcatgttgagggttggagtgagggctccccccagtactgtgatgccacctctgggctctggatttctgccaggactcctggccccttccaaaagccctgggcaaacagagagctgcttctgtaggggtctgcgggtgccgcccgccccgggctggagctcctgtactatcctgcgtgctgcctggcccagctgggacccagcctgggatggagcgcggagtctctgaccagcgttccctgccctatcgtctgtgtctggcagaacctcggttggaccctgatggaggatggctccattcgaattgaggaggccacagaggaggctcttggcacttatacctgtgtgccttacaacactctggggaccatgggccagtctgcccctgcgaggcttgtcctgaaggtgaggtcccagggctgtgacggcctccatgagctgggcacctggatccccggcctcacgagggtgcctgtgctttcctccccaggaccccccctatttcacggtgctaccaggctgggagtacaggcaggaggccggccggg

SEQ ID NO: 8150 - DNA, 1166 bp, Homo sapiens
gaccctagcatcctggaccccagcctgccttccctctgccctagagagggaagctgggtgagccagtagtcctggaaatgctgctgggatagggatattgctcagcctgaatggaggtgctcccgggtgcgctggagaccccccacccatcctcttctgttggcactttttcattctctctttcatctcttcacagctctgtatccatcatgccttacttttgtctcaggagacctccaaaagaatgagagtattctagggaactgaggctgctctcaatgccaagtgcattgagttgccttgcaggctggggcagggccagctggggcgggagagtggctctgtggccaaggtgctatgccctttcctttgccacctgctgctggaggtgggtgccagctgttattctggagccctgccatagggaatggtatgaagattatgatgagtcccctgtctttagctggggcagggggcggggagctgctgtccttacctgatggcctgtggggcttttgtctgctctattcccccaggccgggccagtcttcatgataaggcatctctgcggctggaacaagttcgctctgaggaccagggctggtatgagtgcaaagtgctcatgctggaccagcagtatgacaccttccacaatggcagctgggtccacctcaccatcaacggtgagtgacggcttccagggtgggtccacctcaccatcaacggtgcctgagggctgtttccggggtgggcctgccccaggggaagcccttctcccaactgcatctcaccccctgcccccctccttgttgctgtggtcccatgagacatcagctcactcctgcagtgtccccgctgctgtcttctcgaagcctgtgcaggcagtgcaggtgcccaggagcggcagctccctgcatgtgtggtgctgtcagagtccttagagggacatgggaagctgctacttcaaaccaggagggctgaggctttaaggtggcaaaatgggtcaccgctgggattatttcccagccttgggaagaccctgctaccccaattctggtggagttcctggggtcccagagttagtctttctttttagatcgatgttttggttctctttaactgtattcgtttgattagtatgtaccaagggtgtagtgtgtatccag

SEQ ID NO: 8151 - DNA, 1080 bp, Homo sapiens
tagaggggtaccatcaggggctcttgcactatttttacctctaaatattacattctcagtagtgccctgcttctaaggctctgaatacaggcttaaagtcatcttatcttgctggaatttgctgtgcagagccataagcctcccattttgttagcgtcagctaggccagtaggaacagaccgggaccttgtctcacactgatgatacctcaaatgttggccggctatgtgaactgcctatttcctattgctggagttttgatttttaactaaatacaaatctgtagattctctcttctcccatcccagaaaacaaaacaaaataatgctttctgaaattgtttctgggacttaaaagtaaaaaaataatggtatatccaaaattctccatttcaaaacacaacaacagattccattaatatagactcaagatcaaaacagcacacgtgctaagctaaggtagacagtgttgactccaagtgttttgatcaataccatgacaaaccttttccctttgacacactctgaattttgtttgggaggagggtgtgtgtgtgtgtgtgtgtgtgtgtgtgtgcgcacacatgcacgcagtgtccatcagtatcagtgcctgcccaagttaggaaaattacattcctggttctgtattgaggagaaggatgtataaagcaacatgaaacattagccctcattttcttttaaattaaagactaatgttaattgttctcaaaactggatttttttccttaaaattaaaggaatctttttcttttggatttaatgaagtattgctagctgaagccagtttgacatagagagatgtcagaatgatttgaaaggtgtgcagcctgatttaaaaccaaaccctgaacccttttaaagaacaacaaaacatgttttacatgctcaaaaaaaaaaaggagggagctggcagatgggaatgataaggcaggagaggaaatgaggaaatactgactcgcttctgctcacaatggccttcctagctcacacggctcctcagattcttctctggaactactgtgttctgtttccccttccctttcctaatttggaacaa

SEQ ID NO: 8152 - DNA, 1112 bp, Homo sapiens
aggcccaagttgaatttggattcaagtggattctaaatactttgcttatcttgaagacagaagcttcataaggaataaacaagttgaatagagaaaacactgattgataataggcattttagtggtctttttaatgttttctgctgtgaaacattttgatttattgatttctttcacttttcccatcacactcacacgcacactcacatttttcatttgccataatgaaccgtccagcccctgtggagatttcctgtgagaacatgcgttttcttgtaactcacaaccctaccagtgctactctcaacgagttcccagaggaacttaagaagtatggagtgatgactttggttcgagtttgtgatgctacgtatgataaagctccagttgaaaaagaaggaatccaccttctagattggccatttgatgatggagctccaccccctaatcagatagtagatgattggttaaacctgttataaaccaaattctgtgaagagccaggtggctgtgttgcagtgccttgtgttgcgggattgggaagggcacctgtgctggttgcacttgctttgattgaatatggaatgaagtacgaagatgcagttcagtttataacacaaaaaagaaggggggccttcaattccaaacagctgctttacttggagaaatactgacctaagatgtgattacgcttcagagataccaacgggcactgctgtgttcagtagaaagaaatgtaaatgaaggctcacttgattgtggcatttagagggaacccttggtacctggaaatgtgaatctggaatcttacctgtgtcatcaaagtagtgatggattcactactcctcaaccactctcctcatgattggaacaaaagcaaacaaaaaagaaatctctctataaaatgaataaaatgtttaagaaaagagaaagagaaaaggaattaattcagtgaaggatgattttgctcctagttttggagtttgaatttctgccaggattgaattattttgaaatctgtctttttaaactttttcaaaataggtctctaaggaaaaccagcagaacattagcctgtgcagaaccatctgtctggggagcacactcttcat

SEQ ID NO: 8153 - DNA, 1119 bp, Homo sapiens
ccggcgggaacccagaaaaggcttcttacacagcagccttacttcatcggcccacagacaccaccgcagtttcttcttaaaggctctgctgatcggtgttgcagtgtccattgtggagaagctttttggatcagcattttgtaaaaacaaccaaaatcaggaaggtaaattggttgctggaagagggatcttgcctgaggaaccctgcttgtccaacagggtgtcaggatttaaggaaaaccttcgtcttaggctaagtctgaaatggtactgaaatatgcttttctatgggtcttgtttattttataaaattttacatctaaatttttgctaaggatgtattttgattattgaaaagaaaatttctatttaaactgtaaatatattgtcatacaatgttaaataacctatttttttaaaaaagttcaacttaaggtagaagttccaagctactagtgttaaattggaaaatatcaataattaagagtattttacccaaggaatcctctcatggaagtttactgtgatgttccttttctcacacaagttttagcctttttcacaagggaactcatactgtctacacatcagaccatagttgcttaggaaacctttaaaaattccagttaagcaatgttgaaatcagtttgcatctcttcaaaagaaacctctcaggttagctttgaactgcctcttcctgagatgactaggacagtctgtacccagaggccacccagaagccctcagatgtacatacacagatgccagtcagctcctggggttgcgccaggcgcccccgctctagctcactgttgcctcgctgtctgccaggaggccctgccatccttgggccctggcagtggctgtgtcccagtgagctttactcacgtggcccttgcttcatccagcacagctctcaggtgggcactgcagggacactggtgtcttccatgtagcgtcccagctttgggctcctgtaacagacctctttttggttatggatggctcacaaaatagggcccccaatgctattttttttttttaagtttgtttaattatttgttaagattgtctaaggccaaaggcaattgcgaaatcaagtctgtcaagtacaataac

SEQ ID NO: 8154 - DNA, 1209 bp, Homo sapiens
ctgggtttattaaattgcttatttctctacttgttgtccttctgtttcaggaactctgataagactttttagaaatgagtagtttacaaggaagaaacatacactagtgactttaaatgagaaggaaaagagtagtttcagcttcaggaggataaatcttgcatatgtgggctactatagtgctttttttttaatttaaagagattcactggagaatatttgtggttagtgatcattcaaggtaaagtgtgaagacttggtcaaatcaggtactatatatataaattcatagtattttgtagatgtgtacacagagagagagacagagctggctgtcttcatgcttagccatttttagaccattgtcccttcaccagcaggaatacgaagtgtccctctgggtagccagaacgagctgacttctgttccaaggggagggtgttgaattgaggactgaaggtggagcaagagccaaggtccctcagggtcttctgtggagatttggggcttttgtcaaaagctactcaacatgtttctaattctttttccccatttagaatatatgagtagtatttgtccccaccctatcttacaaagccttcagagtgttttgaggtaatgcttacaaagtctcccagagaaaagcagaggtcctctacatccagtatcataatgaaaagcaaaaataaacttacatagtgtggtagggtggctctactcaaagaactagatcaaggagaggcctgtctttcagaagttcatacatctaaaacatgtctttgtttgtgttaccaggttcagaagaggaatttcatagaaaatattattccaattatcatctccctgaagactgtgctggagaaaaataagatcccagctttgcgggaactcatgcactatctcagggtaagggtggagcctgtgcttttgtggttgttgtcctaccagttcattacttaggatcttctgccagttatgacagtgcaggcaatccgtgaatgattagaaccccaaattctgcaaacccaacattaccttggtaactgctgtggagctaggggttggctgtgggttccaccaaagccgctctttcccttggatgtgcagccagggccgtgaagagccggcccactgtgccaagcacgtcttcccttaatggagttcaagtccatctggaaaactttcccagctggggtcaagaacacagtc

SEQ ID NO: 8155 - DNA, 2700 bp, Homo sapiens
gcctctaggaaacctgtccccatgcctccctctaaggtgtcacattgcccccctttcaattctgcaggaagtggtgttgtggcggaagggtgacatcgtacggaagagcatgtcccaccaggcggccatcgcctcacagcgctttgagggcaccacctccctgggtgaggtgcggacccccagccagctgtctgacaacaactgcaggcagtaggcccccagggccgagaagatgctgggcacccacccagcacccccatctaccaacaccagcggctgggggcgggggcggaccttgtgaggctcagttgacccgttacttgcaacctgaaaacaaatcatgtttttgacttaaattcttttctctggagaacccaaggggcttggggtgggaagcagtctctccttgggattctgcggccgatgtgggatagaagaggtagcatcctggaagccagcctctctggggaacatgagcccccttcctcggggggctgccttgcgtcttagaggagggagagcagagagcacgcatccttggctcctggctctctgagcttcctgatacaggatctgagcatgtccctgggattctgagctgccaacagggccctgggtagtcacatcttgtactcccctttgctgtcccggaggtagtggcaggagttgggccagcccccactaagtggcaggggaagactcacgattgggaagctacctctttgggaatcttggatgtggtgatctcaagttcccacaggccacctccttctggccactcactgctgggacccaggcacctcccttctccatcctctctggattgtcagtaatgtcctggaacagaagcctgtgggatggccttgggcacggagaagccctggggtcagtgtcgtgcacggatggcggcagtgttgaacccaggaggctgaacccggcccaccacggaagatgagtgcatggcaaccgcctgccttcacgtcgctccacttggtaaccccaaggtctgggctgttctaggtattgcttcacgtgccccagcaagcccttaacaagagggcctggttccctgaagaaccaatcccaggaaggggccttgatccctccgccttgctgagagtgaaccctcgtctctcctcaccctccatttcatttctgggaattggggcttagtttcgaacctttggcaaggctgttcttactaatgcccaagcccctttacccctctccctataggttacacaggggagaccagggcctcggcagaagactgctgccacacttccgaatcattctgcttgccaaataggtcatcttcaccagttgactgacccaagtttaggaccattggtatcgtgtgtttaaaaaacacatataaaaaaactcttgtgaatattcttgttatgctagagaggaaggtacttctccctctacggctctgcgctggggcctatggtagtaaagttgtttactgtcctttttctgcttcccctggaaatgacaggcattactctcccattggcctcccttccctttatagaaagaccaagcaggccccactggccaagaggtacggtatttggcagtctgagttctcagtaatttggaaagttaaggagttggttcctgtgtcacctttcagttagtgtgggaaaggaagacttctgttttcctgagatcagtgcagtctcaggcctttggcagggctcatggatcagagctgagactggagggagaggcattttgggtagcctaggagggcgactggcggcagcagaaccgaggaaggcaaggttgtttcccccacgctgtgtcctgtgttcaggtgcgacacacaatcctcatgggaacaggatcacccatgcgctgcccttgatgatcaaggttggggcttaagtggataagggaggcaagttctgggttccttgccttttcagagcatgaggtcaggctctgtatccctccttttcctagctgatattctaactagaagcatttgtcaattcctttgcctcccaactgacaacacacgttcattttccaaccttcctaacatcttaaacctttcttctgggagaactagaagacagaatttgctttgattctctcaggcgctgtgcacaagccaggtcttctgttttctctttcttactctacccacattcttgccttctctatccaactgtgaaagtgaggggaggctcctgtccccctctcttaaggtccccaaacctgggagtgcataggtactaaatcaagcagtgcaacttgtaattaagcagctgcagtgtttacatgtttcttaatgtgtcatcttttcaatggctgtattaaaagaagaacgtttgttttaatggtctttctgattaaagaaagcccctgtggctttggaggcattgtgcccacggtccaccaagttctgtggtctcttccgtcttacatggtcccaactccgacactcagggaaagacagatccctgccctgatttccctacatagtgcctgtgctctcactgtatagccccgggtgaaaaatgatgaatactttattagccacctgtttgagacaagcacatggctgagaaatgaattcagttcttatccctatctggcagtttatccagaactgctcatgggatggtttaaacctctgtgggacccagaagatgaaaggggcaggtgagcaaggctggtgtagaa

SEQ ID NO: 8156 - DNA, 1084 bp, Homo sapiens
taactacggcccacagcagatgctgttgaataacaccatggcttcatcagaggatgtggggttgtagtacctctgggtgatgaagttgttttagtaaatccatttttaaaaaaaaaaaaggacttgtttttacttttttctaaatgtctctgactactgactgttctatacatagattatttttccttttttaatatacatatatgaatatataaatatatatatttactgttaccagcagcatatgacagagtttcaacatcaaaaatccatttgggggcttgctttttcttttttgctttaaaaaaaaaaatcccattccttctttgtagtacaaggagttagcactccctcctccatcccagcctgaccagatcttccattttgcttttgttcatatagataattatatgtcctttgtgtgttgggacttgtccctgtctgttgggaaacttggtctcactctagtctgtgctggctcttttttcttttgtgtgtgaatgtttgaaactatggtgctgtgtcctcttccctcctgttgtgttctctgttcttcttaaggtattaggtaagctgtatgtaaactcttattagaaggggactaatttttttttaaaggacaaaaaaaaaaatgactaaaaatagtgttttgtcatcactgtctggtgtctttattttggtttaaaaaaatctgtggtttgacttaaattcatcagttttccttttaaaggggggattggggtggacctagcaacagcttatagtttcctcttccctttttgccccagtctcttttaaagaactgtcttctagtaactagaagtgaaatgtactgtccagttacagtttgagtgggtatgagatttaactcaaaaggaatcttacaaaaaaaaagatgttttcttataaaatccaatttctgtaaatgttttctctgaagttcatactacctactttttattcattcttaatactgtataacattttgagtgttttgacttgttcagaggtttgttagtgttgctgtgcatatgtcttgaggtctcatctgaagtaagtttgtgtatgatcgaagatttcaatg

SEQ ID NO: 8157 - DNA, 1115 bp, Homo sapiens
caccgtgtccaactgaggcctttagtggtcgggtgatttctctctcgtttttgctcatgtaagtgcagtggatcctggagtttgttaccaggatggggagttctattcagaactgaccaattaaaaaaaaaccaaccaggatggggagttcttttttttttttttttgagatggagtctcgctctgtcgcccaggctggagtgcagtggcgccatctcggctcactgcaagctccacctcccgggttcacgccattctcctgcctcagcctccggagtagctgggactacaggcgctcgccaccaccccctggataatttttttgtatttttagtagagacaaggtttcactgcgttagccaggatggtctcgatctcctgacctcgtgatccgcccgcctcggcctcccaaagtgctgagattacaggcgtgagccaccgcgcccggccaggatggggagttctattcagaactgaccaattaaaaaggaaaaaacataagtcctttttctcttaagcatatggttagggtaagaatactcttgtgggattcaggctgtgtggggtccagtcttggttctgtgggaactggctctgtgactttgagcaggtcagctctgcccccggacgtcagtttccttttccgtaaacacggaaggcttgacggtgtggttcctgaggtccctctgaccctgacattacggaaggcttgacggcctggttcctgaggtccccctgactgacattattcccaaagaaaatgcattggccttagcactggggattctgagttggccgtggctggagaaagactatgataaggagccctggggagatgcctgggttcctattggtgacctcgccttctcgttcaagcaggacggggagtgggacccaggcccagccttatctccgggaccgcggctgtcctcacccctcctcctgtcacctgagaataaaagggtgggctccataggcgggggctgtgaggaggggtgcaattgcatgggtcatggacgatggtccttagacatctctggggagcctttggcgggagaggcgcagggacttgggggcacttccccaggccctggtgaccgtggtcatctttgtca

SEQ ID NO: 8158 - DNA, 1172 bp, Homo sapiens
gggggaggttacttggactgctggaggggcttgctgtccctggcgcaccatttgggaggttctggtttagagaagcactgtcttctggggcctttcttgggggattagggcgtggctgggaccatctgctgggtccctcaggtgctatgcacctgccgggcatgtgatgccgtttatctcactcagtcttcacaaacccatgagagatgcagtattattccctttatgcagatgaagaaactggggttaattgaggttgagtaccttgcccagggtcacacagtaagcgatagaacctggattcaaccccagtctggagccccatggtgcgtcacacgtatgatcatcctctgtcttgtatgtcttgtttggaaagggttggaaactcttgacatgaggaatggttgttattaatagcaggttttgaggaaaaccttctagaagagtcccagtatggggaagtggcagaggagacccctgcctccaacaaccagaatgccaggatgcttgagggaagacagacacctgcctccaccctggagcaagatgccactgactaccgcctccgaagcctgcggaaactcctggctcagccccgggagggcctgctggcccccttctccaagcggaactccacagcgtccttcccagggaggaccagccacattccagtgcagcagccagagaagaggaagcaaaaacccagccctgagcccagccaagattcacctcattccgacaagtggcctcctgggcaccctgtgaagaacctgcctcagatgagggggcccaggcccaggcccgctggtgacagccccaggaagactcagtggctgaaccaggtggagtcgtacatcgcagagcagagacggggtgacaggatgcggcctcaggcccctggaaggggctggcatggggaggaggaagtggtggcggccgcaggccaggaaggacaagtggagggagaggaagagggggaagaagaggaggaggaagaggatatgagtgaggtgttcgagtacgtacctgtgtttgacccggtagtaaactgggaccagaccttcagtgcccggaatctcgacttccaagccctgaggactgactggatcgatctgagctgtaacacatctggcaacctgctgcttccagagcaggaagctctggaggtcacg

SEQ ID NO: 8159 - DNA, 2256 bp, Homo sapiens
aggcattcctaccagttctttaactcaagttgttcattctgcgggaaggcggtttatagtgagtcctgtgccagaaagccgattacgagaatcaaaagttttccccagtgaaataacagatacaggtaagggattgattctgccacattgttatgtaaattctacagtgcctctgctatgttgaaagcttaatcataaagcagtaatttatgatgacacagataataaaaaagaatagaaaactgaagttataaccaacagataaacatatgggagagggaaatagatgaagaatacagagaattacagaaaaagccaagaagcacggccataccaagatatagtctgtataatagatattgtagtatgtgtttatttctgcacttagtactgttgtctatgttttaagattactccatattttttatcaaaaacagatatttataggagctgacttaggctagcagacaatcttttgaatccatccttttaaaatcagctgattcttatctttttgtattcctttgcagttgctgcctctacagctcagagccctggaatgaacttgtctcactctgcatcatcccttagtctacaacaggccttttctgaacttagacgtgcccaaatgacagaaggacccaacacagcacctccaaactttagtcatacaggaccaacatttccagtagtacctcctttcttaagtagcattgctggagtcccaaccacagcagcagccacagcaccagtccctgcaacaagcagccctcctaatgacatttccacatcagtaattcagtctgaggttacagtgcccactgaagaggggattgctggagttgccaccagcacaggtgtggtaacttcaggtggtctccccataccacctgtgtctgaatcaccagtactttccagcgtagtttcaagtatcacaatacctgcagttgtctcaatatctactacatccccgtcacttcaagtccccacatccacatctgagatcgttgtttctagtacagcactgtatccttcagtaacagtttcagcaacttcagcctctgcagggggcagtactgctaccccaggtcctaagcctccagctgtagtatctcagcaggcagcaggcagcactactgtgggagccacattaacatcagtttctaccaccacttcattcccaagcacagcttcacagctgtgcattcagcttagcagcagtacttctactcctactttagctgaaaccgtggtagttagcgcacactcactagataagacatctcatagcagtacaactggattggctttctccctctctgcaccatcttcctcttcctctcctggagcaggagtgtctagttatatttctcagcctggtgggctgcatcctttggtcattccatcagtgatagcttctactcctattcttccccaagcagcaggacctacttctacacctttattaccccaagtacctagtatcccacccttggtacagcctgttgccaatgtgcctgctgtacagcagacactaattcatagtcagcctcaaccagctttgcttcccaaccagccccatactcattgtcctgaagtagattctgatacacaacccaaagctcctggaattgatgacataaagactctagaagaaaagctgcggtctctgttcagtgaacacagctcatctggagctcagcatgcctctgtctcactggagacctcactagtcatagagagcactgtcacaccaggcatcccaactactgctgttgcaccaagcaaactcctgacttctaccacaagtacttgcttaccaccaaccaatttaccactaggaacagttgctttgccagttacaccagtggtcacacctgggcaagtttctaccccagtcagcactactacatcaggagtgaaacctggaactgctccctccaagccacctctaactaaggctccggtaaaattattgttataaaataattagataaatatgatcagttttttttctccctaatgagtacatttttcacttcagccttgtaagttagaaacatatttataaaggtacctggcttatagtatttattaaattgacagcagtttgagggtatatctacaatgaacatgagatttttttttcaagtgtggcaggattttagggttaattatgctgcacagttttccaagatggtataattatcgggtaaaatacaggtatttcttctgaattggtacaaactgaagaag

SEQ ID NO: 8160 - DNA, 1194 bp, Homo sapiens
tgacatcaaatacgaaagtaaattatttactttataagcgtagccagccacacagaatctgcatctcagtacccatgtgttctctatgatggtattcaatttttcttcctagtcaaaagtggaggcgctatgtaaagagacaatcagcctactctttgacagggaaataaagtgattctttttttccttttttaaattgtctgtgatagaaattggatattgagaacttaagtttttaatctttgtccttttttatcaggtttctgttgcagcagacggtgcccagaaagagggtaaaaataagtcagaagatgcaaagtctgttcattttgaatccagcacctcagagtcctcagtgctatcaagtagtagtccagagagtaccttggtgaaaccagagccgaatggcataaccatccctggtatctcttcagatgtgccagagagtgcccacaaaactactgcctcagaggcaaagtcagacactgggcagcctaccaaggttggacgttttcaggtgacaactacagcaaacaaagtgggtcgtttctctgtatcaaaaactgaggacaagatcactgacacaaagaaagaaggaccagtggcatctcctccttttatggatttggaacaagctgttcttcctgctgtgataccaaagaaagagaagcctgaactgtcagagccttcacatctaaatgggccgtcttctgacccggaggccgcttttttaagtagggatgtggatgatggttccggtagtccacactcgccccatcagctgagctcaaagagccttcctagccagaatctaagtcaaagccttagtaattcatttaactcctcttacatgagtagcgacaatgagtcagatatcgaagatgaagacttaaagttagagctgcgacgactacgagataagtaagtatattttctcttgtgaaagaatgtcagataaggttttcagacctagatcccagggccaagattaataatatttttcgccacaatatgctaatgtctcatttcttttaaagagacagtgccacagaagccccaccccatacctccccaccacacacacacacacacacacacacacacacacacacacacacacacacacacgattcccaaccactgactcacaggcacaggcagcttctcttgcactcatacagacccatagcattt

SEQ ID NO: 8161 - DNA, 2747 bp, Homo sapiens
atccctcactccctcaagaatccgaaccacaggacaaaaaccacctactgggctctctcctaccctgccctcctcccttttttttacccctctcttttttattttttctttgctctttagaacccagtgaaaaataccagggtactggggtgcaactctttcttatgataggtcattagtgctttaagcaaaagatattagcagctttgactgcagcattagcaattaggaaaaaaaaaaaattaagttccctgcggacatgtaactttgccatcagttttgatgtggaaacactgtgatatataaaatgttgttggacaacagtagttttaagagtaaaatatgaaacgtttaaaaagttccaaaaaaagctagctctgtcctttacttattgagacactttaactttttcctttgtatttccattgtattagataaataaatgtgaatgtaaaattgtataaattactgtacttgaatacttctgtttcccagtgttgcttgctggacattttagtgccttggacttctattgcttctgccattagcatcaacttaccagaccccagatcaataaagggcatgtggaaggaaatcgtaggtccatgtgaccccagcagtccagcagtggttatgccaaagggaaattgaaaaagtatttttttaagtcattcaacaactttgtctagagcaggtgtaagatgagtagggtgggaagttaggttggcatcagtggttaaaaacagaaagttctgtttcgggaatagtgaggagggggtgttgtaacaaaattggacaacttaaaagaatggtgtgtgctgggtgaaagacaaagactaaagaatgaggaaacaaacgtgatgcctggccagtgactgtcatataaacctttcttatttgagctaggcttgaacagacgtgacctagaagaaactgaacataaagagaagggggtggggggctagttttcaagttggggaacctgatagtgaaaagtcacagatggagaaaattgctctcagaaaaactgtttggattgctttcctcttgttgcacatgtaccatgcatttctcagcttggggtactacattttgtggaaagttaatctatctatctttccacatctgaattaatcattctaggaaagaatacttattcctactcatttcctttatgatgtccaaatggttgcaggatcataatctattgtgccacctttatttctagaagtacaactaatatgttcacattttcaaataaataatactccccgtaagtaataactgcaaccaatcagtgttattcagtgctatgcctccttgtaatgggtagttattaattattttcagagctttccggaaatactgtcctaactggctatgtttaggatctttgttatctctgaagacaaagaaagaagctaggactcttaattttggggtgcttcttgactcttagttgggaaactgaaaatatttccaaccttttacccacgtcaatggcatattctgggaatcaccaccaccaccaccactaccacagaaagaggctggaggctcctgtaccctgttcattccttaagggccctgcttcccttagtaagtaagtaagttggtctacggccctaaatatgcaaatgagagctgaaggtttttaaaaggtagaaaggaaaagggcaagggcttccacccctgctttaaaatgatttatttattctctgcttgtatttcttgtggagagagtaaggatagaaccaacaaggggctgagtagctgagaaaggggccacccaagagtgaaacatactttataccagaggagcagtggagcctcatgcagcacattatcatttgttatttgggtttaataataattttgacatcttttcactcatacacaaaaaaagtcagaactggtgttatttactgttgatttcatcctcctgtgtatgaaataacaagcctagaggaatgaactagtgctactgaactgtttaaattatttttgtgttaatagtacactttgagtatctttttccacattaaaaactttctgaattataaatgttttccttacattatttaacaatgtacactgttaaaaataaaaataaaaattcaaactttgggggtttctcagcagccgttaattgtacattttgcactaactctgggtgttgcgcttcttgtaagattgcgctttgtgcttcagtttgttacctttgtagacttatttaatgaaaccattcaaataaaccaaacttgcttttgttgagctgtggggtttcatttccagaagattccttcacattctcactggcactattttgagttaagtgcaatttataactggatccctaattcctgggagctcctttgctgtctccttaacttcgaaaggaatagaaacggtcggctgccggctagtactttcagacttccttatctcaggttcacagcttcccaaatgggtctgagccaaaaaataggaagtcactgcttcaagattagccacagcccagcccaaaataatacgtctaaaaaaattattaaattggctgggcgcaatggctcatgcctataattctagtactttttactttgggaggccgaggtgggcagatcacttgaggtcagtttgagaccagcctggccaacatggagaaaccccgtctcctctactaaaaatacaaaaattagtcgggcgtcgtggtgggtgtctgtaatcccagctactcgggagcctga

SEQ ID NO: 8162 - DNA, 1100 bp, Homo sapiens
tctcctgagtagctgggattacaggtgcccaccaccacacccggctaatttttgtatttttagtagagatagggtttcaccatgttgaccaggctggtcttgaactcctgacctcaagtgatccacctcccttgacctcccaaagggctgggattacagcgtgagccaccacgcccggcccggccatcccagaggttttttttaccttagggtgatgcacactgataggatttggggtgagtttctaatgtgccctttgtgtgttgggaagttgggaagggaggatcgtcttgacaccttgaccgcaggcacatgtccaggcagcccaggtctaggaagcagcactcgcgatggattctcacccagccttctgcccgtgcccctgtagcaaggccgccaggtgggagagtccggctttgaaccctgctgcttgaggaacaggggagttgtggcacgcctgccgctctcgtgtttgagttcaaactccttttctgcccccaggatggttcatatcatgaagatgttggttatggtgttagtgagggcctcaagtccaaggctttatctttggagaaggcaaggaaggaggcggtgacagacgggctgaagcgagccctcaggtgagcgcggggctgggagtctaacctgcgtcatttcagctcttgcttcagagcagatttcgattttttttggaagaggtaacacatccacatggttcaaaaatccaagcagcgtggaaggtaattctcacccctgccctggttcctgtctgccgttttcccactttcgttagtattttttcaatgtttctgtttcaggcttcccttgctgggagtaagtggtagaatcctgtactctctcttctccgtgcactcagtcatgtgtgccggaggccttcccactcctactgcgagtgcacagacagcaccctcctctccgtgctcctcagcagtcctccgctacgcacaggtagcatagttaacgtagttacacagtcacgcagatgtccgtgttagtccatttatgttgctatacaggaataccagaggctgggtaatttataaataaaggaggtttgattggcttatgattctgtggac

SEQ ID NO: 8163 - DNA, 1132 bp, Homo sapiens
tgggtgagttcctcctcccaacagaccattcgttctcgcgggctccatctagaagatttttgaaataaattcattgagaattttcttgaaaaaaaaattttttttaacagactggttctcactctgtcacttaggctggagtgcagtggcacgatcctagcttactgcagccttgagctcctgggctcaagtgatcctcccacctcagcctcccgagaagaatgtttaaggacagtttatcgaaaaaagtagatgaggaataaattatgtcaattttgattcacatttaagtgtggtaaggaattaacacagcttttccttaaaaacatttgtttttctaggtgtgctacattgagggtcatcgggtaattaatctggccaatgagatgtttggttacaatggctgggcacactccatcacgcagcagaatgtgggtgagtatgctctccagcagtggggacttctgcactgtccagctcctgctgaaagtctgctgtgggtgaggaggtaaggtaggtggactcagctgccagcaggaggaatggttgtggcccagcggtcagtgtcctcttcaacttgctctctttcccactcctagattttgttgacctcaacaatggcaagttctacgtgggagtctgtgcatttgtgagggtccagctgaaggtgaggggatggagtagacctgctgcccggaaggatcagtgggtggtaggagaaggtgagcaggtagggaagtaggtagctggacggggacccaggctccagagttgtgtctcagccagcgttccctagagtggtggaattcaaatactcttgctcatgtgctccctaaaagaatggaaaaactgttctcttgcacatgttcaagctgacacctaaaagttttcaccatatataaaaattgttgcaaaggatgtattttttggcatatggtaaaatctgacattttaaaatacaataattttaccatcactgataagtgtttggaaactcaactttaggcaaagcaggtccttttgttataacattgatgaaaacaaaaatatgttttgttaataagttgtttcacttcaagtcacagttatttaaggtgttaagtgagcacttaccgtaaatctgttgaatctt

SEQ ID NO: 8164 - DNA, 1197 bp, Homo sapiens
gccgtgctgtggcggcggcggcggcggtagtggcggcggcggcggtgcctgggcggcagcagcagcagtagcggcagccctgaggacggtgagacggccgcggcggcggcgacagcgcggaagtcgcgcgggacccagagcttcccccctgtcgctagtgctgaggctttcgcctttcctacccagcttcttgctcacggcccgggctgggctgggcagggcaacgcgcccccggggaggggcggagctgtaggtgaggcttcgcgaccccctccccctcctcggcagcccggggggtggggaggggcgggccccacccagaccaccggcgcccacccgcgggctccacccagccgggctccgggatcgggcgggagccgaggcggtagatgtggggatcctggggcgggaggtgggggagtggggactggggctctgggcacttggggagcggagggggggaggcttaggactagtgaagccgcggacgaggtagtggggagacggagaaattggggagccatgaggttggggtgcggtcagggtggatctttgggttaggtgagtgatgtaaaatgctgaagatgattcttttcttttcgatgaaatggtgagataaaagatgaagtgtatttcaaaaggacgatgagctgtgcatgttgcctttgaggcagttgcagaacctattttattgcactagatctcacgtttctactttagggttcgattctttttcttctggcggggtgggtggggggtcggagagggaagagaatccccttactttggctcaggtaaattgtgagcgtggatgtatctgaaagttttacaccgaagaagagggagatcttcggtttagacaacttcgttccggcagccaccatttgggtcgcattacgcttagctccttcaaggtggtgtcttccagttttttttccccccaatgcctaaaagatctctttataccacccttttacaggctttatcctggccccttgagagaaggccccaaactcaggtggttgctttggaaggcacattgctgaataatagttgcaggtggttgtggttgactgctttgggtggataaagtgaacaattggaatagttctgttggagctaattatatgaaaaatgcttaaatgttttaaagtacaaccgtcttttatagcgtgttgcttgctcagtacaccttga

SEQ ID NO: 8165 - DNA, 1151 bp, Homo sapiens
cttaaaccaacttgtagccatagagacacctcacaaggttcccatttttgttgttgttgttgttgattttctgctcacacctttcctgaccttgcaaccatgtatggaagtgcccgctctgttgggaaggtggagccgagcagccagagccctgggcgttcacccaggcttccacgttcccctcgcttgggtcaccgtcgaaccaacagtacgggagggagttcgggaagcagtgttggaggtggcagtgggaaaaccctttcaatggaaaatatacaatctttaaatgctgcctatgccacctctggccctatgtatctaagtgaccatgaaaatgtgggttcagaaacacctaaaagcaccatgacacttggccgttctgggggacgtctgccttacggtgttcggatgactgctatgggtagtagccccaatatagctagcagtggggttgctagtgacaccatagcatttggagagcatcacctccctcctgtgagtatggcatccactgtacctcactcccttcgtcaggcgagagataacacaatcatggatctgcagacacagctgaaggaagtattaagagaaaatgatctcttgcggaaggatgtggaagtaaaggagagcaaattgagttcttcaatgaatagcatcaagaccttctggagcccagagctgaagaaggaacgagccctgagaaaagatgaagcttccaaaatcaccatttggaaggaacagtacagagttgtacaggaggaaaaccaggtaagttctacgtgtgtttacctttattggctgaattcatgtatataaatgaaatagcctttttttcccctttcctagatttttcccttcgtagtatatgtatcttcctttttcctattgattttactgttttgtgtcctccatttctcagccctttccaaatttggtcctgtaccctgttttcttctagctgcccatgtctccttgctcccattcttgcttggttcttttctctggtttctctttctcttcgtgtctttcctttcagcatatgttatcttttttttttttttccaattcttctgagagtataattttgccacactctctaatatctattaccaaatgtattttagagtaggtaacttaaatgtaaggtatac

SEQ ID NO: 8166 - DNA, 1234 bp, Homo sapiens
ttccagcccctaaactaatcagtccgggcattagagagctttgaaatgtttattaagaaaacagtcctgttttgacagacaggagttagagcacctggacttaaagcaggctttacagctctactggggatctctcatgtaggcaacatgaggccagcagagccctgtgcaaacaggcatcataagcaaatgaccatttcttttccattatagacttcatccttcaaaagggagtgccattcgtcccaactagtattttccccccttttatctgtgtcactaatgctaaattagttcatgggtcattcaaattctagcagctttggtgttagtctttatatttcagttccagtgctccgctgattattttggcatgaaactatcccatacagtcatcatgctgcttttaattcaaaagattcctatgagctgcaccaggaatatcgtatctagtacaaaaactgtatgtctgttcttccctgaagcagattctcttgtaacttgagtttagttatcttagtattgatattgagttatttttagagagttctgtggtggttagtggctcggtgttttcatcagtcgttcacttaactatcctttcggaacatctgtgccacttacgctgtctcacttctcacccaagtcttagatgctttttcattcttcatattactaggaaagattaaacacatcatataatgccagtgactgcaggactttcctttaaagcttctaaactacctgccagtatgctgaaataaggtatattctgaagcttatcgtttaaattgtagatttcatatgtaaaaacattttttttttttaagacagtcttgctctgtcacccaggctggagtgcagtggcgcgatctccgctcactgtaagctccgcctttcaggttcacaccattctcctgcctcagtgtcccgtgtagctgggactacaggcacccaccactgcacccggctaattttttgtatttttagtagagacggggtttcaccgtgttagccaggatggtctcgatctcctgacctcgtgatccccccacttcggcctcccaaagtgctgggattacaggcgtgagccaccgcgcccagcctgtaaaaacattttcatctttgtttataaataaaacatctgattatacaacaatacttttatgggactcaaagaggggagtcagggttggggtggggtctgtcatttatttacttatttttaaaagat

SEQ ID NO: 8167 - DNA, 1179 bp, Homo sapiens
gatcttaaggtgtgttttctagaaaagttccctaatggaattcatgagtttgggggtctcagtcacccgcttgcctgtaggattccatttgatgattctggatttttgctgtttgttattgcccttagaggggctctgagtatctacttgtgggtggccatttcctgacatctgcatgtacctcgtggaattcagccagcttcatgttgcaaatcagaaagctgaccccaagactgcaaatcaatgaaggtattggcattgttaaggacgtagcgtagacaacagcagtcataaataattaggcaggaacttaacccaaatctagttctttgaccacctctaccaccagaacccagcagacactcacatctcctgataagagttgctggactcgatgtttttgttttgcattttctcctctccttccccacttactcagagaatttaaagtctgtagagtcagcacagccccatcagtccaggaacttcccaccaccagcccttgactgtcccattaactgacatggtcagatttccagctccccctactccctgctgtgaaacaatccctctccctgtgagaggaaactgtggagcgtttcttatcgaaggttaaatggactctgctcataaacctcttactgagatgcttcctgatagccaggctggccagagaggggtgcaggggttagatagtaagtggtggtcgtttgtggtcagttacctcaattctgttcattgcagtgcccgtaaaccatgtagaaagctcccagcactgaaaggcaggagtgttagcatctcgctttatccaccataacgtaaagaactgcggtgtgataacagccttcacggggccacggtggaaccaagacagcaggcgaggccatgcctaaacaagtggtctggcacgggcactggccagctgctctctccaagcaggtggcccagatcccacccacgtggactttctcatcaggtgcagcgcctgccactctcagccactgggtgtgtcactctcctcttcatctcagcattctccatcacttcccctccagaaaaacggatggaaggaagccctctgtgacactgcttctgagaagaagcatttccgggaccgatatcatctgtctggtctctgtgaacagcaaggaatcttcttgaccgttcttgggcactgga

SEQ ID NO: 8168 - DNA, 1099 bp, Homo sapiens
attcagagaattggggcagttacattgtgtctgttgttgagattattaaaagattaaaacgtagttgtagaaatgaaaaattaaacagctgtgttttaaaaatgcaaaccaatatcttgttaataaaggaattcaagctatggggcagccacactcccctcctcccaggctggcataggtggccctgggctggcggcttaggaagcatggagcacacttagggtagtgcctgcctgggcaagagacacctgccgagcaaaaggaacgagaatctggggctcagagcctcgcagttgtgccaggattttcctatacatgttcaggacctctgggtagaggtttcacagtttgtgaccccataaccaccctcacccgacgtgggttctagctcagtgtgcctaatactgcatggtaacctgggcttgaccctgaagcccctgcctggcaggccacaggacctctcctgcccacttggtgctatctcttccagtgaccacccagcacgggtgagcactggccagcctggagcctgcaatccaggtggaacagactgtcctccatgtcagttccttctggcttcaggccctcaattatttccctttgagcttttttagaccctagatctcctaggcccaggctctctcttgaccccagagaagccactgtcaggaaaggaagtgaaccctactgaagccagagaattcaccccggccaaagcaggccctctgggtccagcccctcattccacaccacgccagtattgcatccatctactgcagctacacatcctgagggcagcaccacccactctggcctgctggcccatcgcaggactagcccaggcacctgccgggcattgcaggatatccagtggggcctgtgactgctccctgatgcgtcagaagagaagtgttgcactttagtggaggagctgaggagcacctgcccccttgtagcttgagttccttttggtaacagtagcagcctccatggtggtgtctgggatgcacgtgcacccgctgccttcagctgtatgtgtgtgttcctgctggagttgtgttactgacaggataatgacattacaaagaaattgtgttat

SEQ ID NO: 8169 - DNA, 1657 bp, Homo sapiens
tcccggcttccagcccattctctttgcagctggggttcctaccctaccctactcccagctccttttccccgcggatggagagatggactctgctgcttacccacccactcccctgcagggggtggaggactgattcagctactgtatccccactgctgtgactggaaatgggggtggggagtgactggtcttttcaaccctggggagttgaggaaaatgtctgctttcacttcagctttcatttgaatactgtgatctggtttttattttgaaatgtataaaaagcaaacccagctacaaaggccttttcacccttccactttgtaactaatcccagtctcttctcatcactcctcctcttacagtactctgctattcatgctcatttcatgttcttaatcttctttcctgtttaaaaatttttttttggaaaaaatttgaaatcatggtccttttttctgctgaatatattctatatattatatatatataaattatatatatatatatatacatatatatgtctggctacctcgttttagtttactttttttctgaagccctggaattctacaagagagatattttgagactgaaacatgtttgtgcctagactggaaagatgcccttgggtttgtccgtctttttgtgttggcttcttcccagcctccatccgtccagtgtgccccacttccacattctggctataatttcctttttctccttgttcattgggatttgaggacctatttctaaatcttaatttatagcacaaatatgtgggagcaatgagagttgaaccgttgtttttgttggagatgcagattgtgtcttgaaaatgatgattatatatgcaaattctgccctaccctcaccctcttccaagtttccccccaaaaaggtcacacagtgcggcttcctgtgggaaacaggagcagagctggcctgcagagcccctggggctgtgatgaagctcatatcttatctctgttctattaacaaaatgggagtttgtgggttttaaaaaattccgtttctaaatggaggaatagatgactttctttcttttggtgggggttgggacttgtggctttaaagaaatcacttctgagtaggatgtatattttcgttggatttttgttgttatttctttagaaccctccacagcaacatgcaagaccatggagttaaagaaacccagagacctttatcaattaattgtactgtttgtgaatttgtataaataataacaaagatcctcttaaaacgtttatattcttacagtaaaaggttaaactgatatttatataataaaagaggaaatatgaagtatgtttttgaaaaaaaaaaaaaaaacaacagccttgtatctgcgaattatttttaaggcattgtgtgcttgggtacatgccaaggtaggaggtgttgtttgtatactctaagaggacgcaaggtggagtttggtgcatcctatgtgggggtgagtcaactcatgggtagaattttattctgtataaggtttactactgacatgttttgtttctagaaatgtgattagactggagatttatataatgtttggctttaaactttcaacaacgtggaaatttaaagaaattgaacaaaatgaaactttttaaaaaaccagatttgtatg

SEQ ID NO: 8170 - DNA, 1125 bp, Homo sapiens
cggcaggaaggaaggacggacggaccaggaggaggagcggcggcggcggccggagccggaaggcggggaggggccggccgttgggcccgaggcggcggcggcggcggcggcggcggctggggagaagcgctctcgtcgcctgcccgaggccggagcggcggggcccgcgcctcctccccccagcgccgcggaggggggaggaggaagatggagacccacatctcatgcctgttcccggagctgctggccatgatcttcggctacctggacgtccgggacaaggggcgcgcggcgcaggtgtgcaccgcctggcgggacgccgcctaccacaagtcggtgtggcggggggtggaggccaagctgcacctgcgccgggccaacccgtcgctgttccccagcctgcaggcccggggcatccgccgggtgcagatcctgagcctccgccgcagcctcagctacgtgatccagggcatggccaacatcgagagcctcaacctcagcggctgctacaacctcaccgacaacgggctgggccacgcgtttgtgcaggagatcggctccctgcgcgctctcaacctgagcctctgcaagcagatcactgacagcagcctgggccgcatagcccagtacctcaagggcctggaggtgctggagctgggaggttgcagcaacatcaccaacactggccttctgctcatcgcctggggtctgcagcgcctcaagagccttaacctccgcagctgccgccacctttcggatgtgggcatcgggcacctggccggcatgacgcgcagcgcggcggagggctgcctgggcctggagcagctcacgctacaggactgccagaagctcacagatctttctctaaagcacatctcccgagggctgacgggcctgaggctcctcaacctcagcttctgtgggggaatctcggacgctggcctcctgcacctgtcgcacatgggcagcctgcgcagcctcaacctgcgctcctgtgacaacatcagtgacacgggcatcatgcatctggccatgggcagcctgcgcctctcggggctggatgtttcgttctgtgacaaggtgggagaccagagtctggcttacatagcccaggggctggatggc

SEQ ID NO: 8171 - DNA, 2549 bp, Homo sapiens
taatacaaaccaatttaagtgaacatttatatccgataaggggtgggagtgtgattttaaatgctcttttgggagaacaaagaaattaatgtaaataagatttctaactgtttaaataagactttatataaatgtttaaaacataggggtaagggagggagggagaatttttgtatagaatgaaacatgcaagtaccacacactgtttgaattttgcacaaaaagtgactgtaggatcaggtgatagccccggaatgtacagtgtcttggtgcaccaagatgccttctaaaggctgacataccttggaccctaatggggcagagagtatagccctagcccagtggtgacatgaccactccctttgggaggcctgaggtagaggggagtggtatgtgttttctcagtggaagcagcacatgagtgggtgacaggatgttagataaaggctctagttagggtgtcattgtcatttgagagactgacacactcctagcagctggtaaaggggtgctggaggccatggaggagctctagaaacattagcatgggctgatctgattacttcctggcatcccgctcacttttatgggaagtcttattagagggatgggacagttttccatatccttgctgtggagctctggaacactctctaaatttccctctattaaaaatcactgccctaactacacttcctccttgagggaatagaaatggacctttctctgacatagttcttggcatgggagccagccacaaatgagattctgacgtgtccaggtttctcctgagctcatctacatagattggtagacccttcctttggattaggaaagatgagttttacctctggtacactgtcttggtaagcctggatgtgacagacacctcggctctccttgaataagaaagccagcagaactcttaaagccagttgtagtacggagttgtcagcactcactgaacctcactttacagggataagagtggtgtggcattttaaatacaatggtatgttattgccagggagtgaggtacaagacgatggctcatgtcacaggcctacctgatacggtgtcagagaaagtggtggggaaaggatctggttcatggaattctgatcttggcccataggtgaaccaccaaaatagtgctcgagtcttaggttactgtcatcaaagacttgggatgactccattatatcctggggttgtgggtattagaactaaatatggaggtcctgagcatggggactggcgtcctcagtaggtgtttgggaatatgggaagggtctcctatttattcaatagagttttctcagttattttcctcccttgcccttgcaatctccagcaaaaggtgggatctaggaagaaagaatccagtgtagaagttgagaagaacttgaacgttttggttctggataaggtcactgtcctaggtgctaggtggaccgagcaaaagactcagtggatgaactggtgcagtgcctgacagaataaagaacagtattaatccctttgagaaagcatagtccagcaggacagtggccatttggacagaagcccacttagtttcttgggagcaacagcacgtatcagaagccagacttgctcttcggtcatgcactttgggatacagcgtataggtgcagccctgtcacaacaccaacagaagtagcagcctctgggtgcagtcacccacaccccaaagctggaaggatctggttcaacatagcacaaacccttaggaaaaatgaaattaacatcactgatgtgtaatccagtaaaatctccctttttcgggtgtgtatgtgggcatgtgcccatttctatgtgtgtgtctacgtgcagctcactaccaacagcctcatgtgcacttgacctgacagtgctcgctgagaactctcaccaggttggcgcctgaatgccttactctcagcagtcagaggcttgcttgctctgtgcagatttttaattttcttttttggccctaggctggttgggacctctacagcttcattctttcaccattaaatagtggcctttttcagtattttccctcttcccctttataaattatgctaaagccacaaagcacatttttggggatcatagaaggttggggttccagaaaggcatctgtgtgatggttccattgatgtgggatttccctacttgctgtattctcagtttctaataaaaagaaccaaatgaaatatgacctgtcgtgtgtttttttattgccgttcagcttacctccccttggcttttggcacttctctgaagctctaatttagacactgtgatttaagaaatttttggaaacttccccttcgggatgcagaaatcaaagtgcttatgcccaactcctgtttcctaactcaagctttcctcgtaagttgcaccaggtttagaatggaggggagagcagctctaaggggcagttcttatttattattgaagtttataaaaatagtctctaatgccaagggcaataggctctaccataaagcctgggtgtgtagtaggctgtaccatctaggttt

SEQ ID NO: 8172 - DNA, 1230 bp, Homo sapiens
cagccttcaggggcttcactggaaacctccagggcagctcgtaccagcggcagccccttgcccaatcccatccccactggtgggtgggttctcccagctgctgcagaggggagtccagagccttgagactccgggtccctccctctctggagcagccaggcatgaagaaggtcctcaggtgctcctggctcccagcagggctgtgcctacccgaaagaaggcagcccgccttcccaggccctgcacttccctgacctggctgtggaggctgctctctgggaggagtgggtgctaaggggcttctccacccacccctccttcttgcctacagagggccggtggcctgttcggcaaccacgtcagctactaccaaagcgacggccggagcgccttcccccagaccttcaccactcagcgcccgctgcacatcaacaaggcgggcagcagccagggcgacactgagtcgccatcccacgagaagctggtggactccaccttcaccccgagcagctactcgtccaccggctccaacgccaacatcaacaacgccaacaacaccgccctgggtcgcctccctcgccccgccggctaccccagcacggtcagcactgtggagggccacgggccccccttgtcccctgccatccgggtgcaggaggtggcgtggaagctcagctccaacaggtaagtgggaggctggccaccccaggcggcacacagggcccacgtgctgcaaccctcaggagacagtggaggagacggaggcctcggccagccacttgtccctcaagcttccaggaggttgctgccccagactccagcaagagcaggaggcactatgctgtctcccaagtcctgcccttgatcagacctggcaggctcagggcaagtcagcagtggcctgcggcgctggttctcccacagggccctctcctctcccacacttcctgagtggcagaatgtgatcatcagatgtttgtgttccggcttcacaacagaaaccatcccgtctgcccttccccgagtctctgcccaaacctggcctttctcccagccgagatgggaatggtgtttccattgcttccctggagcccctttgccagcctcccggagagggcatcccctgtgggaggcgccatctgtagcactggcccattctgcccagcacaggatcattcctggaggtcttgactgtacctcttactcctgactcactcttttctccttgtc

SEQ ID NO: 8173 - DNA, 1649 bp, Homo sapiens
aagtgttctgttttgttttgtttgagacagtgtctcttgccctgccgcccaggctggagtgcagtggcacagtctcagttcactgtaacctctgcctccagggctcaagtgatcctcttgtctcagcctcccgagtagctgggactacaggtgcatgccaccacgcccaggtaatttttgtaatttttgttgagatgaggtttcaccatgttgcccaggctgatctcaaacttctgggctcaagcaatctgaccacctcagcctcccaaagtgctgggattacaggcataagccaccaggcttggcctatacaggtatagctttaggacagatgtaggagaatgggtgtatctgtgtaattctgctggaaattaagtgtgtgttttttcacttgggaagtcagcccgtttgctgttcatcttccttgcaggccaaggcagaggcttcctcaggagaccatcccactgacacagagatgaaggaggagcagaagagcaacacggcagggagccagtctcaggtggagacagaagcatagcccctctccaccagccctactcctgcggctgcctgccccccagtctccccactccaccctgttagttttgtaaaaactgaagaattttgagtgaattagacctttatttttctatctggttggatggtggctttaggggaagggggaaaggtgtaggctgggggattgaggtggggaatcattttagctggtgtcagcccctcttcccttcctccattgcacatgaacatatgtccatccatatatattcatcagaatgttaatttattttgctccctctgttaggtccattttctaagggtagaagaggcaagtggtagggatgaggtctgataagaacccagggtggagagggagactcctgggcagccgttttcctcatcctttccctctcccagtccatttccaaatgtggcctccatgtgggtgctagggacatgggaaaaaccactgctatgccatttcttctctctgttcccttcctcacccccgacggtgtggctgatgatgtcttctggtgtcatggtgaccaccccctgttccctgttctggtatttcccctgtcagtttcccctctcggccaggttgtgtcccaaaatcccctcagcctcttctctgcacgttgctgaaggtccaggcttgcctcaagttccatgcttgagcaataaagtggaaacaataaaacctgggtgtcagacaaccctttctgttcagccttggagtggtgggtatgggtgggtacataatgggtagtagcacaatcaaggggtcacccacttagttccagttgagcttaaataagtgagcatctcatgtagatgccatagttgggcaggaagcagccccaccatgcatggcttcctgagcactgcacaggctgccgctgggatttgtgtctatggcttcgcccaaggttcccagcactccctccctccagcaacctggcagttttagtgcctctggttttcttccctgacacttaggaagacgaaagtataaagatctagaagactgggacaccatgcatgttcattttgaagttggaattggtcttctgcctacctctgatctggcagaggtatctgcattttggtttgttaacaaggtaaaa

SEQ ID NO: 8174 - DNA, 1608 bp, Homo sapiens
cccttgcccctgtgctcaagctgtccaccatcccgggcactccaaggctcagtgcaccccaagcctctgagtgaggacagcaggcagggactgttctgctcctcatagctccctgctgcctgattatgcaaaagtagcagtcacaccctagccactgctgggaccttgtgttccccaagagtatctgattcctctgctgtccctgccaggagctgaagggtgggaacaacaaaggcaatggtgaaaagagattaggaaccccccagcctgtttccattctctgcccagcagtctcttaccttccctgatctttgcagggtggtccgtgtaaatagtataaattctccaaattatcctctaattataaatgtaagcttatttccttagatcattatccagagactgccagaaggtgggtaggatgacctggggtttcaattgacttctgttccttgcttttagttttgatagaagggaagacctgcagtgcacggtttcttccaggctgaggtacctggatcttgggttcttcactgcagggacccagacaagtggatctgcttgccagagtcctttttgcccctccctgccacctccccgtgtttccaagtcagctttcctgcaagaagaaatcctggttaaaaaagtcttttgtattgggtcaggagttgaatttggggtgggaggatggatgcaactgaagcagagtgtgggtgcccagatgtgcgctattagatgtttctctgataatgtccccaatcataccagggagactggcattgacgagaactcaggtggaggcttgagaaggccgaaagggcccctgacctgcctggcttccttagcttgcccctcagctttgcaaagagccaccctaggccccagctgaccgcatgggtgtgagccagcttgagaacactaactactcaataaaagcgaaggtggacatgctgggctctgtggtttattggcgtctgattcctaaggcaccaggagaggctggaaaagaaagagggtgttgatggagacgatggtgatagggaagaggcaaggcctgaagttcacccaaagcagcagttggagcacttgcacaggcacacacttgacaacacaaattgccagttttcccagtgctagtcctgcacagctcacctcttttccctggcgtctctgaccttgttccttgggacctttggacctgctggttaacttaggccttttgagggttcttaataagacaagctcacgaggggtagggccccctgaacattagggcaggaagggcccagttacaggtgcttcattcccactgccatccccaccctgaggcctgggagccagcctgccctgcttttcttctgcccggcagcagctcctgttacagttttttgcagtcagaacttgaagaaagtgctatcccctgcctgtctaacctgaaaagtagccaggggcccaagggtcacaagaggctccagggacaggtgagggcctcttctctgcatcaccactcaagcagcatcaccatagcaaccccaggagtaaacaatggtgccagaaagggcttccccacaaagccgcccctcctggctctgaggcccagaagaatgg

SEQ ID NO: 8175 - DNA, 1191 bp, Homo sapiens
ggaagtcaggtgcctgagagcagccacagggtttagctgagatcttggcccaagtctgttttcacacactgcccttgggaaggcagtcaggtagcagaggtcctgctttaaaggctgttcactctgcatttttatcctatctccagcttcgaagcccgctggcctggtacatagattttgcgtatgttgcttcactcattcaataattcctaagtgcactccccatctgaccccattcaaagcaagagaaataggtctcgctcgcacccttagggaacttgcagtctgaaatgaccgtgggctcacccattcaattatattcaatcaactttatgcaagcctgcaaactcagatgagcgataacagcccagggttgtgggcccatcagcgtgttcctcccttcctccctctcttccttccctcccttttcctcagcgtcctgctttcattgttttgcagcaggttgaccagcatagaacatgatgcacatgttcagccgtgcaaaagaggagctagtgcttaagtacaaatgggagacatgattcttttgttttaagtaaatacttagcctgacttcggtcctgtgagcatctgcactccaggcctgagcagctgagctgcctctcacatggacctgccatgattccatgactgcctgcatgcccagtcatcactacatggcattagggtgccagtggttgaacgtgatcacagtgagccccttttctagcgacttctccagccccctacagacatgatctagctaggacagagacaactggaatttctcaaagggcagtggtctgtaacagttaagcattctacatggttctcttggttccctagatcttccatttttcaaggaaaatttgaacttctgatttttgggtaaaatctcctaatttttaactattggcagctaattaaaaaaaaattaaaacgtgatgcggaccaaataaaacctgtgcgtgggctggatttggtctgggggtaccagcttgtgacccctgctttatgtattaaaggtagggtgttatgctgggcactttggggaatataaagagcataaagtgatgaaattaataaaaatcatggggtgtgggagaggcagctcacacacagagcataacacagttggctacgcaagtgaaaccgaaggcgggctgttccgggaatgctgggcagagactg

SEQ ID NO: 8176 - DNA, 1184 bp, Homo sapiens
taccatgttcatgaatagaaatagataagtagaatactattcatattcatgaatagaaatataaagataagccggtcatggtggctcacgcctgtaatcccagcactttgggaggccgaggctggcagatcacgaggtcagaagttcgagaccagcctgggcaacatagcgaagccccatctctactaaaaatacaaaaattagccaggcatggtggcacacacctgtaatcccagctactcgggaggctgaggcataagaattgcttgaacctgggaggcagaggttccgatgagctgagatcatgccactgcactccagcctgggtgacggagaaagattatatctcaaaaaataaaagaaagaaatacaaagacagcaattttgctttccggtggtgacgacctacgcacacgagaacatgcctctcgcaaaggatctccttcatccctctccagaagaggagaagaggaaacacaagaagaaacgcctggtgcagagccccaattcctacttcatggatgtgaaatgcccaggatgctataaaatcaccacggtctttagccatgcacaaacagtagttttgtgtgttggctgctccactgtcctctgccagcctacaggaggaaaagcaaggcttacagaaggatgttccttcaggaggaagcagcactaaaagcactctgagtcaagatgagtgggaaaccatctcaataaacacattttggataaaaaaaaaaaaaaaagacagcaattttccctaagatgatgaatgaattcaatgaaaggtcaaccaaaatatcaaaagggtttgggggaagaggctggctgactgatttttggtgaaacaagacaaactaattctgaaatgtatgcaaaagaacaaagggccaagaacagcaaaaatactcttgaaaaagcgtaagaggaaaggatttgccctaccagatattgagacttattataaagttgtagtaatgaagacagtgcggcatcaggatagacaaacagtccagtggaaaagacccaggcatacacagaaacacaggtggcggtacaggtctgtggggaaaggtggactagttaatcaatggagctatggaggaaaaatcagagccctatcttatatacaaatataaattccaaatatactaaggacttaaatataaaaagaaaagcttcca

SEQ ID NO: 8177 - DNA, 3760 bp, Homo sapiens
ggtctaacagccccacgaggctgagccagagttcacctgtgtgtgtctccagggtgacctctgttcacggttttcttcatgtcttcattccataagcattttcctggcacaccagtggccatccccgcttgctctaggtgccctgtgacatcccaagcctctcggggctgaggtcaggtccaggctgctgcagctcctgcctcaggcccctccccgtgtctttcagatcctgggcatggccttctccatgaccctcttccagcacatccaccggactggtaagaagtacgacgcatgagcgggctggccgggagtgcccaccccgccctgctgccctgtggagggaagaggattgagctttgtgtcacctgcctgcgctctccagatatgacccctgcacccaccccccacagcctgccctaccccacctaccctgcctcagcctcggacttctcagtgggtggagtgccagggaggaggaggcacacggagacctggggctcggggcccctggattcctgcatctgcatatgcgtatttgccaaagacgacagggtgggctggggtgcgctccggaggaacccccggcactgatgggcttctgcccctgcccttcctcacactgacactttgtccccacatggggtggggagcagagtgcccgccccgtggagataccgccccagcgggggctgcgacatccatggccaccatggggcacctggcggggcgggggtctgccggcctctgggcaaggcccctggagcatctcgcccaggctttttataccttacaatgtaacttttttattttattttactctatgattattcaggaatattatctctcagataagtttagggttagatttctgatttgtaactttttactgtgttgatttctttaatggtttgactttttttccctgagggtgagggatgggtgggaagagaggacatctgtccagtctcaatcaggacagaccaccgtgcgacacccaggaggctctcggatggggcgcgcctgcgccctcagaacgtgtgggaaggagggggcgtggacaggacacgggaccttgccaggcctggtgtctgaggacaggagcctgggagaggcgggtggagcgtgaagcaggctggaggtgcccctgcacgggaggtggcgtttgctaaccaatcgagctggaaatgccagggcaggggggccccacggtgctgtggcagagctagaggggtccttagacttttcactgatgagcagttgttggttttttctttctcccttcctcccgctctctgctggcacgcgaggcttccccttccaccccatgtgggtattcccacaacaggttctgcacaccccagttatttcacagacattcctgctagaaactgtcagacaaatacctctctagttcggatgctgctcactttcccccttgcttctggaaggggaagcagtccttaggttttgctgtgctgggacagtggcaggggacccacaggggtgaggacccacggtcctccccgccagccttgctcagctgtgggttgccctgctgggaaggagggaatcacgtccacctgggtcccaagatcttcgcctccttccctggggccacggacatcagcagtgggttgggtggcgattatatcatctgtgatcccaaggagaagaaatacagaaaacccaagagaggtcagactggctcttgttaccggagccacgggaagaaagcagccggagtcacgcacgtgcagagctgggcatgggagagaaacgggctggggagtgaggccaggagtgggattcagctgcagcagggcgccccctccaaactgcagctggtctggcttactgttttgccgttcaaaaaggtcgcgaatccgtgggactgagcacggggacctcacccgctagccagcgtctgctgcacttgatcaggtggggccttggtgggcggctgcctttcctatacagtttgtcttgtcaccctggtttcccactggggccaggtctcttctccagcctccacctgcctgtctgatccaagagctgagacacggccacccagcaccagtcactcctctgttcaccttaagtaacacacaaatcgggaacaggaggacagaaccgttggcattatcaggattcgtgttttgtgggggtgggagtggagagtagggtggtcttgtgagttgtgcagggtgaagaccgcttccctgagacaggggcagtggtgctgatggaatgtgggggaggcccacatttgagcaaagctgccctgcccttgtcccctggcctggcttcctggtaaggagtttcagccgcctccgcaggaacccccaaagtgcagattccggagcagacacatccgggcggagagactcagcagacaagtgctgcagttgcacggtgggacccggggcctcgtgcgttttttgctgtgggtggggtgggtgggttggtttatgcctatcaatgcaatttttaatttttgttaatatcaacagcaaaagcctagtgcattgggagatgtgcaacctccctgaaaatcttttctgtttctggagtacttcaggggtggcctctggccccagagcctttgccacagtgctcccaccagcccccacctcatccgtctgtttgcagagcctcatctacaggtccccacgctgccttctttactcactctgcgcttggccgttttgttatttggcttagtctacattgggcggaagtctgtgtgcacagagtgggtgttccttcgagccccttccactcagagggccacacccagcgatgccagtgaaggtggcacagcctctcttcagtttctcctgactgtgatctcactggggtagaattcccctgagagaattccctcactcacggctccctttgccagagtcagttcaatcaggtctgatgtgagcaatttacacacttgtctcagaaagtccctcagggtttgtagaggactgcaggggggcatccgctgcagactcagcctttctctgcagccatcctgcagtgggggtgagcgggcacaggctgagaactgctcttgggtggtggaagcaggtgtcacggtgcaagtctccccctgcacccctcccccagcttgagccgtgtcacccccctctccctccagcatgggcctgtgtctcaggctctctggaaggtggccctgccccggaccctcttgcaggtgtcctggtttgacttggaactagatggccatctttccaggctttggtggcccaagagcagtctgggtggatggaagtggctgtcccctcctctccagcccctgcccacccactggtggaggtgctaactagcagggacgtggcataggatgggagctgggcgtgaggtgcttggggtccattctttgtccctcagcttctcagagtccggccagcccttgtgttcccgtgccccacactttcctcctccccactgcagtgagtcaatagtccagggtggggcctggcctccctgccctgattggggactcaggaggtgaggcctggggggcttcctgccccctccttgcccacctgcctgcccccgggcagcacgggagggagagcagggtgagcacgcttgttggtttcagatgcactttctgcttgcattgccgtatctgtgcgttccttcatcctggtcctggctttatggaacaccatgtttttagcatgtttttaaataaaaacggataaagtgtcaaaagcacagcaggctgtctctcagt

SEQ ID NO: 8178 - DNA, 1405 bp, Homo sapiens
atttatatctaaatgctattacattttagtactaattttcctatatctagacattgattaagatatatctgaattttctttcttattccttatatttaggcattgaaaaacatggcagtagtaaaatagaaacaatgaataagtctcctcatatctctaattgcagtgtagccagtgattatttaggtaagttttttatattaataatttttctcatcaacaatgctgtttctctgacttttgtttaaattgctgaaattgtggctagaagcaagttctttaaatttgtcaagactctcttgatgtcatggcctttatttctttgtgttttagtctcattctgtcgtactgcagacacacattcttccctgaagggtcataactacccgtggcttctagttggagcaactgacctttgaagaaaggggctgcatattcccaattctagtttgaaaattttgggggaaagattatctctgtttgggtcttggatttatccctaaaactagaggtgttcccagggcactgatgtaccatggttgacccagattgggctaatagtctattactggaagcatgggagggatgaacctgggcaaataaaaacaatagctgtaatagagtctggtctgcagttcttgaaatatcagttgtcacagaaagttttccattgatttttatgcctctcctgaagatttggataagattactgtggaagatgatgttggtggtgttcaagggaaaagaaaagcagcatctaaagctgcagcacagcagaggaagattcttctggaaggcagtgatggtgatagtgctaatgacactgaaccagactttgcacctggtaggttttattctacttcgaaattaattctatgggaattcagtcaaaaaagttcttggaagctattaattgtgcaaagcactgtgttaaacctttggggtgtgcaaacttcagggacacacagaacagttcaattcagtgatagcatttggggaaaaagttttttctacgagttaacctttaagctatgccttgaaaaatgagtagcgtttcaacaaactaaaggtgtaaagtagcatttctgactaacagaaaggcattacctgtggaatagacaaatgctctatttgtctctaactgaggcttgctgggatgaacatggaagaggctcgagagggaggctggtactaatcagggagggtctcagacccactggaagaagtgtaggcttttttttcctggaggtagtagaaatccatgaattattctgaggcagaagtgatatgaaatctatattttattatgatggtttttagactcatttagaaattgggcaaatggaaagtgtagtgaccttgacagaacattataacatattaattaaaaatttaaattcataaa

SEQ ID NO: 8179 - DNA, 1692 bp, Homo sapiens
aaatgcatttgctttttctattactttagaaattataattatatgcatttttgtatgcctttacaactagcattatttgttcccagccttcctttttcagctttcatggtgaggttttagtgtcattaccttggcttctgggatgtttggaaataggcaatactgtattaatttctgctctttagaacattctgttcttttgatctagtttattgcttgatagacactggaaagcagaataatgcttaactaccttttttttgctgcttattttataaattaatctttgttaagagatttctgacatcatcagcatcacatcatatgtttcctttcagcggcatctggaggtagcagaagtagcagcagcccactggtggtagtgtctgtgaagtctcccaatcagagtctccgccttggcttgtccagattagcacgagttaaacctttgcatccaaatgccactagcacctgagtgtggtacaggaggaatgtttggttgggagaatcacagctttacaagggtgtttatatttgatttgtgtttatatttgaggcaggtattgtaatataaaggaatccattaccatgtcctataaatgacctctagccattttatgattatgttctctgtaaaactcttcaagacttcaatgagaagtttgtttataagaattatcttctcatacctttccttgtgaagagcgtattctgtttttctatcagttcgacatgaagtccacatcacatgctgttcttttctagttacatgatgtgcctttctagctttgtctagtttatagcaccttaactttaactgttcagttttatctggcagaggaaaacattcttatttctttcagaagacatttctgaaatcttataagctacttaagctacgttgtcagttttatcgcaaagatgttttgtattttagccaaatctttttatagtacaaacttagaattattttacacactaaaatggttgcagttttatggcatatgtctccgatttagatggttattctctagaaaatagtatttaaagacattttatgaaatcttcattgtcaaaacctttaataaaagtggaaatattttgaaatgccctttttcttgataccactcatccacgtgttcctgattgtccacatttcatgataaaatgagagctccgcagagaatgttagcctttctgttgtaaatgtaatcttcaagtagtcactttttgttaagttctttagaaagtagttgtcaagtacttagtcatccctattatgatatgagatagtacagcttttcaggaagcttagatctgaatttactttgaaaaacaattgtaatgaatattttatatttacattgagaatttcaactagcttctgatcaatttttaataaaaaattttcaaatcatgttagctgttaaaaaatgtataataactcagtttttcttggtttatggaaatatctatattaatgtgaaaataattaatttagaattgtgattaaagtgagcatttgtctattgctgttgtacacttcttttatctaacgtatatttttatagtgtcatataccagccccctaacctgccccacctgtcccctttttaaaaacatattttccagttacatagcactgaggtactctatttggtgtagatcaacaataaacataagagcctactg

SEQ ID NO: 8180 - DNA, 1130 bp, Homo sapiens
ttcattgaagagtctgaaattagggacttatttcaaatgtgaacatggctaatcgaggcgcaagcaagaccctatggctcaaatactggaaataaaatatgccagttcaatatgccagtatttctgggagagtctgctgttggcaaatcaagcctagtgcttcgttttgtgaaaggcccatttcatgaatttcaagagagtaccattggggtaactctcaaagtgataaaagctgtttctttgtgaaatatgggcccaaaaagaaaaccaactgctagtgttggtgatggaagtgaagaaaaaatggagagatctaagagtggtggttcttagccagaaaatagacgttttggataaattaaagtggttttacagattcagctgattttctaacccaaaatgtgtgtcttgatgacactacagtatagtttgaaatacaggatacagctggtcaagaatgataccgtagcctagcaccaatgtactacagaggagcacaagcagccatagctgtatatgataccacaaatgaggagtcctttgcaagagcaaaaaattgggttaaagaacttcagaggcaagcatgtcctgatattgtaatagctttatcaggaaacaaggctgacctagcaaataaaagagcagtagatttccaggaagcacagtcctatgcagatgacaatagtttattattcatgaagacatcagctaaacatcagtgaatgtaaatgaaatgttcgtggcaatagctaaaaaattgccaaagaatgaaccacaaaatccagaagcaaattctgccagaaaaagaggagtagcccttactgaacccacacaaccaaacaggagtcagtgttgtagtaactcaacctccagtttgcactagctagaatagtcttctgcttcttaaatgttaataacaatggaattggaccatttaaccagcccagtatgacttccaaaagagacttatgatagagtcaagtttctaatgcagaattattttaagtgttttgaacttaatttttaataacatgcatgggtccctcttactaatgtttcagcaatagggaaaaatgagaactgtgtgtatacttgtttcattggaaggttagggggaataatttctcatc

SEQ ID NO: 8181 - DNA, 1237 bp, Homo sapiens
acctgtatggactaggactataggaaaacctggaatttgagcattaaatttggctctgagcttactttcccaccctgaaagttctccaaggaaaatgcttgtgcagctgactgccaacccccccagattcctcacgtcccgcacccttctcattatctggcctgcatctctcctgcttcagcaccttctgactcgtttggcctcctggatgccattctccttgtcatttttcttggactgggtgacccatgtctctccctttccctcagccttccttcagatcaaaccaccctgatcctcatgtttcttcctatctcctagatatttggcatgatcttcagtatgatcttgtgctgtgctatccgcaggaaccgcgagatggtctagagtcagcttacatccctgagcaggaaagtttacccatgaagattggtgggattttttgtttgtttgttttgttttgtttgttgtttgttgtttgtttttttgccactaattttagtattcattctgcattgctagataaaagctgaagttactttatgtttgtcttttaatgcttcattcaatattgacatttgtagttgagcggggggtttggtttgctttggtttatattttttcagttgtttgtttttgcttgttatattaagcagaaatcctgcaatgaaaggtactatatttgctagactctagacaagatattgtacataaaagaatttttttgtctttaaatagatacaaatgtctatcaactttaatcaagttgtaacttatattgaagacaatttgatacataataaaaaattatgacaatgtcctggactggtttttgttttgtttaattattttgagagctatttggtttgcaaatgtctttcaactcctattaactccacctgcatttttttttttttttaagacggagtttcgctcttgttgcccaggctggagtgcaatggcccgatcttggctcaccacagcctccacctcctgggttcaaacaattctcctgcctcagcttcctgagtagctgggattacaggcatgcaccaccacacccggctaattttgtatttttagtagagacggggtttctccgtgttggtcaggctggtctcgaactcccaacctcagttgatccgcccgcctcagcctcccaaagtgctgggattacaggcgtgagccaccgtgcccggccccacctgcatttatatgagaagtagattgggaggtt

SEQ ID NO: 8182 - DNA, 1210 bp, Homo sapiens
ggctgatttgctagtcccttgtaatttgtctgaaaaactcccacagtagggcaggacaacgggggaggaacccgggcatctgccagccggttctcctcggtctcagagctgcttctgcggccttgcagtccccgcgccctgccctctccatgactgcccgtcctgggcccctcgctttccagatcccgcacccagctgtcccttgcgctctctggaactccctctgctctccctgcgaggcttgtccaagggctgaccccgggcccgccgcccttccctcggctgggccagggctgtccgcagtccgctctcccgatcgggcttccgaagaagggaggaggccggttccggccccgcggccctcacgtgctttcccggccgcccctcccgccccgcatcgaggcagacaagcctgttcctcttccctgggctgcgattgcgacaggccggcctggctcccagcgctccctgtccccgccccgcggccagctcgctccactcccacttcctgagctccgccatgggagccctggaggcccggcctggccgctcccggccctggggtgcacatcggccctgagtcccgtcccaggctctgggctcgggcagccgccgccaccgctgcccaggacgtcgggcctcctgccttcctcccaggcccccacgttgctggccgcctggccgagtggccgccatgctcctgccttgggccacctctgcccccggcctggcctgggggcctctggtgctgggcctcttcgggctcctggcagcatcgcagccccaggcggtgaggaaggggcctggtaggagtgggcgagggtgggcaagagggatctgggcagccgtcgctccattccctctgccctcccaagctgacccctgactaattcttctctcctcttctccatctccctttgaaggtgcctccatatgcgtcggagaaccagacctgcagggaccaggaaaaggaatactatgagccccagcaccgcatctgctgctcccgctgcccgccaggtgagaggcaatggcaggacgaacctgggcctcggaagtgggtcacgggggctccagccccctcgcggcctcagagggaaggtgggcactgtcccccaggaaaactggctgctggagacgagcgtgggaaaccctggacatcacgtggaggagatgggactggccctccccactgggcctcctctttcct

SEQ ID NO: 8183 - DNA, 1154 bp, Homo sapiens
tcgtgatccacctgcctcggcctcccaaagtgctgggattacaggcatgagccaccacacccggccaactctatcatatttttatgatatatttaggttctttgtcagcatcacaactggttgaaagttggtaatcttgaaggaaggagtacctaactggggtcagcaaagcaaagcaacttgttatagaaagtaatggctagaataaagaaaaccctgactttgggagcagtagggatagaatgaatgaggcagggctctgatacaattggattcagacagctgctttcatcatctcaaactcttcctttctcagtttggttactggctgttgctaccgccttctggagaatcccaccattaatcaccagaagaaccgccccactcgggaagccataacacacctgcttggtgtagccttgacccgttataaccatatgctcagtaagttaccagtcgctttgccccgccttttttgtattgcccataatttctcatgtttaatgcttccacaggtgctacagtgaagatcatccagatgctgcagcactttgaacacctggcacctgtactggttgcagccgtgagtctatgggcaactgactatggaatgaagagcatagtgggagagattgtaaggtgactcttccttctcgaagtttctcatgcttattttccttggggagggaataaagaaagattggaaatacattatctgtgcaacagtagattccttcagatattagatacctgtcttaccttcccttactgggaactgaataattgatctatgttgctatggctgtgttttcttccctgtgtagagagattggacaaaagtgtccccaagagctgagtcgagacccttcagggacaaagggctttgcagcattcctgacagaactagcagaacgtgtcccagctatcctgatgtccagcatgtgcattttgctagatcacctggatggagaagtaggtggtccactaggggtcactgagctttttctggggattttaagtccagtgttgaaaggctgtttcttaacagaacaagaaagtagctttgacaagttgtctagatttatcattgtgacatttcctttctgtagagaagcaggtcaagtttgttgaataaggagctctttattaatctg

SEQ ID NO: 8184 - DNA, 1066 bp, Homo sapiens
tgtggcttccttcccctagaggaaagccagaaattgtgggaagcaatttagacacactggtgagcatagggctggatgagaagtttccacaggactacaggctggcccagcaggtgtgccatgccattgccaacatctcggacaggagaaaggtatgtgggggtggttccaaactaaggagagtggagattctcgtgtccaccctgtacacacacccacgttgtcttgctctccacagccttctctgggcaaacgtcacccccccttccggctgcctcaggaacacaggttgtttgagcgactgcgggagacagtcacaaaaggtgagctctcagggaaggccttgggcagaattgggccctttgttgcagtaaacaacttctccctcctcctctgcaggctttgtccacccagacccactctggatcccattcaaagaggtggcagtgaccctcatttaccaactggcagagggccccgaagtgatctgtgcccagatattgcagggctgtgcaaaacaggccctggagaagctagaagagaagagaaccagtcaggaggacccgagtaagtgggcaggggttgacccactgcggcagccagcttctgttctccctgcagggccaggagccactgccaccaccactatctgcaacaacccttagtgtacactgtgtcgtttttgtctaagttgaagttgggccagttcccacccccaactcttactacttcactagtttgaatagcacgtgagcaaggggaagatcagtaaaaatcggattcaggtttgatgggacttaaaaatgtctctttgccccaccttccctctccctctcctccagaggagtcccccgcaatgctccccactttcctgttgatgaacctgctgtccctggctggggatgtggctctgcagcagctggtccacttggagcaggcagtgagtggagagctctgccggcgccgagttctccgggaagaacaggagcacaagaccaaagatcccaaggagaaggtgtgtgaatgtcctcagcacttcccagatttatttcatacctcagctcag

SEQ ID NO: 8185 - DNA, 1128 bp, Homo sapiens
gtctccacttcccattgtccggtctaacctcatggttgccactggggatctggccatccgctttcccaatctggtggacccctggactcctcatctgtatgctcggtaagagacccctcacaacgtggtggcagttcccaggagccccggagtctgttgagagtcagtgtgagaatcaccagggctcttcccctaggctttggcatcaccgcgaacatctgcttgatacttgacctgtacaggcccctggctaagagtcaccccagtgggactgacacttctggttagaagcttcacctctttcccccactccagctttcaactctagacagctttctgactgcttctggagtggcagagcatgggataattgattcctgctgagggccttttctaccagtgttagggtgtagcccggaggtctcggtccccatgacccgcaattccattcctagtctccgggaccctgctcagcaagtgcggaaaacagcggggctggtgatgacccacctgatcctcaaggacatggtgaaggtgaaggggcaggtcagcgagatggcggtgctgctcatcgaccccgagcctcagattgctgccctggccaagaacttcttcaatgagctctcccacaaggtgagaggcagagaggcactgagggctggctgcagagggaatctgtaggtcacctcatctccttaacatggctctctctgtcttacagggcaacgcaatctataatctccttccagatatcatcagccgcctgtcagaccccgagctgggggtggaggaagagcctttccacaccatcatgaagtattgctccccgggccctggggcacattttccacatagcacgggcttaggaatcagacacacctgtatttgaattccacctcggctactctttagctgtacagccttcggcaataacttagcctctctttgtgcctatttcctcttcttttgaggctgatgatacttaacccttagttcttgaaaatattaaatacgataaagttcctaacatggtggcagacatacagtagcactcactccctagcagctgctcctgttaatttccattcacagtgaaaattcctgagccgggggcggggtggggtccct

SEQ ID NO: 8186 - DNA, 1694 bp, Homo sapiens
catcagccaagaaaccatccactggtacgtaaggcagcctgtgcgggcgagaccagactgggccctcccctcctgcagtgatttgtttcttcttcttttttaaatcacgttttcctgccttttctaggttctaggtaccagcctctggcttctacagcctcagacaatgactttgtcacaccagagccccgccgtactacccgtcggcatccaaacacccagcagcgagcttccaaaaagaaacccaaagttgtcttctcaagtgatgagtccagtgaggaaggtatgatgctcccgcctgttcccggccgagaaggcacacagctagggtgcagagggctggtttccataggacctgctgcgggggcctgagtgtagatgctctgccccactgccgcagaagggcctctcctgtacagcttggattttatttcttctgtgcggtgtgggattgtctcacttgttctctgatatctattttttcaccatctttgtgactcagctttttcttattcctttaattctttgcatagatctttcagcagagatgacagaagacgagacacccaagaaaacaactcccattctcagagcatcggctcgcaggcacagatcctaggaagtctgttcctgtcctccctgtgcagggtatcctgtagggtgacctggaattcgaattctgtttcccttgtaaaatatttgtctgtctcttttttttaaaaaaaaaaaaggccgggcactgtggctcacgcctgtaatcccagcactttgcgataccaaggcgggtggataacctgaggtagggagttcgagaccagcctgaccaacatggagaaaccccatctctactaaaaataaaaaattagccgggcgtattggcgtgcgcctgtaatcccagctactcaagaggctgaggcaggagaatcgcctgaacccagaggcggaggttgtagtgagccgaaatcacaccattgcactccagcttgggcaacaatagcgaacctccatctcaaattaaaaaaaaaatgcctacacgctctttaaaatgcaaggctttctcttaaattagcctaactgaactgcgttgagctgcttcaactttggaatatatgtttgccaatctccttgttttctaatgaataaatgtttttatatacttttagacattttttcctaagcttgtctttgtttcatctttcacattagcccagtttcatgcagcagagagagggttatcagtgcagagagagatgagtgagcccagagtcctagggcctgtcccgggatggcagatgagcttcctgccccgtcactgccacctttcccctctcaacctctggaccctgcacagtgaccagacagcctctctggggagaattatgcagtgcctaggctccagatcagtgcttctgaaccgggggcaattttgtctgccagaggacatctgacaacacctggggcctgttttgttgtcatagcctataggggaagaatgctaccagcatttgtgggaagaggccagggatgtggctcaacatcctgcagtgcacaggatggcccctcaacaaagaatcacacggcccacaatgtcaatagcgtcacagttgagaaaacctgctctagaccaagggttgctttctgccgtgtgcctcaccccacccccactcgtgttccctaatcccatctccaaaggt

SEQ ID NO: 8187 - DNA, 1127 bp, Homo sapiens
ggtagctgttccccgcaaggagagctcaaggtcagcgctcggacctggcggagccccgcacccaggctgtggcgccctgtgcagctccgcccttgcggcgccatctgcccggagcctccttcccctagtccccagaaacaggaggtccctactcccgcccgagatcccgacccggacccctaggtgggggacgctttctttcctttcgcgctctgcggggtcacgtgtcgcagaggagcccctcccccacggcctccggcaccgcaggccccgggatgctagtgcgcagcgggtgcatccctgtccggatgctgcgcctgcggtagagcggccgccatgttgcaaccgggaaggaaatgaatgggcagccgttaggaaagcctgccggtgactaaccctgcgctcctgcctcgatgggtggagtcgcgtgtggcggggaagtcaggtggagcgaggctagctggcccgatttctcctccgggtgatgcttttcctagattattctctggtaaatcaaagaagtgggtttatggaggtcctcttgtgtcccctccccgcagaggtgtggtggctgtggcatggtgccaagccgggagaagctgagtcatgggtagttggaaaaggacatttccaccgcaaaatggcccctctggtggtggccccttcctgcagcgccggctcacctcacggccccgcccttcccctgccagcctagcgttgacccgaccccaaaggccaggctgtaaatgtcaccgggaggattgggtgtctgggcgcctcggggaacctgcccttctccccattccgtcttccggaaaccagatctcccaccgcaccctggtctgaggttaaatatagctgctgacctttctgtagctgggggcctgggctggggctctctcccatcccttctccccacacacatgcacttacctgtgctcccactcctgatttctggaaaagagctaggaaggacaggcaacttggcaaatcaaagccctgggactagggggttaaaatacagcttcccctcttcccacccgccccagtctctgtcccttttgtaggagggacttagagaaggggtgggcttgccctgtccagttaatttctgacctttactcctg

SEQ ID NO: 8188 - DNA, 1226 bp, Homo sapiens
ctggaattacaggtgtgagccaccacgcctggcctataggcagtgatcttttaatacaaggttcaactaggacttgagtaaaggccaagttatattaagtaatgggaatttaggtaatctgctcttaggcactgacctaattgtgtggagctcctgcccaggaaatggcaattctcatattttaatatgagaatattaaaatatggtgataaggcccattttctgacaccatctgtttaattttaaccccaggaaattctgaaacagccacacctacaaatgtagacttgcctcaggtcatccccaagtctgagaacagcagccagccagccaagaaagccaagggggctgcaaagacaaagcagcagctgcagaaacagcaacatcccaagaaggcctccttccagaagctgaatggcatctccaaaggggcagactcagaattgtccactgtaccttctgtcacaaagacccaagcttcctccagcttccaggatagcagtcagccagctggaaaagccgaagggatcagggagccaaaggtgactgggaagctaaagcaacgatcacctaaattacagtcctccaagaaagttgctttcctcaggcagaatgcccctcccaagggcacagacacacaaacaccggctgtgttatccccatccaagactcaggccaccctgaaacctaaggaccatcatcagccccttggaagggccaagggggttgagaagcagcagttgccagagcagccttttgagaaagctgccttccagaaacagaatgatacccccaaggggcctcagcctcccactgtgtctcccatccgttccagccgccccccaccagcaaagaggaagaaatctcagtccaggggcaacagccagctgctgctatcttagatggttgaaaactagacgggtggctcactgccattgtcaccaggttggaactcttgcctctgtgaggatgccttctctactgtgcatacccatgaaatttaatacacattttaaaacctctggccactgagtatttttgagggaactgggtgctgcctttgccgctttaagggtaaagatgggaggtgggactgggatcttctgaggagagggaatggttgggtgctactgagaaataaggtcagttttaggctcctgcatccttgggttttcccaggaagggaaagccctggagtcagagctaggggtgattgaactccgggg

SEQ ID NO: 8189 - DNA, 1437 bp, Homo sapiens
cagttctgaaacagctggaagaactgctgagtgacatgaaagctgatgtgactcgactcccagctaccattgcccgaattcccccagttgctgtgaggttacagatgtcagagcgtaacattctcagccgcctggcaaaccgggcacccgaacctaccccacagcaggtaggaccattttcttcttgacaccacctcttcctgcagaaccattctggagcttgtaactttgctgtatgtccctagctttacatactgggtgggtggcctatcagtgaattcccttgagattgggtggattcctatcatctggaattctgactcctcgggtctccttctctaggtagcccagcagcagtgaagatgcagactgataccacctccaccgctgagcagtgaccttcctcactttctcttgtcccagcttctcccctgggggcctgagagaccctcaccttccttctgcccatcttccatgttgtaaaggaacagccccagtgcactgggggaggggagggagtgaggggcagtggtgcccttcctgcagaagagacatgcagcagtagcgctggcgccatctgcaggagctggcgggctggccttctggaccctggcttctccccactgtaacgcctgttacacacaaactgttgtgggttcctgccaggcttgaagaaaatgatctgaattttttcctccttttggttttattttgttggtttattttgtgttttcttttctcctttttggggggtattcagagtgggctgggcccctgggcgagacacagctacctctgttggcatctttttaataccaggaacccagcggctctagccactgagcggctaaatgaaataaagtggaaaaaaaaaaaaaggaaaaaaccaaaagcataaaaaaccacagcaaatttcttgatgaaaattgaaaataaaagtttccttgtattttagtgctctggttcagtgtgggtgtaggtgcaggtggatgagtgtgtgcggcaggagcctggcacctgtatagttgaaaattaagggctacgtggtgtcctgataccccactgagtaactgggttctgtgtgtgggtgcagtatgtgccttgccaacgttgacttccacctgtggaaaatgagaggctgcaaaactgcgggcaccgccgcttaatggctctgtgaccttgagcaagttgtttaactttggtgggatgcagatatctcatgtatacctcatacggttgtcaagttaaaccagtgaagtacatggaacggttttaacacctaaccactaccttaatgttagtttctaggaaggctgaggggggttttcttgctaagttgtgcaaaattgggatgcaatttgtggaagaacacagcctcaatcccacacccccggaggcccgacctaacgtcctccaaccttgaaacccttgtagttc

SEQ ID NO: 8190 - DNA, 1140 bp, Homo sapiens
gagaaggggtgtaggtggatggattcttgtagcatacagtgttctgggtaagggcgatggtgctgggctttggctggagctgacatttttcttccccatattctgtagaagagaagaaagaagaagaagagaaaaaagaggtgatgcttcagaatggagagacccccaaggacctgaatgatgagaaacagaagaaaaatattaaacaacgtttcatgtttaacattgcagatggtggttttactggtatggaaatgaggggcccaccagggttagaaggatctgatgtgaaattggggttcttgtcagaaaccacggtacagggactttacctctttacctctgtttgatgagggaatgccaaactgatagtgggttctgtggagaaagccagaagcaaattatatgaaatggatccaggggtaggggatggtgggggacaagaataagtagctttttcaattctcacagatgtttgcttccccccacccccaaccttccctaaattcctcctcagagttgcactccctttggcagaatgaagagcgggcagccacagttaccaagaagacttatgagatctggcatcgacggcatgactactggctgctagccggcattataaagtatcctttgcctgaatctgtactgaggcttttggtgaaaggttctgaaggtcttttagtttgaggttcttactttccttgttttgtttttcctgagcacttttccaatagccatggctatgcccggtggcaagacatccagaatgacccacgctatgccatcctcaatgagcctttcaagggtgaaatgaaccgtggcaatttcttagagatcaagaataaatttctagctcgaaggtttaaggtgagcggttggggaggaatatattgcttaagtgacaaacttgaaagtgcgtaacgtcctgcagcagagggagtctgtccatccagcgcactgttctcactttcttcattctatggaaggctttgctcccaagtaacttacacattagggttgaagacacacagaattgaaagttaactaactgtacatgagctgtaggtgactatgtgtccaatcagtgacacactagtgcagaggggtttgtttggggaacactgcagattggagtat

SEQ ID NO: 8191 - DNA, 1194 bp, Homo sapiens
ctgcagacagttggtaagcttttatgaagtttatgaagaatagaaaggcttatagtcatcctctccttccttctctcttatgaaaatcttttacagtacttcagaagtttctccattctgccttgctaaggctctgacctcttttctttttgctatctttcaattgtatatgcatcagtgcaaggggttagaagaaagcattctgtctcttcatccttacctgtgataatagctctatcccatgtttttcttgagttatgctgactgctaatctatatgtaattatgaggagctgtgtactctcaatcaaatttcttctaagttcttaggtccaaacaggcacaccaagtatttaagagtccagtcatgaaaaggagctagcagagtgggaactgtgaggaccaggggtagctggtggtgctgacttcagcactcctgagtcctggccctccctctgtcccaggaggaagaggaggtagaacgggaaatcattaaacaggaagaaagtgtggatcctgactactgggagaaattgctgcggcaccattatgagcagcagcaagaagatctagcccgaaatctgggcaaaggaaaaagaatccgtaaacaggtcaactacaatgatggctcccaggaggaccgaggtgtgtgtggccggccccgccccccacccatgggccgttccactagagcagtgggccccgctcatctgccctctctccctccagattggcaggacgaccagtccgacaaccagtccgattactcagtggcttcagaggaaggtgatgaagactttgatgaacgttcagaaggtgagggctgtgctttttttgttgcttttctaaatgttgctttgtttaatatcctacctgtgtcactcattcatctttttcttcttgcagctccccgtaggcccagtcgtaagggcctgcggaatgataaagataagccattgcctcctctgttggcccgtgttggtgggaatattgaagtaagtgccatacgattctaaggaggggtgagtgtcagatattgcatctttggtggaatgcgacctgctgcctctcacctgggtttcttcttcccctaggtacttggttttaatgctcgtcagcgaaaagcctttcttaatgcaattatgcgatatggtatgccacctcaggatgcttttactacccagtggcttgtaag

SEQ ID NO: 8192 - DNA, 1202 bp, Homo sapiens
cactgcccccggcttaattttttaaactacatttatgaattggaatttaggagacacttctaatggtgtttttggttcttttattagcaccgggtgctcagcagttctgcttcttgctttccactcgagctgggggccttggaatcaatctggccactgctgacacagttattatctatgactctgactggaacccccataatgacattcaggtgagcagaggcagcaggcagccttaataagtaacatgttatgctagaaaggcatagtggcctctatgagggctccaccatctggaattaggtttttaagtgagaaacaacagattctttttgtgttgtttaccttattgtaagccagagtttggttagctgtgatcctattttgggtaacatgataatagagggtggtgtctggaggcaggggtgcaaaaggaagtttcctatgaatgtaggctgtggaccttgccttgtactgaatttagaatattatgtggaagtcaggataagagtggcaccaggaaaatacaatttctggctttatttcctgttcaactccaggcctttagcagagctcaccggattgggcaaaataaaaaggtaatgatctaccggtttgtgacccgtgcgtcagtggaggagcgcatcacgcaggtggcaaagaagaaaatgatgctgacgcatctagtggtgcggcctgggctgggctccaagactggatctatgtccaaacaggagcttgatgatatcctcaaatttggcactgaggaactattcaaggatgaagccactgatggaggtgaggtagtcaggaacttacgttttggtgtggggcttggcctctctaaaggttagggagaatctttgataccaagggtcttgtgggacttgctttttccactgcagctgctgaaactgactttggggatgtgggcccttgattttttataggaggagacaacaaagagggagaagatagcagtgttatccactacgatgataaggccattgaacggctgctagaccgtaaccaggatgagactgaagacacagaattgcagggcatgaatgaatatttgagctcattcaaagtggcccagtatgtggtacgggaagaagaaatgggggtgagtatgaatccaaggcaatcctgtgcttggtaattggtctgaaaattggcattgagaccaaggtggtatttga

SEQ ID NO: 8193 - DNA, 1129 bp, Homo sapiens
cgtggatgaagcccatcggctgaagaacaatcagtctaaggtgagggctgagggagggatgttggagcccccactttgggttttttctagtactaccaattcattaaggggaaaacttgtagatggagaggagaggggaaaattgtctctgccttccttccttgtatgtgacagcccttggtggccaggcctttaaaaagaatgtgaggagtgggatgcttaactattgggcagtgaaaaacttgaaattttgtagagatttgctagagctctgttttcattggatttcacctttctccatctgcttcaccagttcttccgggtattgaatggttactcactccagcacaagctgttgctgactgggacaccattacaaaacaatctggaagagttgtttcatctgctcaactttctcacccccgagaggttccagtaagtatgtgtttatctgtaatcggctcataattgtgcctctcattcttcctgttgcccatttcctgtatcacttttctttcttcctttctccttctccaataacttttttcctttttctttctgaagcaatttggaaggttttttggaggagtttgctgacattgccaaggaggaccagataaaaaaactgcatgacatgctggggccgcacatgttgcggcggctcaaagccgatgtgttcaagaacatgccctccaagacagaactaattgtgcgtgtggagctgagccctatgcagaagtgagttgggagggacagaagcagactccatttagacatctgccagtctgcagagtgtttcctattcctcccccactcagcttcaaggcatctggtgacaggagcaagcaaggcctgaagaaacctgatgctagggcgctggagcgcatagttcttacttattttaggttatacctttccttatttaaaatggtggtggtggtagtgcttgtgcgttaggtgtccttagttccaaagtgggatgtgttggaagaaagatctcagttgttggcactgcattattagtcattgaaaggctctcaagtctaacctgtctttctaccttgcccatgtaggaaatactacaagtacatcctcactcgaaattttgaagcactcaatgcccgaggtg

SEQ ID NO: 8194 - DNA, 1103 bp, Homo sapiens
cactgctccaggtctgaaatgagatctgaatcgtcctttgatgaagttgagactgtgggctgtcccttctcctcccatggttatgatttgagattaagttgtctctttttctctcagtgtccagctctgaagggcaaagtgcagaagatcctaatctggaagtggggtcagccaccatctcccacaccagtgcctcggcctccagatgctgatcccaacacgccctccccaaagcccttggaggggcggccagagcggcagttctttgtgaaatggcaaggcatgtcttactggcactgctcctgggtttctgaactgcaggtaagtttaggatagtctggagatgtaggggctacgatgaagaggatagtgacaaaagagccttgtggatagaaggaatgaacacagcttcttggtggctgattttctctttccgctcaaagctggagctgcactgtcaggtgatgttccgaaactatcagcggaagaatgatatggatgagccaccttctggggactttggtggtgatgaagagaaaagccgaaagcgaaagaacaaggaccctaaatttgcagagatggaggaacgcttctatcgctatgggataaaacccgagtggatgatgatccaccgaatcctcaaccacaggtaccagctgagcacacgggagacgggcagtctccgtgggagagtcctgctaaagagattgggaaaatggctgtcaccagtaacttagacttggaagacactggttttttttgtttgttttttgtttttgagacagagtctcactctgtgcccaggctggagtgcagtggcgtgatctcggctcactgcaacctctgcctcccagattcaagtgattatcctgcctcagcctcctgagaagctgggactacaggcgcaagccaccatgcccagctaattttttgtatttttagtagagacagggttttcattctgctggccaggctggtcttgaactcctgacctcaggtgatctgcctgccttggcctccctaagtgctaggattaacaggcgtgagccaccacgctcagccttatatatttattttgagacaaattttagctgtgttgccca

SEQ ID NO: 8195 - DNA, 2120 bp, Homo sapiens
attgatcttttccctgcctaccactctttgccaaatatatgtagaaaatgaagaggacccagaagaggatttgtcagaaacagagactccaaagctcaagaagaagaaaaagcctaagaaacctcgggaccctaaaatccctaagagcaagcgccaaaaaaaggaggtgagtgggtgactgaatgttacggggaatcagaggaagaagggaggagctctgagaagggttgaagggctgagggcatttgtttctttctcagaagtggtgggccatgttctggggatgagcctcagggctgtcctgaggtcagcatgtgtgtagcatgtgtgtgtctgtctccctcttccccccttgccctgctccagcgtatgctcttatgccggcagctgggggacagctctggggaggggccagagtttgtggaggaggaggaagaggtggctctgcgctcagacagtgagggcagcgactatactcctggcaagaagaagaagaagaagcttggacctaagaaagagaagaagagcaaatccaagcggaaggaggaggaggaggaggaggatgatgatgatgattcaaaggtgcctggacctccatcctcttctttgtactgttaaacttttgtctttttgtttcctagacaccttactgccctttagaacactttctcttcttttcctcttaactctgttactctgatttttccacacaaatttgcttagcaagtgtgggcactaggtggcaggtacttacttgactttgctctttctgcaggagcctaaatcatctgctcagctcctggaagactggggcatggaagacattgaccacgtgttctcagaggaggattatcgaaccctcaccaactacaaggccttcagccagtttgtcaggtaaaacagaaggggtttggggaagggggaggagaatctttctgttctctcttcttacttctctttctttttttattcttaaacctttccctctgctcttgtgcatttctccaccagacccctcattgctgccaaaaatcccaagattgctgtctccaagatgatgatggttttgggtgcaaaatggcgggagttcagtaccaataaccccttcaaaggcagttctggggcatcagtggcagctgcggcagcagcagcggtagctgtggtggagagcatggtgacagccactgaggttgcaccaccacctccccctgtggaggtgcctatccgcaaggccaagaccaaggagggcaaaggtgaaatggggttcaaatgggagtgggggtgtctagtgtgggcttaagatgtcaaagacagcatgggaatgctggtctgtcagccctaaggtaggagataggagggaggaatgagtcttggattttggagggaaatttgggaatctgaatgtggggaagcaagcttaggtggagaagattttattttccccatctttggtcttgtggtatatatttggatatatcctgattttaggtcccaatgctcggaggaagcccaagggcagccctcgtgtacctgatgccaagaagcctaaacccaagaaagtagctcccctgaaaatcaagctgggaggttttggttccaagcgtaagagatcctcggtgagagcccagcccatcgctttagggagggtgccatgtctaatagaaaggatgtgaccttctatcagaacctgtccttcatagtaggcacgtaagaatgtggggcgtttcccacagaacaagatgagactaggctccctgtataacggtgcttgctgggattctggtgtccccagtgagagagtactcccctctctgccactctgtccttccccttggcttgaacgtctaaccttattctttttcatcctgccagagtgaggatgatgacttagatgtggaatctgacttcgatgatgccagtatcaatagctattctgtttctgatggttccaccagccgtagtagccgcagccgcaagaaactccgaaccactaaaaagaaaaagaaaggtgtgtttctcttctgtatatttgtgatgggatgaggtgggagtgattggggaagaatctccctaaggagataggggtcggggggtggggggaggtagtttttttccaataa

SEQ ID NO: 8196 - DNA, 1234 bp, Homo sapiens
cctgtccccacccttgtgcactcacatgaaagccttgcacactcacctccaccttcacaggccatttgcacacgctcctgcaccctctccccgtccataccgctccgctcagctgactctcatgttctctcgtctcacatttgcactctctccttcccacattctgtgctcagctcactcagtggtcagcgtttcctgcacactttacctctcatgtgcgtttcccggcctgatgttgtggtggtgtgcggcgtgctcactctctccctcatgaacacccacccacctcgtttccgcagcccctgcgtgctgctccagaggtgggtgggaggtgagctgggggctccttgggccctcatcggtcatggtctcgtcccattccacaccatttgtttctctgtctccccatcctactccaaggatgccggcatcaccctgagggctcccccttgggaatggggtagtgaggccccagacttcacccccagcccactgctaaaatctgttttctgacagatgggttttggggagtcgcctgctgcactacatgagaaagggactcccatttgcccttccctttctcctacagtcccttttgtcttgtctgtcctggctgtctgtgtgtgtgccattctctggacttcagagccccctgagccagtcctcccttcccagcctccctttgggcctccctaactccacctaggctgccagggaccggagtcagctggttcaaggccatcgggagctctgcctccaagtctacccttcccttcccggactccctcctgtcccctcctttcctccctccttccttccactctccttccttttgcttccctgccctttccccctcctcaggttcttccctccttctcactggtttttccaccttcctccttcccttcttccctggctcctaggctgtgatatatatttttgtattatctctttcttcttcttgtggtgatcatcttgaattactgtgggatgtaagtttcaaaattttcaaataaagcctttgcaagatactcgagtcccctggttctgccttctgacccccgtagagaggaggagaggggtgggcagctaggaggaggcacaggatgaggtggggaccccctctagacctaagtcacctgccctcctctgacctggagctgggggccaactggggctttaacttgggacaaaatggaagggagccatcctgacgaggagcagtggtacaaga

SEQ ID NO: 8197 - DNA, 1142 bp, Homo sapiens
tgctaaagtaaaggtgagtggcagtcccccagtcctacggtctagagcatccttttgtatgtccttgggagtccacactaggacagcccttgtctagaccgtggctgcttcctgccctcccctcctccaaggtctgtatataaactccattagcaactgtttaggctgatagtattcttagttttctgtgttgtttttattttttaatcaacttaagttctaaataaacatcttctgtggttttggtcaaaatagcaactaggatgttgttcaggtgtcgttcaacaataccttcttccccactgctggaaacagggctctcctgatgaagtgctaggcttctctttgttaggataaaacatatatattctagaagtatctctgtattcctgttaggctgttttttgtctaatatcaccacccacctccccagcctgcccagtctgcaacctcgcaatagttacttgactctcagttgtccttgggatttaatttaaaccaggctctctattgagagatacctccaaaggaatgcccgttgcaggtaggcagagtataaatgataaacagtaactccacacctctcccacttctgcttactcccctgtatcaagctgatcttgactaaggactgggtgataccctgagctgtggctaaaggagtgacacccaggcagatgtcattttctccttctgtggtgtgtcaggggtgagggtgttaggggagcattttgtattttatttaagattgtccttctaatgatgctgtttttgaagtgggaatacttttatttattttgctttagaaccagcctcttagaggaagtgatttaggaatgggagtggagggcaggtgggctagggcagggggaaaaggagggaagatttttggaagcccttctctactacggagcgtcacaaatcctggcctgatctccgcggccccagtgtatcccatatgcagtgttgctggaggctcttgccctgcgtaatgtgcggcagctggaagaccttgtgattgaggctgtgtatgctgacgtgcttcgtggctccctggaccagcgcaaccagcggctcgaggttgactacagcatcgggcgggacatccagcgccaggacctcagtgccattgcccgaaccct

SEQ ID NO: 8198 - DNA, 1501 bp, Homo sapiens
tcatcctggtaggttgccaaccttaaaaaaaccattaaagttacgacggcagcagcagccgcagccacatctcaggaccctgagcaacacctgactgagctgagggaaccagctcctggcaccaaccagcgccagcccagcaagaaagcctcaaagggcaaggggtgagccagggtagcaggaactgctcacttgcagggtgccctgcttttaccccagggacctcactgtcctcatttccttcagttatttgcatgggagtagggagtgggggagcctccaggggttaggggattccctgcattctctctctctctctctttctctctcttctccttgccaggctccgagggagcgccaagatttggtccaagtcgaattgaaaggactgtcgtttcctccctggggatgtggggtcccagctgcctgcctgcctcttaggagtcctcagagagccttctgtgcccctggccagctgataatcctaggttcatgacccttcacctcccctaaccccaaacatagatcacaccttctctagggaggaggcaaatgtaggtcatgtttttgttggtactttctgttttttgtgacttcatgtgttccattgctccccgctgccatgctctctcccttgtttccttaagagctcagcatctgtccctgttcattacatgtcattgagtaggtgggtagccctgatgggggtcgctctgtctggagcataacccacaggcgttttttctgccaccccatccctgcatgcctgatccccagttcctataccctacccctgacctattgagcagcctctgaagagccatagggcccccacctttactcacaccctgagaattctgggagccagtctgccatgccaggagtcactggacatgttcatcctagaatcctgtcacactacagtcatttcttttcctctctctggcccttgggtcctgggaatgctgctgcttcaaccccagagcctaagaatggcagccgtttcttaacatgttgagagatgattctttcttggccctggccatctcgggaagcttgatggcaatcctggaagggtttaatctccttttgtgagtttggtggggaagggaagggtatatagattgtattaaaaaaaaaaaggtatatatgcatatatctatatataatatgacgcagaaataaatctatgagaaatctatctacaaactaccctgaactgggtatcttctgtgtttgatatttgtggatgggaagaagactcattcccaattcactcaagcacagtgctggaaaatgaagagacccagatactatttgctgagtccctggctgaggcctagatcccaagctgtatggctttggacaggttgctcagcatccattcagaagtaatggatatggctgggtgcagtggctcacgaccgtaatcccagcatgttgggaggccagggcgggcgtatcacttgaggtcaggagtgtgagaccaacctggccaaca

SEQ ID NO: 8199 - DNA, 1585 bp, Homo sapiens
taatcccattctgatttcttcctccagtaggccaccttacgcctaccggtggcttcctgggaccgtgcagaaaccaaaagagctaagggaattgccaccccacccatccctgcacgcacactcagccttcgccgctttggcccgaaaagctgtggctcgctcgcacatcggcctccaggagccaggccgcacacaggcctcatgtccgctctgtcctttccaggtgaggccgcagcgtttgatgacgagtggcggcgggagacctcccgattccggcagcagcgtcccctggagtttcggcggcttgagtcctcaggggctgggggacgaagggcggaggggcctccccgcctggccatccagggacctgaggactccccttcccgacagtcccgccgctatgactggtgagggccccgggccctcagcctctcttgtaagtatcaggagtaaggagggtggggtgcacctgcggacggtcctcggctgcaaggcaggctcagttcaggctcccgcaggagctgcctttggtagtacaagttgacatggaaagagaacaatgttctcactgacataggggattaaaccccaactcctggctcttaacgtaagttttttcttccttttgacttgtgctcctctctctttccccctccaggtacaggctgagaggctgagaaatcatcccctgaataactttttcctctcgattcccatccccaatttaatattaaattaacaggcaagccggcccccacctctccctgggggtctcagggagaacctttcacggcaccctttccctaccttttccttctttaatctcctggtttaccattgatgacttcgcctctgcatctactgacttgatttttcattctgccactccatcttcaaaccccctcacctttcccatcctactcctgccatgcattgaagggtcaatgcattttggggtgagctctgggtttaggggccccctccatccctcagctaccctggatctttgcccacctcttcctcagagcccccactgaggggccgtagccctatctagggctgtggaaggagcagactggttcctaactctctccctcctcctgcccacacacatcaaaagaatcttccctacacccttctctgcctttattttttgatttgtgcaacttgtaactaggtgtttatggaataaaggagaatggaaaaaagaccaagtgggattctggctgtacttttgatcttttcctgttcaattcaaccctgctgtctcctctgaagttaccttctcacttttcctcgtctccacctgtagtcttcgtacctcagagttcaagcccacatctccttggtacggacagaccatcagcactgccaggtgcaggccgtgagcacttggctgggctaggctggggcgtgagaacatgagcacctctctcgctggctcttccctcacattctgctgtaactttgctcttcagggatgtgttgggcatctctcatgggtgcctgcggaacttgctgccccttgccccttggacagagtttctttcctgcactctgggtggaaacacttcagataacccta

SEQ ID NO: 8200 - DNA, 1106 bp, Homo sapiens
ctcgtggttggactcagaggaatttgggagggtaatgatgaggcctgatgttttttcagttcttgcattttgtgagaaagatacaggctagaacaggcagctgaagggtgaaatcccttcaccaggggtgatgcctccccattcagccctcccctacctaccctgtcctcaggaacacatgacagctggaggcaattgccagaccttctcatcttccactgtcatctcctactccaatacgggtgatggtgcccccaaggtctaccaagagacatcagagatgcgctcggcaccaggcggggtgagttggggagccctcctgtcccagagaaggtaggattgagcggcaccgccagaaaccctggctgcttttttccggattgggttgtgtgtggtgtgtttatcctgagatggtataggcagggctttggaaggggcggctgagtgtgccacgttctgcctcatcccagatccgggagacacggaggactgttcgggattcagacagtggactggagcagatgtccattgggcatcacatccgggacagggctcacatcctccagcgctcccgaaaccatcgcacgggggaccaggaggagcggcaggactatatcaacctggatgagagtgagccttccctcccgcttcctggctggcagcccctaacccggttcccgtggacatccctaacacatagacacttctggggcaaagctctgggtcagccccatattcctttttttttttttttgagatggagtctcgctcttgttgcccaggtgcccaggctggagtgcagtggcgcgatctcagctcactgcaacctccgcctcccgggtttaagcaattctcctgcctcagcctcccgtgtagctggaactacaggcatgtgccaccacgcccagctaatttctgtatttttagtagagacagggtttcaccatgttgggcaggccgttctcgaactcctgaccttgtgatccacccaccgaccgttggcctcccaaagtgccgggattacaggcatgagccactgcacccaactgtcagtcccatattcttaccgcacttggagcctcctccgctcgggcggagtcaggtgc

SEQ ID NO: 8201 - DNA, 1186 bp, Homo sapiens
gggaagggactgactcagaggaaggtcggggagagtgctggagacaaagccctgcggtcaggagggagaggaacagaggtggaccaggaaccgtagagacagacaggaacccaggaacagtgactagatggggtggtggggtgagccctgtgggatttccagccaagagtgctcagagaccatgtggcagcccgagggaaggagggaatggagagtggagcccagcggctggatgagaggtctgcggctgaaccgtggagctgcaggatggatgacggagctggaggacaggtcgtggaactgaaggacggtgatggagctgaggagtgggaactgaagcagatgctggagctggggtaaacagggtagtgggaactaaaagacagatgatcaagatgggggccacaaatggagtgggggatggacagaggagaggaagatggatgatggaactggaggagagatgacggagctgctgtatggctgatgaagttggaggtcaggtgatgatgctggggcctggatattggggagaacaggtggggaggaccccgatctcaccaagatgggcacccctgtgagtgagtcatagagaaagacgatggcgctgaccaagttggtgacctgcagggatgtcttggcagactccgagccatccagcgaggaccgccgcttccctcgggcatcctccaccacaatggctggtacctcaaaagctggccgggtacccaaggcccctggcccacccgctttggtccccccaccaccccccactctccgggcctgccgagccctccggggccgggcccacagtgtctggtagaaggtgatggccacacagaccagacccatgacaattcccccaagtagcaagaggctgaagcaaacgccaaagccgaggccgatcttggagactatgaactggcagccgcgggcatagtagcgctcgccgttgttgtgccagccaatggagggcagtgtggagaggatgaagctgaccatccagatgcccatgacggcatgcagtgcctgcttcttggcgttgctgaggcggtagttgacgggccagcgcaccatccacatgcgatggtaggagagggaggcgaccgtgaagcaggtggccagcgccagggtgtagtaggtggacacgaagaccttgcagatactctcgttccagtcatagtcg

SEQ ID NO: 8202 - DNA, 1526 bp, Homo sapiens
cccagttatctgttgaggaacagatgccaccttggaaccagactgagttcccctccaaacaggtgttttccaaggaggaagcaagacagcccacagaaacccctgtggccagccagagctccgacaagccctcaagggaccctgagactcccagatcttcaggtacagaatctaaggcaagatgcagggaagataaactaggataatgttttgggataaggtccatgggtgagtgtgggaggaataaactgtaagtcctagttttgggtccttgctttaacgccttacccaccccaggttctatgcgcaatagatggaaaccaaacagcagcaaggtactagggagatcccccctcaccatcctgcaggatgacaactcccctggcaccctgacactacgacaggtaaaggaagagaaagtgcaagctgttactaggatatccaacgtagagggtgggagacccttttacccagatcttccctcttctgaacagcaactccccccaactcatacactgccgttttcagggtaagcggccttcacccctaagtgaaaatgttagtgaactaaaggaaggagccattcttggaactggacgacttctgaaaactggaggacgagcatgggagcaaggccaggaccatgacaaggaaaatcagcactttcccttggtggagagctaggccctgcatggccccagcaatgcagtcacccagggcctggtgatatctgtgtcctctcaccccttctttcccagggatactgaggaatggcttgttttcttagactcctcctcagctaccaaactgggactcacagctttattgggctttctttgtgtcttgtgtgtttcttttatattaaaggaagtaattttaaatgttactttaaaaaggtatatgtaaaccttgcaccgagttttctgtgtgtagaatggcggcctagagagcttgcgttccctggcctgagcccactgatgctctgagccttctttgcacatctccctttaaccatggtgtccctatggctctgtccttggccctgctctccctgggtgtttacttctagggctttagctatcacttccctatattctggtaactttcaggtctctctctctaaccctgacctttatccagctgctttataagtacttcaaagtcagtttgtctaaaactgaatttatgatcttcccccaaaagctattcctcattccctcttccctatccttgtgaatgacagcattatctacccagccaccaaacccaaaccttggccattatctcgaatccttccctcccaatgtcctatatcctagcatttggtcactaaatcctggtgattccacattttgtttgtttgcttgttttttagaggcagggtcttgctcttgtcacccaggctggagtgcagtggcacgatcacagctcactgcagcctcaacttcctgagctcaagcgattctcctgtctcagcctctccagtagctgggattataggcatgagccaccacgcctggctaatt

SEQ ID NO: 8203 - DNA, 1331 bp, Homo sapiens
taatagggtccgtgacccttgtgaggttgtgaagctcccttaaggcacatggtggctgggctgtggatttggggtatgggcagagagtgtggagagcacttccaggggccatgtctgagagactacatgatgccactttgaatgcccagtttgttcatccttttctgttttccccacttccccagatgggtgatctacaatgaccagaaagtgtgtgcctccgagaagccgcccaaggacctgggctacatctacttctaccagagagtggccagctaagagcctgcctcaccccttaccaatgagggcaggggaagaccacctggcatgagggagaggggctgagggatggacttcagcccctctgctctgtaccctttttccttttgtccccggcagcagggaagaagctggaggccgtgggagaatggctgggcagagcagaggggcagcgatagactctggggatggagcaggacggggacgggaggggccggccacctgtctgtaaggagactttgttgcttcccctgcccccggaatccacagtgctctgcttctctgtgtcgccccgcccagccccctggtgtggagggaggggtctcgtttgtgcgcgtgggtgtagctttgtgcatcctctcccagtggagcgatcacctgtgcctcccctccccctttgtttgcccctgtgtggttggtcaaggagggatgtgagggaaatagggaccccccgacttgccctcctgcctcagtctttcccccaccctgtctcttccttgtccttctctggaaaatgccaaaatacacgatgtgaataaaagtacaacggctaaattgtgtcctgtttgataccttgggggagaggcttaccttcctggggttagcaggagggcgcttaagaaaactcctaactctggccgcctccctgccaaagtcaagtctccacttttcactggttctagagctctaggaaaattggggttgggtggggaggtggagtagagtgactaaatgccgacacaaagccaaggaaagatggagtgaagaacccttccctctctttattcacacaggagtggaggatttcccaaatgtccctaactggctagctggcttcaggctgggactcagtccctgcagttcctgccaggccttgccagccggggcgagggttgggatgatcctggcggcctatgcctgtgtgggctgcccctcccgctgtgaaccctgcatttgtcccgcaagttttcactcaggtagactccctgggtacaagggtgcctgctcagcagtcgggcatgagctgctccgatgggcgaaggaggttgtct

SEQ ID NO: 8204 - DNA, 1175 bp, Homo sapiens
ggtactctgactcagtcagaaaccacactaagtgtccactggtgccagtgatttttcctcttagagaggcagaaaaggtcttacttaggccagcttcttgttctaggcccaggaagtacacgagaagctccgaggatggctgaagtccaacgtctctgatgcggtggctcagagcacccgtatcatttatggaggtgagtggctttggttcccggctgaggtggagtgggctgaggactagactgagccctcggacatggaggtggggatggggcagactcatcccattcttgaccaagcccttgttctgctcccttcccaggctctgtgactggggcaacctgcaaggagctggccagccagcctgatgtggatggcttccttgtgggtggtgcttccctcaagcccgaattcgtggacatcatcaatgccaaacaatgagccccatccatcttccctacccttcctgccaagccagggactaagcagcccagaagcccagtaactgccctttccctgcatatgcttctgatggtgtcatctgctccttcctgtggcctcatccaaactgtatcttcctttactgtttatatcttcaccctgtaatggttgggaccaggccaatcccttctccacttactataatggttggaactaaacgtcaccaaggtggcttctccttggctgagagatggaaggcgtggtgggatttgctcctgggttccctaggccctagtgagggcagaagagaaaccatcctctcccttcttacaccgtgaggccaagatcccctcagaaggcaggagtgctgccctctcccatggtgcccgtgcctctgtgctgtgtatgtgaaccacccatgtgagggaataaacctggcactaggtcttgtggtttgtctgccttcactggacttgcccagataatcttcctttttgaggcagctatataaatgatcatttgtgcaagaaaaaaaaaaaaacaagaacaggtttctataacaacatctcttactatttttacttgaaaaaatgttttgcgtagcagactgtcatagccttgaacgccggctccctttcttcctccctccaagtggctctggggctgttgatttccgcagagcttgggttggggtaggggctcagcctcaccagctttcagcagctggtctaggc

SEQ ID NO: 8205 - DNA, 1197 bp, Homo sapiens
ggagatgagaaatagcagtggccatgagaacatgcctcctcctttcatgagcctgagattcctggctgtcaaccctgtttatcttttctcttgggagcaaaggagggttcaaagctgagtggggcctgaagctgtcaattaacatgtgcatttctcttctctgtttcttgttcatctggcgatctggcaccacaggggaaggtaagctgttgttgcttctgtggggtcctgcaggccaccttctccagtacccgcctcctaccctaccccctttcccacctccccgaagacaaaccctcaatcagggtaggagggtcgtagagggaatggcctagagtgtcctgcctctcacatttatgtcccctaataatgtcattatctatcttttttttcctacagtgacagcctcatcaagggtaagaaatgagcctagtcaccaagaactccacccccagaggaagtggatctgcttctccagtttttgaggagccagccaggggtccagcacagccctaccccgccccagtatcatgcgatggtcccccacaccggttccctgaacccctcttggattaaggaagactgaagactagccccttttctggggaattactttcctcctccctgtgttaactggggctgttggggacagtgcgtgatttctcagtgatttcctacagtgttgttccctccctcaaggctgggaggagataaacaccaacccaggaattctcaataaatttttattacttaacctgaagtcaaggcttcacgtgttcatgaactgggtaactggcagcaagcatgcgcacgttcacatgtgcgctcctgggtctgtctttgtgtgtgccagcagggggcgcaaaagaatctggctggggcggctaaggggaagcaaggcctgggctccgaaacaggacccaagctgggaaggctggccctgagttctcgaggcccagctgtgctcttcacacaccctccatttctcccacatcacccatttttttaaggctggacagccatggctttgctgagccagattaaaaatctgatgaccccaacaggagctgcttccttggcagcagggttccttgtggctgtggggagcctgcctgtgcctgttgaggcacttctgtgcccagaagcccagtggatcgcgtggcctgctgtaggccccccagactccatttctcagtc

SEQ ID NO: 8206 - DNA, 1360 bp, Homo sapiens
gccctcaggtatccctgttgatccgccgggagctgacagagagggccaaggacttcagcctcatcctggatgatgtggccatcacagagctgagctttagccgagagtacacagctgctgtagaagccaaacaagtgggtgagtcgcaagagccgtggggtgagggcttctgagatgcaggaggaggaaagactccatgggtggggctcctgacccaggacagggtctccctgactctctcccaccacagcccagcaggaggcccagcgggcccaattcttggtagaaaaagcaaagcaggaacagcggcagaaaattgtgcaggccgagggtgaggccgaggctgccaagatgatatccttctgctggagagatctcagcccagcccctagggcacctgagttccccattctccttcatgggcaggctgatgagactaaggcgaatgcgactccgtgctctctggcccttggctccttgttgggggtggggactacagatgagatctgaaatcttagtggtagtacctgagccatgactccccactgtaaggccagatcaatagcattggtggccttgccttcatttctggtgctgcccctagttcctggcagcagcctgcagggaggcccacaggtggggtccacggtagggctgggcacaagccacctgagcgcaaccttggatctgacagcccagaggaggactggagcaagggagtgtggtaaggacagggccagggattgagacctgcccttgcgtgtaccttaaccctcctcaccttggagaagcactgagcaagaaccctggctacatcaaacttcgcaagattcgagcagcccagaatatctccaagacggtgagtgtgtcagcccagcgtctctgatggggctgccttgagaaagtgctttcagttaaggcacattgaggtgagggaattcgaaccttgcttgttccggtttctactcagattggcttctctggccggcgcggtggctcacgcatgtaatccccgcactttgggaggccaaggtgggtggatcacctgaggtcaggagttcgagaccagcctggccaacatggtgaaaccccatctctactaaaaatacaaaagataatgagcccgctgtggtggcgtttagctatattcccagctacgcaggaggctgaggcaggagaatcacttgaacccaggaggcggaagttgcagtgagctgagatcatgccactgcactccagcctgagcaacagagcaagactccgtctcaaaaataaataaataaaaaattggcttctccgatactcctcctgtcaagaatgattcctctgggttccctgaccttttgttctaatcatagct

SEQ ID NO: 8207 - DNA, 1360 bp, Homo sapiens; identical to SEQ ID NO: 8206

SEQ ID NO: 8208 - DNA, 1234 bp, Homo sapiens
cagggcaaggggtttgggggagggactggaagcgtccggcgagcaggcggaggttgctcaccggtgaacacagattcgcgcacaccgtaggccacggcgccggcccccagcaacagcttcagggccgtgcccatgccccggggcccggcgggcagccgtcccgccaagtccttcaagttctgggccatgtctgatcttgaggccggcggcactggaggtcagaagggggtgccggcccgcctctaccccgctccggcttaggtactgcacccttcacacgagggttcgggcccgtaaggctggcgaaagaaagggcagcggaagtgcgctccctttgaaaccctcccccttagcccactacggacccgaacttcgcgcacaggaatcgcgcatacggaagtcccgcccctttctggaaggctgccctcccagggagggcagcgcaagacagcaagtcatctccatttcctggcccactttcaaaatggcagccggaaggaaatttgtgattagaagccgcgctgttcttatttaagagcgttagcgcaacttccggtattgttgcaagatggccgcgcccagtgatggattcaagcctcgtgaacgaagcggtggggagcaggcacaggactgggatgctctgccacccaagcggccccgactaggggcaggaaacaagatcggaggccgtagtttattgtggtgctggaaggggccagtctggagacagtcaaggtagtttgggacaggaagtggagaagtagtaaatcgataggttgggactccgtggaatgagggtaaggggcccagagtggatgtagaaagcagagaggggtgaaagatgcttttgaaggaaggtggcttggttggctttgcgttgatttgacatcctgggatggtagtactcatttttctttctttttttttttttttttgagacggagtctcgctctgtcgcccaggctggagtgcagttgcgcgacctcggctcactgcaacttctgcctcccgccttcaaacagttctcctgactcagcctctggagtagctgggactacaggcaggtgccaccacgcccggctaatttttttgtatttttagttcagatggggtttcaccatgttggccacgctggtctcgaactcctgacctcaagtgatccgcccgcctcggcctcccaaagtgttgggattagaggcgtgagccactgtgcccggccggtagtactcatttt

SEQ ID NO: 8209 - DNA, 1189 bp, Homo sapiens
atgtgaagtcacaggttgtgcccttcctcctgtttccctctcagaccattcactggggagtgcaaataaggctgcacagtaatcccccgaagggcttgctgggctccacccccagtgttcctggtttagtaggtctagggtgggcctgagaatttgcctaacaagtttccaggtgcagctgctgctggtagtttggggaccacacttgaagaaccacggggctaggtaacagaagcttatgctgttctctcgtcatgttccctgttcttcaggtagggaagacatatgagctactcaactgtgacaagcacaagtctatattgttgaagaatggacgggaccctggggaagcgcggccagatatcacccaccaggtaactccagggacagtgctcacaaccctttgagcctctgtatggaagggttggcagctgagtgctgcctctcttcagccttaaccatgtctcggtttctgctttgctcagagtttgctgatgctgatggatagtcccctgaaccgagctggcttgctacaggtttatatccatacacagaagaatgttctgattgaagtgaatccccagacccgaattcccagaacctttgaccgcttttgtggcctcatgggtaagaagccttagaacaaagttagaatgaacttgtcagtagggaagaagggaggaagaggaaaagggagaactaaatgtggatttttaagcgagaaaatgggagaacaacatgattaataccaggacaaggactgttattatttttctatgtttgtggaaactccactcctgttcttgcagtagcttcctggctgagtgaaagagggagtctgaacccatcactgtacagctagccatatgcttggcaactgtttgttcctaacatttcaggagtccagtctagatataaagcacacagggaactcatcttatccatggggttttccttgttcgatgactggacagaaggactgtggtctccatctagctctgaactcttttttcccccttctagttcaacttttacacaagctcagtgttcgagcagctgatggcccccagaagcttttgaaggtgaggtattgaaacctgttagttgaaggctggttctgggaatgtttctggggctgacttttctctcttttttactttaggtaattaagaatccagtatcagatcac

SEQ ID NO: 8210 - DNA, 1220 bp, Homo sapiens
ggcagggaagggggtacacaggggttaaggggaccgagggaagtgtggtccctgaaagagaggctgggatgtgtgcaggccattgatcccttctcctctctgttcctgccctccagtcctaccagaatcggcagtcctgtgtgacgggggctgttgggggccagcaggaggatgaggacagcagtgactcggaggtggccgattcccccagcagcgacgagagacgcatcatcgagacccccccacaccgctactaaggcctacacctctccccacgcagagggggaattctgccctggtgaaacagacactccagacatgggagaaggactttctgggaacacagagaccaagagggagagaggcttcagaaccagtcctcctttcatttcaaaaccccagcgggccctctggagtccgccctgcccctcccccggccccccatccctcacttctgggctgtcatgctcctggtgtgccccttgcactggggctggctgggttggaaagtgggctggacttcagctgcctttctacccccaatggcagctgcccccttagcactcactgtgttggggagagggtgacgattgcaatggctggggctggggctgggggtgggattgaaggaaaccctctcctctccccttcccttctctctcctgtccatgggaagcttttccccctctgcagggctccctcagctggaccatcgtccctgcttctcttatgatcgccccacctcatttccatttcagtctggggaccccatttctccctcctttccaacttccttcctttcttgtcctgtttcccttcctgcccttgcagtcctgaggtcctgcagccccggcccctcctccgtgacctggtgtggccaggctgcggggacgggaggggacgtgggggccccgggtgtacatatataatgtatattttttcaatgttgtcgtgagtgcagcccatgttcctgcgtgcagctcacggccttgtgtgtatgtgtgtgtgtgtgtgtgtgtgaggcatcgtcatgtcctggggcaggggcggggggttgggtgtggtgagggaggggacatatcctagggttttcaaataaaacaatcagaaaaaaaaaaaaagctctgtgaggcgcctcctgactgcctggtcctgtgtgggtgtggtggaggctctggggcctcaggggctgtttgggtctctgcacagagctgaagtga

SEQ ID NO: 8211 - DNA, 1626 bp, Homo sapiens
tgacctgcttccttccattgttgttcagcttaacagctctcattcctcttcttccttacagggaggctgtggagcactttctggaggccctgaacatgcagaggaaaagccggggcccccggggtgaaggaggtgccatgtcggagaacatctggagcaccctgcgtttggcattgtctatgttaggccagagcgatgcctatggggcagccgacgcgcgggatctgtccaccctcctaactatgtttggcctgccccagtgacagtgggacgggctgccctgtgagtgtccacctggagggatccccgctttggatgtgattccctctccccaaatgggcctaccaagggggcgggctgatgaccataagcggtacggcctttcaggagctgcctcaacgtaggggtgggtagtctgtgttctagttcctacataattgtaggaaaatgagctgtgtcatctctgagtcccttggtaattcaagggctgtacatccagctacagatctctctgctcatcatgccctttcttggtgctgctttttgggtaggaccccacgatttagggtaactgttatcatcagctgccatttctgatagggtctaccacatctgtaatgtctgtcctttcccccacttttactgggaattgatagtccagcttccttgggcagtgtaagtaggaggttcatctgctgtgcgcctctaatgtctgtctggatgggatgtgttaggagttggcctgttgggttgaattgttgatttggctgagcagagctgagttttggtaggagtgctcatggttctgtcattcttggacctctcctggctgagctctgattccctgtgagcacgatgctgatgcaatagtcctgtgtcatcactgcagcggtcctcaggagctgccagggccaattgctacagagtgtctgggtgtgtggcataggaggaaggtttgcttgtgaaatgaggctgggtgggagcggggagggactagatcagaagagatcaagggctctattcaggaacgttggtgggaggacagagcaagtgggaagggggtatggtgagtgcggcaatccctcatcctcttagaagcacctgtgaatgggaattgagccaactgttatagaaaattggttcagaaagtgcaatcttgccagatttctagcaaataggttcagtgttaccataagcctttgctgtacttcttgaaatgtttctaggggagagcattggaaaatccccttcccccatctagatcgaaggaagatgagggagcagcttggattcttctcagttgtcccctgcatggggagatacactaacccccagaaatgactgctaagcctcttgccttgtctttagtagctaatgatcagagagattttttttttaaactaccatggtcccaggattccatcctgaaatttatttttctttgtatgaatatgtgtaaatgatttaaaaataaaactgtaaaatatttgtacgaagaataaatggaactgatgtgggtatgagttctgctggtcatgaagctgggatggcagaaggtgagttggcgtttggaggactgggattcaacagtttctgcctttcaaattctcactggtatattggtta

SEQ ID NO: 8212 - DNA, 1221 bp, Homo sapiens
accatgcccggctaatttttttgtatttttagtagagacggggtttcaccatgttagctaggaaggtttgagtatatatagagtaacaggattgctgagtcaaatggtagctctgttttaagttttttgagaaatctccagactggctagatgaatttacattcccaccagcagtgcataagcattacctttctccacaatgccaccagcatctgttggttattgaccttttaataatgaccattctgactcatgttatagtatcccattgtggttttgctttgcatttatctgataattaataatgctgagtatttttaataggtttgttggccacttgtatgacttcttttgggaagtatcatatcctttgcctgttttgttttgtttttaatagtttgaaacagaaatttattctcagaataatgcacaaaagcataggtcgaggctactgttgggaggcttctctctcttcctcttcctactccccctactctctgaatgccaggtagaacacagttgaaggaaacatgcaatcacaaacaatgatcaactctaaagacaaaaaggtttggtccaaaataactcaacataattaatccaataactgtgaagaactttgctgagtaggattaagatattgcagatgtttcctgcacatgtttccacagggtggctcttcagtgcaccagcggggcctgcttgagggagatgaggactgagcacctctgggagatgtctttagcctgccttctggacttggggttaaagttacacagccaggccacactttcccactcagtgcctgggaagaactggtcaatgtcatttacaaaggcttcttctgctgccctgtttgcttttgttttctgtagttgctcatcctatctcacatatcacacctctagctcctttattgccttttctttccactctgcttcttgcttctgagaattggcatcaagggcttccaagcgttctgtttgctcttctctccatttacggatactttcaggctctgactgcaatctatccacttgtgaaatgctgcacaactgtctgttggactattactttcctggtagtatttaccattcattactccatcaacagcatccagcttgccatgtgcctggggcctgggggcaccaccttccaggatggtgaaggcctcgtcattctttttttttttttttgagacacagttttgctcttgtcacc

SEQ ID NO: 8213 - DNA, 1709 bp, Homo sapiens
accatgcgtggctaatttttgtatttttagtagagagggggtttcgccatgttggccaggctggtttcaaactcctgacttcaggtgatccgcctgccacggcctcccaatttactgggattacaggggtgggccaccgcgcccggcctttttcttaatttttaaaaatattaaagttttatcccattcctgttgaaccatattcctgatttaaaagttggaaacgtggtgaacctagaagtatttgttgctgggtttgtcttcaggttctgttgctcggttttctagttccccacctagtctgggttactctgcagctacttttgcattacaatggccttggtgagactggtagacgggattaactgagaattcacaagggtgggtcagtagggggtgtgcccgccaggaggggtgggtctaaggtgatagagccttcattataaatctagagactccaggattttaacgttctgctggactgagctggttgcctcatgttattatgcaggcaactcactttatcccaatttcttgatacttttccttctggaggtcctatttctctaacatcttccagaaaagtcttaaagctgccttaaccttttttccagtccacctcttaaattttttcctcctcttcctctatactaacatgagtgtggatccagcttgtccccaaagcttgccttgctttgaagcatccgactgtaaagaatcttcacctatgcctgtgatttgtgggcctgaagaaaactatccatccttgcaaatgtcttctgctgagatgcctcacacggagactggtaagaaagaaatttatccttgaaaggccaagttccttaagggaaaagagagaaggagagagggttaagggatcatttccctcttgagcaatgatggaccattactataaagaagtgttattatcaactaatcctctggaaacccctttttccattataacttggtggcacctgccctttgaactatgtcccaggtctcaggagtgtgcattgagttgaaggacacagaattcggcagttgaacagtgtgcagtaagtttgagaacctatgggcttaggcatggtggaaacaaaaatgtatcgttatagttaaatgaaggtgatgtgtacatcttcacatagtgctggacacatgtgaataaatagcagatttattgctaattagccagaagacctaacgtcatagctcagggatgagcatgattttgttttgccaaaaatggcatggcaaatcacgatgagatttctgtaatacataatttgggtaattctttctatgtcagtaacggctgtctcttctccattctctgggtttgtggatgttactgggcagctctgagtttgggagcacctcccatgtctaattctcctaagtcctgggaagcgttgacccaactttatggtaaagataattccagaaagtttaatctactgacagtcaaacagaatgtagctagaagtccagtttggcttcaaaacctgtgctagtactcatgcttctgactggtagctgcaaggggtgggggatactcgggatactcataaagccgctaccacttttttgaaaatcaatttttcagtagttttcaaaaacttgagaatgaaccaactttaccaagaatgccattggtaacactgaacgctgtaaaatagcttaaaaagcgcatttacattatgactaca

SEQ ID NO: 8214 - DNA, 1184 bp, Homo sapiens
gcctcagcctcccaggtagctgggattataggcacgtgccaccacgctcagctaatttttgtacttcttagtagagactgtgtttcaccatgttagccaggctggtctccaactcttgacctcagataatccacctgccttggcgtgagccacagctcctggccaaaaaaaaaatttttttttaattaggcaggtgtggtggcacatgcttcaagtccaagcgatttgagaggctgaggtgggaggattgcttatgcccaggagatcgatgatgcagtgagctattgtagtgccactgccctccagcatgggcaacagagtaagaccctgtctcaaaaaataaaaataaaaataaatccaagccttttgactccacagccactctttgtattgtacgtcagggacaggaggagcttgccgttaattgcttctgggaacctagatactaggttacactgtctttaaatttaattttctctgttccttgctcttacaggataactataatgggatgagctttgtctgtattggggctatcttggtctttgtagccttctttgaaattggaccaggccccattccctggtttattgtggccgaactcttcagccagggcccccgcccagctgcgatggcagtggccggctgctccaactggacctccaacttcctagtcggattgctcttcccctccgctgctgtaagtaaactcaccttatcttaaaaccagcctatgtaagctgacatgaagatactccttaataatacagtagtctgggcctggcatggtggctcatgcctgtaatcctagcactgtgggaggctgaggcgggtggatcacctgaggtcaggagttcaagaccagcctggccaacatggtgaaattcaaaaattagctgggcatggtggtgcatgcctgtaattccagctacttgggagatcgaggaaggagaatcgcttaaacctgggaggtggaggttgcagcgagctgagatcgcgttactgcactctagcctgctcgatggaagcaagactccatccctaaataaataaaaaaatacagcagtccctcctcttcttcagtttcagttacctgtagtctaaaaatattaaatggaaaattgcagaaataaataattcataaagtttaatttgcggccagacacagtggctcaagcctgtaa

SEQ ID NO: 8215 - DNA, 1041 bp, Homo sapiens
actttgggaggccaaggcgagcaggtcacttgaggtcaggagtacgagaccagcctggccaacaaggtgaaaacccatctctacttaaactacaaaaattagctgcgtgtggttgcaggcacctgtagtccagctactcaggaggctgaggcaggagaatcgcttgaatctgggaggtggaggtagcagtgagctgagattgtgccactgcactcctgcctgggtgacagatccagactaggagataagatacagaagataattcatttgcagaagggatattagtattgaacgaaaacctagaaaaaggacttcttacccactgggacttttaagtttatttttgagggttctgtgtaactggtgtgcagaattgcatcaaagctgcatgttttcttttctcctaggtgttctattactcaacaggaatcttcaaggatgcaggtgttcaagagcccatctatgccaccatcggcgcgggtgtggttaatactatcttcactgtagtttctgtaagttggatggtttggtaattttgaggggagaaaagaatccttgctacagatgttcaaagatggattgcatgaccctaccatcatttagttacctttttgttgcttaattttcctttgggaaaaagagataaatttaatgttggatgtagtcttcactcttcaagcaaatatgggatggatgggaaaggagggagtatagaagggactatatagtatgctttgaacttggaattggaggaaaggtgcttggaaaaactctcaagctctgttactccactgtttttacactaaaacaacaataatcaacagaagttatctgtgatccccagaatatgtgagaatttttccccgtgaggtgtgcaatcagttccgtagtggacaccatctaggtgtcctgcgattttttaattatgacactgtctacctggagatagcatcagatctcacaggttggtggcccagttcccaagactgccccccactcctgatgccagtcacaagctccaggttgttttacctgtgcttc

SEQ ID NO: 8216 - DNA, 1879 bp, Homo sapiens
tccagtaggttacatggtcctgagagataagagactcaaagagccacccagcagtgaagacacaaactaccaccccctccaccaccaccagtgggcttccgtggagtctggggtacagatcagactgcactgtatttgtttccagaatggtcaattcttagtaatcctacccgagactgtctttttctctgccctcccagttcgtgagtggaattctatgcctacatttgcctgatgcaagtttttaaatatttccaaactgaccaacccagtttctcttaacttcttccttccccaattttctttcatttttaccaagttaacttcacattcttatctccagataagttctttagtataatctattcctttgtcttccccattaattacctaaatctcattggatgttcttttcataccactcataactcaaattctcctaatacagctccataattaataagaaacagtcatcaatcacaagttttaaggactattctctcctctgtcttccctccctccaggtcaccccagctctgatatttgccatcacagttgctacaatcggctctttccaatttggctacaacactggggtcatcaatgctcctgagaaggtgagtgccaggccacaataattagaatttagaatagggaagttattcctttaagtagggtttcaggaattcagaatttaaggccaggcatggtggcatctgcctggagtcccagctactcctgaggctgaggcttaaagatcacttgagtccaggagttaaacaccatcctgagcaacacagttagtgagggtccctccccaaactaggggattttaagacaaactttgtatctatcctgtccaagactgaagatggagacaatattggtggggaaaattagtggggtcatctaatcgaagcacaaagctcacttactcccggaacgctgggcggtgctgttcttcctcccactctttcacctcatagtgatgcacatcctgtattatcccttaggggttagttacaaagaagctgggttcccttagcagagggctggggtagactgtgaacatcggtgctgccacctactgggattttcaggacaaatagaattactattccagcgagagttaacataaattccaatacgttatctgccccttccattcctgtctatttattcccttgattctctaggaaggaaatgatccctaatgtttgtcttttgttctcatccaactgtaacagtctgttcttccaccaacccttttattttgcagatcataaaggaatttatcaataaaactttgacggacaagggaaatgccccaccctctgaggtgctgctcacgtctctctggtccttgtctgtggccatattttccgtcgggggtatgatcggctccttttccgtcggactcttcgtcaaccgctttggcaggtattgactagaaactgggcaaggaagtgggctctaccagccacattgaggacaagtgtggagagttagggcagggaggtgatgatgcctttgaataagaacaccttgaattctaatcaagggaaacctagtccaactggccccgaatatgactgcccttgcttggagctctactaccctggagagctcccacccagctgtgcaagagatgaactgtgagtgattggcctttgcagtccagctagggatagttcagaattattccctagtaaactcaactatggggtttctagaaacatacttaatttacaaggtccgaagttgtttacttgtattataaatgtttttattattttacccaggattggtaggaattatttttgtctatggcaaatgtggataatgacaaaaaaaaagtcttattctatagaagcttaac

SEQ ID NO: 8217 - DNA, 1267 bp, Homo sapiens
ctcaagaaagaaaaagtaacccattatcactctgagtttcgtcgtgccctgagacatgatgggaatctcattcccacctctcatagcagagccaaacctttagtgttggtggtaggaggatggggagaggaaaaaagagctggcaaagaaatggatagggaatattttagttctttaaatatataggcagatgcttctcttggaatccagatcatctggctgaagcttttgcaagtaggctttgaggggtgaaggagattggtggaggagagtaaataatctagaggcaagagttcagtgagggccaagggggacccccagaaaaaggtatggagctaactcatctcttttacaaggggtggccatgacttactgttgcaaagtactcagtgtatatttaatgttgattgttgaattttagttacgagagggaagaacaattttacttctgtccttatttcacttgctgaaaagctgtgggacaaaatgtatggaatagacaaggccactttctttgtgatttctgcttttcatgcatattattttatttacccataatttccaagaggtttggcgttccgctctcctgcttttttctttcatccacccctttcctttttttggaagggggttatatatgagagttcattgaagaagtccagtgaggctgaagtaaaggggcaagatagggcagttaactaaagagcactttatttctttgaagcctttctaagaaagaaatgggggtgcgagtggcttgaatctcccatgatgttggagggcacttagtggggttgaagtatgacataatatttcccattggggaaaggagaatttctcttagagggtggcaaaatgcctttgcccagtgtccctattttaggcatcttttccttccttattccttccagtcagggtgtgtcctatacaaaacttcccatcagttctcctcaatattccccatttgtaaatgatcacttctcttttctaaacccttttcctgttcagatccatacaggatttgcaagggtaggatcatacatgcaaatgccccttgttcatctgtgtcttctgcaaactagtctcatgaagaattctggcgtgcagccagggtagctgaagtttgggtctgggactggagattggccattaggcctcctgagattccagctcccttccaccaagcccagtcttgctacgtggcacagggcaaacctgactccctttgggcctcagtttcccctccccttcatgaaatgaaaagaat

SEQ ID NO: 8218 - DNA, 1637 bp, Homo sapiens
ggtttatgtcactcccctgtgttgttacttgtacagccaagaaagtatctgttatctcctgcgtagtaccaaggtaggggactagtggatcttatcatagttttggctgactatgcagggcttaaaaggccagcgtctgtttgagggggaatgacctctaacatctgtaaaatttgtctcatcttttaatttctttaacttatttcaaaatcatctcatgacccttgtgtgcctctttgtgaagccctatttagcaatttcaggggagtcaaaaaccttgcaacttccttctccactaacccaggactaaaaatggacaggctgacctcagtgtttacaaattcagaattttgataggggtagatatggagaaagacctatttcctgggtctctgctgtgtagtctccttcaggcttattgtgctcagtgaacatccagtgctgggtgcagctccatcaccctcttgtgtgtttacatgtctctttctatgataagagggttgtgttggtggcacctccactactcttttctgtttgttgagtttgaattgtgttaacatctttgatcagtgggtgtatctgtaatgaaggaggttcaagaggctgtgctttccaagtgatagtctataggagtgtttaatttcttgcagctccatctggttgctgcatttgaagcatggcattaatttgtatttgccctgttctttgacctaaagttgaagggtttagagtttttaacctgatctgtagagcagagaggttgaaagcacttaactcttgtttagtatcctcattgccttgctgcctgggtatctggcccctttccataaacatttcttttcagttcatgtagttctttaatagaaagctgctattatgtatattgtcatttgtgaaggaagttggagagtcacagctttactgtgacaggttttgcccaaggctttgatacctgtcacccagggtatcttaaaagcaagttgttctcccactactttcctttccctctgccctgccattcctattacaatgctgtgaaaaaagttctgcttcttaggtgaatgggtactttctattttgtttctaaacgagcaattttgaggatgaaatgggaagatatcattgcttcctttttgcacctattgggtatgtacactctggccgaagggagtccttatgtttagtttcaaaatatattactttcctggattctcttcttcactttttctgactttgggtccattttcttttcattgcctccttttccaggcagctctattcttgcagagccatagcaggacatgttaaaattccaatagaaaacactaaaaggaaagtctgtggaatcactagtgactaaatactgggaacctattttctcaatcttcctccatgttgtgttctttgtattcttgagatgataatatattatgtatttgaattcctgaaaaatggaaaatgtttaagatatatgtatataaagtgtatgctgtattggtgcaataatggtaattaaaaatatgaaaaaagtgtctcttttatcttttaatttgcttatttgattaccttttaaatttaattgaccaaatataagtggaccagtagttaataaaggatatttatatcactctttatta

SEQ ID NO: 8219 - DNA, 1167 bp, Homo sapiens
agggatattgactttctccaactctcggcccaatgctaagtccacctcaatgtcccattctaactcccttcggtaggtctgtgcgcctacccaaccccatgtatgcccacatgctaccttttaagatgaccatggcttagctactctgggggcatctgtggatcagcttctcactgtcttccagtttaatttggaaaattttgatacctggtgctgcccaaactgtttgttgtctccattttttatatttaatcttgtagtcataatgttgatcacaaatgaatacatttatgtgcccgggatccaggaatcctggttttggtggcagtttcccttgattttattgagacttttaagttggtccctttacatttttatttctagttcacaatccaaaaaaaattattaatcagaattcaggtttgggaagacgaggggtcatacggtttgtattttcacatgtgaatgtaggaattatgttctctatacctagcaaaggggtctcgtgtctctgagtccagtgaactaaatccagtaatctataaaactgtgccgtgctgcctctaatccttacccactttttttcttcacatgctgataatgaggattcatgggtctgtatctgtttagtgctttgatattttggcaaaagatgtggggagaaggtagactagttgaagctgatatgatttttcctatgtactttttgggtaatatacatgtttgcagtgacatttgctagtcctaaatgaaactaaagactggggggggataatagtgtgattggatgatactgggaatgagataataagaaatatcctcagctttattgccaaggccaagcagtttgatactttgcttgtttgtttgttttggatgcaatccctaagaccagtccattcaccctaatgaaactgttgacaacacttagcagaaattctggtttgatgtttatattcttaagccagataatattttggtgacctgatatttctagtggcccagtgcctcagaagtagagaaaatagtgtgtagcttaacaaaagagaaaaacaaaaaaaaagaatgagtaaaaaccttattgtcatttagtgctgctttggaagaatatttcttcttctcatctcctgcctctttgcttggttcttagcagtgttttcatatgtg

SEQ ID NO: 8220 - DNA, 2272 bp, Homo sapiens
tttgttgctgatactattctgggtttttgggtatgtaataagttagatcaagatagccttaaccaaatcagtctttgaaaaaacaacagttcttggttggtctacgtgaatacagggtctcaagacctaggtcaggactaaatcatgttacattttcttttgtcctgatggaaagttactaggaatgaccaggaattttagtgtaccatgggaagtagataaattgggaaatctggaactaagaaaattttctttgaacatatggtaataattgtggttccttattatccttcatttgtacatctttgtttctttcctattctttacggtatagggtaaaccccagacattggctgtcaaacgcaaggctgactctgaggaggagagagatgatgtctccacattgggttcaatgcttcctgccaaggcatctccagtagcagaaagcccaaaagtcatggacgagaagagcagtcttggaggtgagtaactgacttctaatgctgttggagagcacacagagtagaggaatgttctgagtgagctaaaagataaaactggttgagtagaaaatgggccagaagttggtggacaaatgaatagatccaaaaacagggaatccaggtgaattgtcaagggtggacatagattattatggaagatcatgctggctcaactaatagatggatcaatatgtcatctcatgtctgttgcttaatctgtgtttgttttccagaaaaagctgaatcagtggctaatgtgaatgctaatactccaagcagtgaactagtagccttgacccccgccccttcagtaccgcctcctacactagccatggtgtctagacaaatgggtgactcaaaacccccacaggccatcgtgaagccccagattctcacccacatcattgaaggctttgttatccaggaaggagcagaacctttcccggtgagggcagggccataaggtgggactttgaagtggggacttggtctgattgttgtcttttcaaactccagtaaaagtaaaaggcacagaactatttaatgaaagaatggttcaattacgctatttatttaattataaagaaggaaagggaaaagagtgtgtggaccataaaatgaaaatgttaggaagaggagaaaaaaaggaagaaagtaacctttaaaactgtaatgtttagttagataaactagtttgttttataatgaataaaattatagtaatgaagttaaggagctttcctagggtttgcagaaccaggactagaactgaggtgtcttgactcctagtgcattctcagcaccataggaaggaagaggacaaaatagggagccagcgtaggaacctgttctccaatggcttatctggaaaaaaagccagttactattttttttttctcatttccaaacattgtatagagaccagttactactcttgattaccgtattgaaagtgattctctctgaaccagacttggtcattaactcagagatccaagcagagacataattgatggggaaatgttggggaaagctatagagaagcagaaggggatcaggctaacttaactctcaatgttttctgggacaggtgggttgttctcagttactgaaggagtctgagaagccactacagactggccttccgacagggctgactgagaatcagtcaggtggccctttgggagtggacagcccatctgctggtgagcatttatttagagactcatttgggggaaggagactcgtggagatgtgtttgaggactcggtgtaaaatagtagttacctatttatttaaagtagaaatgaggcctggcacagtggctcatgcctgtaatcccagcactttgggaggccaaggcaggcatatcacctgaggtcaggagtttgagaccagtctggccaacatagtgaaaccctgtctctactacaaatacaaaaattagcctggtgtggcagcatgcgtctatagtcccagctactcgggaggctgaggcgggagaaccacttgaacctgggaggcggaggttgcagtgaagtgagctgcacgccaccgcactccagcctgggcgacagagcgagactctgtctcaaaaaaaagtaggaataaaatgaagtctgtctacatatagaaaccatattatatatcagagtatgtagaatcacggaaaaggaattacataaggtgaggggaatttatccagctaaagtaatcttttgaattattattattatttttttttgagacggagtttcgctcttgttgcc

SEQ ID NO: 8221 - DNA, 1970 bp, Homo sapiens
gaacaatttagttgcttttcctttcttggtcttggactttggttttgttgttgttgttgttttgagacagagtcttactctgttgcccaggctggagtgctgtggcatgaattttggcacactgcaacctccgcatcctgggctcaaatgatcctcctgcctcagcttcccgagtagctgggactataggcatgcatcaccatgcccagctgatttttgtatgttttgtagagtcaaggttttgccatgttgcccaggatggtcttgaactcctgagctcaagtgatctgcctgccctggtctcctaaaatgctgggattataggcgtgagcctctgcacctggccattttttaaataccagttgctttctaatttcattttgcttttaaagcttgccatctgacttcatattactgaatttaggacaggtactttggaattaatcattgctagacctcagtttcatttagcttcccttctcctatcatctggcattacctacatgttctcaccatttcttctaggctgccaagagattgcagaggaatttcgctcacaggagattgatggacaggcccttttattacttaaagaagaacatcttatgagtgccatgaacatcaagctgggccctgccctcaagatctgcgccaagataaatgtcctcaaggagacctaaggtggccctcttgcacaaaccagcctaaggcagacactctccactgtccaggttataacctggtaccagcagactttgcagggaagaaagagttgttccaatcatgtaaccttctgtaggggattactgagacagggaagagaagtgcaagaattggttgctggtgctacatggcggcagctttgacattttctctgggttctactttattttttaaaatctttacagttctcaccatttcacgtaccttaatccaatctttataaaagaggcagtctagagaactaggactgctcagccttatcctggagtggagcatttagcccaggtcttaattctccaagaggaggaatacatagtatggtaaggcaaggaactgggtggaatgtcaggttgcctgcccaatgggagaggtagggtttttctagcttgtgtgacagaagtagcaaaatctggtcctcccccctcccagtgtagctgtggctcagagttttttctttttgttgtcacttactcccttgtgattgaattttttctcctgcatccatggcaggatccccagccagtatagagacttggttggcatcttctgctgcagggactaaaagtatttgactggggcacatgtggctgttgtcattctttctgcatcccactgttcccctccaatttatgttattttctaccctgtttttcagttccatctctgctctgtcctatagctttataaaaccagagtgtgtggggctgaggtcaggagtataagtacctgccttaggcactattccttatataacaaaaatattaaatatttttttcctcagtaaaaggatgaaaattggtttcagttgtcttactctattccagtctttgcccactttcacacaaatgacaaggccaatatgttttgtttgttttttaatcattaagagtttttgtacaaaaggtgatggttttttttcttcattttaaaacaccagggtgtgggggagggatgcaaacaaataacaaaaaagatgcttttgtaacattattttccctgtttagaaagaaaaaaatcactccaatagtattgaaaagtccaaagatgaaatagtttcattttcttttcctaaggcttataaaaggccccctgcctgttgattccatccctcttttgtgtccagtggagccatgttactcttcagtggcccaggggttcactattaaagaaagatcagtccaggtttctgggcacatggcctaaacaggaagatggaagcatcagaggattaaaaacctttccccaca

SEQ ID NO: 8222 - DNA, 1465 bp, Homo sapiens
ggatttctttaattaaaaaaaaaatgccaagaaacattatttatacagggttgattgctttcatgttgttattctgtaccctatagtagcctccatgagaatctggtatttcttgctgcttggaactactttgcagtgattacttggttgcagtccaagtactctcgtttagtctgagcctggagatgttctagacttgcttctcccacctctgagattaggacaggaaaaatgtgaaatttcccaattacaggattatacggtaccatcacatcatttgtggaaattggggtgactgtatagctgggattgggctaaggactgtggtcttatctgtccacatacagccaaaatgcctatccagaaatccagttcgttggaaaggaaaattggtactcctgtgccacaggggttccagaaaagggaagtcactttaccttgcggtggtgggatcctgatgtctttcatccatttgtagtaaaagctggtaaagcttttcttactcctggttccctaccagtatttctaaacatgtcgcactttctccacaggcatgtggttttgacctttttttcaatcttctagaaagggaacggaagcagaagtgggacatcgagggctctgctgtcctctgcgctgggtgtggaatgctgctgcacctgtcccttctgctggctcagggaagtgtcttcttgcccacatttctgtggggaaaggtttttaatcctctgatgcttccatcttcctgtttaggccatgtgcccagaaacctggactgatctttctttaatagtgaacccctgggccactgaagagtaacatggctccactggacacaaaagagggatggaatcaacaggcagggggccttttataagccttaggaaaagaaaatgaaactatttcatctttggacttttcaatactattggagtgatttttttctttctaaacagggaaaataatgttacaaaagcatcttttttgttatttgtttgcatccctcccccacaccctggtgttttaaaatgaagaaaaaaaaccatcaccttttgtacaaaaactcttaatgattaaaaaacaaacaaaacatattggccttgtcatttgtgtgaaagtgggcaaagactggaatagagtaagacaactgaaaccaattttcatccttttactgaggaaaaaaatatttaatatttttgttatataaggaatagtgcctaaggcaggtacttatactcctgacctcagccccacacactctggttttataaagctataggacagagcagagatggaactgaaaaacagggtagaaaataacataaattggaggggaacagtgggatgcagaaagaatgacaacagccacatgtgccccagtcaaatacttttagtccctgcagcagaagatgccaaccaagtctctatactggctggggatcctgccatggatgcaggagaaaaa

SEQ ID NO: 8223 - DNA, 1099 bp, Homo sapiens
agccacaaaaaaagggctcttcgaaaagattaagtgcatgactcttagatacccttacccatcacaacaaaagccaaaattggagatagaattatccatcaaatgtcaatgaaaaggctttttgtttaacggaatgaatctctgtgacacacaggagacctacatggttcttgaaaagtttatactaatagaaacattgtcagcttcaactaaaagggacagagagagtatagaataaaagaagaatatcagacctctcaaatcatgcaagcaggaaacgagatctgataaaacaattcagctgcaaacacatccttcatgaaaaagggcaaatgatttcatgagtggatccttgagcccagacaatagagaaatgaattaaagaggattattcccaggtgttaaaactatgctgttttcctagccagatatcagcacttcttgggactaaagactctttttgccctaggatggattatgtccaggacctcaataacacctaatttagatgactgagatgatgagatttggaacttttgagctaatgagactgtgagcttttaatcttatgttaatgttatgatggatagagtgaatgcactttgcatgagggatgaatatgaatctctggggccaatgggaagattgtggtaaatagaataatggcccctgaagatactcaatttccaaaacttctgcatatgttactttatatggcaaaagggcctttgcagaaatgattaaattaaggatcttgaggtgtgaagtttattctggattatccaagtgggcccaatgtaatcacaagggtctttctaggaggaagacaggaagatgagagagatttgaagatggtatgtggctgaatttgaagatagagaaaggaaccgcaagcaaagaatgcaagaggtctctagaagctggaaaaggcaaggaaagagtctcccctcaagctccagcaggaatgcagtcctgacaccttgagtttagcctagtgagacttctgacctccagaactagaagatacaagtggtgttttaaggcactaaaacgaagaactagaagtattgttttaagcccataaatttgtgataatctg

SEQ ID NO: 8224 - DNA, 1108 bp, Homo sapiens
agggatcaacttctctgacaacctaggccggtaagtagtggttctgctcatctcctgggtcgtgatacatggccggccctcactcccagcagctgggcccctgcctgctgtctgctgccattagagcccacagctgggctgcgactgctcagaccagccagctggagggaggggctcagcagctctgggtttggccctgagagagtagttggattttaggctggccattgctgtatcaggacccaatcaattggcctagacgggatctctcagccttacaagccctctccaggtggtaggtacagagtggagagaggctgagttttgatcacagtcggagagggctgacggaaggggtagaacggagcagctggtgacatgggtgatgacccgggagttcctgacgtccacccactgggctcttgtctcccccccacgtgtgtggtgatggtgggcatgcccttccccaacatcaggtctgcagagctgcaggagaagatggcctacttggatcaaaccctcgtgagtgaccccagtgtcacagagggtgacagagtaggcagtgggtgggagtggcatcacccccagggctgatacagccaggccttccccactgcgctggtgtctcctgccccctccggaagcttggatgcccctccacaccctcttgatcttccctgtgatgtcacctggacccctgctgctggcattggccacaaagcctcctggtctggctccaaagcctggcagggtcttttccccgggggagctgcaggcagggaacagtcctgatgggtcatccccttcactcccagcccagagcccccggccaggcacccccagggaaggctctggtggagaacctgtgcatgaaggccgtcaaccagtccataggtgagcctggctgcctccagctgggtggacagatgggggctggagaaggggagaacaggaaagaggggttgcctgccctgtttcctatataagtctgaggaaggggagggggtcgccatgggaatgtgctgtaggggaggcaggtgttgctcggagccccagcctctgttcctatgcaggcagggccatcaggcaccagaaggattttgccagc

SEQ ID NO: 8225 - DNA, 1227 bp, Homo sapiens
ctgtagtatgcaaagatgcgatgaaaccaaaagggtagagtcacagttgaagatcttgatccattccacgtatgccaaccgtccccacaatggggcccagattgcttctaccattctgaacaccccagattcatgaaaacaatggttgcaagaagtgaaaggcatggccgaccacatcattagcatgcggactcagcttgtctccaacctcaagaagaagggttccacccacaactggccacatagcactgcccaaactggcatgttttgtttcacagggctaaagcctgaacaggtggagtggctaaccaaggagttctccatctatatgacaaaggacggccgcatttctgtggcaggggtcacctccggcaacgtgggctaccttgcccatgccattcaccaggtcaccaagtaatgtacctggtgcaaggaaacagagacgacctttctgtcttcagcctctgctattgggagcttcacacagaggatgagagagagcggatggtggtgagtggatcattttcttcaaccacggtgtgtaacactcagcaattgaatgtttctcagaaaagaacgtgtagtgacacagggcagagggatccgtggctggcgtctggaacattgtggctctaaaccaaatgctcccctgtccttttatccccaacttttctcaaagagtttacatgtacaagaaagtcaccacaccaaaaaacctgtcaattatgccattgcaatatttcagaagctttaactgaagtgtcatatagtgtcaggttcctcatgagaaatagcacacattagaggctttgagagaagacctagttctgtcatgaacacttggcctcatgtctgtcctcccatcatggagcagccttatcaacagaccacattgcagaaattatgttttatgaaaaccagtaagtctgctgccactacagcaaggaaaggaatgcagtttcctgtcttatttaagaaaaagagaaggctctcttttctcctttgccattgctgttcttttccttatgcacaaagatttttaatgaatgcagatttttatctcattctactgcctgactatcaaccccatcctattgggatttatttaagaataaacataattttctgctgatgccataccctcacttttctcagcaaagaataatggagagtaggtaactgtactttatctcagcatcctcttgaatgattttgtaatcttctcta

SEQ ID NO: 8226 - DNA, 1286 bp, Homo sapiens
atgcctgatgagtttcctacagacattccaggaaccaaagggaacttcagattagtcagacatgtttcctttgttgactgtcctggccacgatattttgatggctactatgctgaacggtgcagcagtgatggatgcagctcttctgttgatagctggtaatgaatcttgccctcagcctcagacatctgaacacctggctgctatagagatcatgaaactgaagcatattttgattctacaaaataaaattgatttggtaaaagaaaggcaggctaaagaacaatacgagcagatccttgcgtttgtccaaggtacagtagcagagggagctcccattattccaatttcggctcagctgaaatacaatattgaagttgtttgtgagtacatagtaaagaaaattccagtacccccaagagactttacttcagagccccggcttattgttattagatcttttgatgtcaacaaacctggctgtgaagttgatgaccttaagggaggtgtagctggtggtagtatcctaaaaggagtattaaaggtgggccaggagacagaagtaagacctggtattgtttccaaagatagtgaaggaaaactcatgtgtaaatcaatcttttccaaaattgtttcactttttgcggagcataatgatctgcaatatgctgctccaggcggtcttattggagttggaacaaaaattgaccccactttgtgccgggctgacagaatggtggggcaaatacttggtgcagtcggagctttacctgagatattcacagaattggaaatttcctatttcctgcttagacggcttctaggtgtacgcactgaaggagacaagaaagcagcaaaggttcaaaagctgtctaagaatgaagtgctcatggtgaacataggatccctgtcgacaggagggagagttagtgctgtcaaggccgatttgggcaaaattgttttgaccaatccagtgtgcacagaggtaggagaaaaaattgcccttagccgaagagttgaaaaacactggcgtttaattggttggggtcagataagaagaggagtgacaatcaagccaacagtagatgatgactgaagaataccggttaaataatacattcggatggagctggaagttgcaatttctctttaacaaccaaggggtttattttcaaagcgatattggggaattgatttcacagtttgttaccttagtaggtaacggtaaggttattctctctttttttttttggttatgaaaacttagggactacaattagtataaaa

SEQ ID NO: 8227 - DNA, 1412 bp, Homo sapiens
taaatattgggaaaaaatatttttacaatttacagtctgtctgacatttggtaaatagctaattgtgatatattcatattaggagatagggtgcagccactaaaatgattttgagtattgttcattagtaatggtaattttcttttatacaattttataaaatttttgctcttatgtactgacttttctggtttataaaaatactttattaaaaagtgagagtttccatttaattaacatatagcttacagatctatacaagatgtgattgtatttagagcatttgaagtactctttttctaattatatgaaaagcatataatttctgcctttttattctttaactcatggttactttgtcactctttataagtttgattttaatttttcccaggtgacctaaagaattaatgaccattcagaaataaagcaaaaagcaggccacaaccttaaccaacaccaaagaaacatccaagcaataaagtggaagactaaccaagatttggacattggaatgtttactgttattctttaagaaacaactacaaaaagaaaatgtcaacaaatttttccagcaagctgagaacctgggaattcctgcacggaagacaagagagtagcctctccagtttcagcaaccgctaggtttctattttttttcctggtttttactgttttggtaatatatatattgaaacaagaaatattaataccacatggggagaaccccaaccaaagaaatctgaaatatatagtaaatgcttttttttccgtttttgttcattttggatgctggtgctaaacctccaagtgtcatgatttaaaaaaaaaaaaaatttatgtccttcttatttatttctaggatgaggggaggataacatttttgctttcttatgtgactctctttgaaaatgtgcagtaagaaattcctcaaaaataaaatttttacccttcagaggacagaatgtttaatgggagtgtatttttgccgaccttagcgtgtgtttgtcttctccaccacttgatttacttgacttgattaatagtaaattcaaagccaaatgtaaagttaagttaatgctgtttcacaaatttaggcatataagcttgagatgataaaaaattggattcctgttgaaatgtacagctggaaattgacaagttcatgtctgagttcagtagtaggcatgaattatttggtactgtctctttttgagtaatcttcattcagtgaggtgacgtgatgacctttagattaacgaaggagttaatagttctaacatccttcaacttccagcctgaggtttttaccagtaactgctgtgttgtaggtatacaagggagctctttacaactacatttctccccctcccagccatggtgcccctaagttgagaaaaactatcgcagct

SEQ ID NO: 8228 - DNA, 1041 bp, Homo sapiens
ttgctcaagatccatatatatagggtatgccttgtacataacacagaccacatatttgaatccagttaacattctctgaaagaatgacccatattaatggggattcagagctaaaacatttggggttcttcaaagaagagaggcatttatcaagaggaagctgcctctaagcatgagttgaaagcagttgtatatcagactttatggagagtagtggtatttagttgccgttttgtaagctgttcttatatggtactaattttgttttgttttgttttttgtttttgtgaggttttggtttcgttttgttttggtagagatgccagggactgaatatggtactaatttgtgactcatacttaagagtagttaaatttttgcatgctaattttccttcacaggaaaattcaaacttttaagaactttcagtcttgaactttccactgtcatctgactttatctgatttatggctttgttttgcattttaggccaaggcaggtgaagcaccaactgagaaccctgctccacccacccagcagagcagtgctgagtaacaccaggctcctcaggcaccttcaccatcggcaggtaagagctggggcagcccagtcttgagttggtattttctttttagtatcactggtttctcaacaagagtacaaattagtctaaactagttctgcagttcatctgtgccaaccccttgtctctattgggactctgtggaaaaagtgatttggtggttaaatatttctgggattgacctcattttgataagctttggtgagggtataagcattcagacagagttgatgatactcaacttcttttttctagacaggcagttttttaactactagtaccacttaggaaaactgatgctaaaagtccctaacaaaggcctggttttagtaatcagaaacagtttcagaacctgtttagtaatcagaaacagtagaataaactaaaggattttttttccttccctttttctttgataatcaactttatttattttgaggcggtgcagcatagtgtat

SEQ ID NO: 8229 - DNA, 1176 bp, Homo sapiens
ctgttggtttcagatatgaacttggaccacttacccagggtaatgggagagaagaaaattctaatgtaaatacagggagctgggtagatttgctaatgagaacgtggaaattgtcttctgactgtttctctttcttgatgaaataatgaaggacagtatttggctcttagggggaggaagggatgttttgagaaaagaaaagaaagttgagttatggctgtatggtcaagaattgcagacattgttggtgggtttttttgtttttttaagttgttctttctttcccctggaagttgtacaataagttaattttattccactggcttaaagtaagtttgttgtaaagaaaaataaaagagtattttatttaaagagatgaatgaaatgtatccgatttcaaaatgttaaattgataggcgaaaataaagttaggtgctctgggactaagcaaatgagtattctagtcagactaggtttgtcttccttttcagtcgttcacgaagatttactcataaatagtttgtgttgcaactgagagtgcctaattttgtaatgaagcattttgttttttacttctaaaaaaaattctgaacatagctgtatgcactgtatcttatcccctgtgctgtgacactcactgtcagctctcattgcctctccaggctggtgagattggagagatgaaggatggagtcccagagggagcacaacttcagggaccggttcatcgaaatccaacttaccgcccaaggtaccgtaggtatgtcgcattttccactaatggccagttaaaggacttgtgtgcacaatggtagaatgaggactgtgtggttccgttttgtggatttattatatatctagaagatgtgaatgctttgactacatgccagagttttcaggtggtggtgtgacatttcccacctacttaatactagaatttttagttatctctgcgccaaagcgtcattttgtattctggaattataataagatgtaaattaatacttaatttttatcaaaataaatcagataaattattggtgggcaattctgtggtaatgctgcagatggaggaagaattgagtgtcagaggatatttgggatagtgactgttaatcactgaggcagtccagtagaggggttaaatcagggtatgatcaaatcgcctgaatttat

SEQ ID NO: 8230 - DNA, 1287 bp, Homo sapiens
attttccatttgtccatatgagaataagaattctaaatctgtttcaaggataataggaaaggctaaagaaggactacatgtgtggagaatattattcatcaaagaccctttcttcttgttgctgccaaaataggagaagtttcactcagtacctttgtgctggacagagaatcatatgagcccatgaatagggattgtcctcttggtacctcctagactaacataggtttcaacacattctaggaaaataacagtatctcaagtctttcccattgaggaatattcttcctggtctagcattgcttctactttgacagttgtatatttgctaatttatgttctttaaagaggttacacattgcttttgcgattgacattactagacaagaaagcaaaactcaggttgtatgagcaaacaagccatatatgtttaaatcaggatgtgaagtaccttgctcactttgtttaaaacctagatctgtttttaaaatcacagtgggaattcttagtatgttctgccagtcttatactctagcagtccaaggctgttttttgagttagtgtatattctttttaattttgaggccatctttttattttcttctcagggtgcagaagctgccaatgtgactggcccggatggagttcctgtggaagggagtcgttacgctgcagatcggcgccgttacagacgtggctactatggaaggcgccgtggccctccccggaatgtacgttgtctctgttacttaaccagtgattgagaaattgttcatgcatggaattaagtgtatgtacttggagcagataaatgccttgtcttctcctggagacaaatgatttaagtgatttttattttttctttagaggaaatttttatcttattttttaaaatgtgtattattgatttccataggtttttgggaaaccggtggtgattagttacatgaataagttctttagtggtgatttctgagattttggtgcacccatcactggagcagtatacacggtactcttaaggggaaattttagcgctcagaacttttccagagccgctggtctcattagacacttgccattcagaagttgtatcagttaggatatatttggctacaagtaatagacatttaattatcttttaacaggaagacttaagggagacagtgctgaggttttttttaacaaggtttctcttcatttggctcttttttctggccagaacctagtcacagacattcactggcaaaggggaatggatttccatcattgacttaaccttgttgt

SEQ ID NO: 8231 - DNA, 1221 bp, Homo sapiens
gctgttacggttgtgacttcagataaatcactttaactgttagcctcgtgttaactcatctgcaaaatgggaggagaggggggaggccagattattactaatacgttctgattcttgagataattttgtttactcgtcagaaatatttatccccttggcattttaatttgtttttctttatcactgcctcctttcctcctccggagattcagagaatctctgaagcttaatggtttgaggtaattaatacatctgatatgatcaggtgatcagcctgtaacagtagtgtgtagtcactgcacacactgcagttatagaaaaaacatgttctgtttaatccacctgtcaagatgaatagcacaaatcaaggaagtaatgtggaatatagttttatagtgctttcttgttgttgtgttggagatccaacttagtgggagaatggtggaaaaataagaatcggtcaacagtttcttcaagttcactctggtgtacttgaaagcagtgaaatctgtggccaatattgaaatatacatcgaataaaattttctgttctctttccagactgccatcaagaagaataacccacggaaatatctgcgcagtgtaggagatggagaaactgtagagtttgatgtggttgaaggagagaaggtgagaggaaattgtggttgggtatcaaagtgctggcacatagtactgttgcacaataaattatctatcagccccttatgaattgacatgactttggaatttttgtacaatagcaggaagtgacttttaaacagaattttttttttttttaagatggggtctccctcttgcccaggctggagtgcagtggcgcgatcttggttcactgcaacttccaccatccaggttcaagtgattcctctgcctcagtctccctaatagctgggattacaggcatccaccaccacgcccggctaatttttgtatttttagtagagacggggtttcaccatgttggccaggctggtcttgaaactcctgaccttaggtgatccacctgtgtcagcctcccaaagtactgggattacaggtgtgagccaccacacccagctagcagaaatatttttgacattgtcattataaacattctgcaataaagatactttaatttcttatttaataaatgatcaactctgattatggaaagaaaagctgatttctcaatttaaaaataatttatatttttatacc

SEQ ID NO: 8232 - DNA, 1159 bp, Homo sapiens
aaatcaaaagggtaagattcctaacatcccacataacacagcagacaaactaaagttttaatctagctttggcccttacaaattttgtgccctacggcaagttacatctcgcttagattttttcattttaaagtggaactatctgcatggatgttcgtacatgctatataacacatcctattccagagccacctaccatcagttgagctctaaatggtaaatgccacagtgagaagcagacaggaaggggcggagcgccagcggcgcccggggctacgcgccgcactgcaccgagcggcggcagcggcaagcttgggtgtgagcccgggagccgctttgcttaccgtcctgccggtcccagccgtcgctaggaggtccgcgggccctgcggcaaccctcgctacagacgctgggcgggcggcgacacctggctcatggcccccgcggcggctccgtcctccttggccgtcagggcctcaagccccgccgcgacacccacctcgtacggcgtcttctgcaaggggctctcccgcaccctgctcgccttcttcgagctggcctggcagctgcgcatgaacttcccgtacttctacgtcgcgggctcggtgatcctcaacatccgattgcaggtacatatttagagccatgactaagctaacggcctccggggccagcatgatggccgactcccagggtccgttgcggcgcggcggagcagccaatggcgagccccacagtctcgcgagagtgctcaggcgctcttcgtggctgccctcttagctgctagcggagctcctcagggggcggccgggagcctacaatccctagaaagagaatacgctgttccggaaacagaactgcagttaagaccctcgaaaacatctaagaaagtgtgcatcctaaaacacctgacgaatttcagaatgtgacaaagcgcagaggatgcattatttcaaaacaaaacagaaggctaaaatttgcaggaaaaagaaaatcagtaaaccgggaatcctcggactggattgtaagcaagatttcaatgaataagaagctgaaggtattaaggctgtgatatagaaggtacatatttcatcccacaagagaaaacaataataatcagaaattttcggtgaaaaaaacgcaaaactgtacaggaaaa

SEQ ID NO: 8233 - DNA, 2113 bp, Homo sapiens
atttggaatctctccatctgtaattcctcaccctcacccttccaccgttgttagtatcatggtgtttttgtttttgtttttgttttaagaacctgcagtttgactcttcatcgttcatctaggggaagacatctgatgttgttttcctatggaaatatatatctattatatatatattttttgcaaatctcacaaagtgcggcaagcccagctggtcaggaaagagaatacttgcagaggggttcaggttcctctttttcctgccacgtggatcaggtctgttcctgttactgttgggtcttggctgaaaaaaaaaaatgcttttaaaaaagataaaatgaaaaggagagctctctttttctctctcttgctctgttcttcccttggtcccctctgtcctcccgccctgcctgcagttgagattcagatgccttctgacagagttcagcctcttggagagtcttggggattgttggcacctaaacagaatcagtgacccgggtgctttgtggccagcagcacagaatcaaacccgcatcccagcattgggccacccatctgagggaggccaaaatcatcacagatgctgctgtgctgcagacagatacatgctagtccagagagccgcccctgagatggctgtgagaaccatgtgtctaaggcgtaagataaggatggaaggctgtccaagttatttggaaggcctcggcagcttgggattagcttgggagcgcagcgctgcaaagtggaaaatatgaaaagaccacacaggcccagcagtccagaaactgggcaaaaatattctgcagtggggatttatttttccaaagcaggtaacagaggctagtgagaaagaaaagctcctctctgctccattccaaaggccatcttgtggtcagtttcatgccctcacctgatttttttttttttttttttttttcaattcctaaccttttttaaagtttcctggtctccactggacacagagctttggagacggaggatcccagagggcagtctcagttgcaatcagtgtgtgcccagcctgggcagacaggaaattcctcggatacattattttttctttctttcatagctgtgtctcagaaaggacccatttgtggctctttttcacctcaaaataagatcgatggtatcttgtaaaatgagggtagtgccacttcttagtatttttgaaagctgttttagattttttttttttttccttttctagccatctaaattgactcttccaatataggtctcagaaatccaatatttggagtacaatttcttttaatccagattacacctgccttacaaagcaccccctccttgttcccctctgtttcctctactcagttgggggagaaactcacagctcctccgggatacatatgtgccctcagcagcagctcccaggtgaagttaccagacccctgggcttctccccagctttttctgagttgagtcagacatgtagagtttgggtcacacaggcaagaggaattttccctcggccttactgacaaggacaccaacctagggtgcaaacagatggactatggttcaaggacactggaattgaggagctgatcaaggctctcttcagccttgctctgtccctgcctcttatcagagcacaggtagacacacgggcatagccagcccactcctactgtcacaggcgccccaccattcaaccttccgggaggtcagggaccttctatatgaggcgagtgggtctcagtctgcttgaatggtgatgagattctgctggatctcagcacgctgcaggtgtcttttgagagcattcagtaggacatggtgatccctatttcagcctctaagatgactggtattctatctgaaatgcagagattaagccaaatacctgatgtattgtgaaagccactgattttaagaatggagagaaagggattttttactgcatccctctgtatgaatatgaaatcagagaccagggcatgatgttgctaggattagagcctctcagtctggcctcttcacccaagtgcaagaactcagtctcttactgttcaaagaatcttaacagttgaattatggagggaaattcccttttgccccaagc

SEQ ID NO: 8234 - DNA, 1258 bp, Homo sapiens
ttgaaattctcaacattttatggtagaagactttggacctcaagtataaaattatacgtttataatttttttaaaatttaaattataagtattgtgaattcacactctcaggctattgtctgacttgatctacgtctcataaagcctgtacctgagtggagtggaaggtggagtcttaggttaatcagttactgactctaccctcaccctctttcaattgaggtaaactttgctgtttttctttttcataaagcattctcaaattgttgagtttattgctgaaaaaaatctccatgactttacagatagaattacaaactaaatgatgtcttgtatttagaagcagagtacagacctaacgaactgttagattctccaccatcacttagggtttgcccagaagcaacaccagagaattacagacaacgcgcttttgctgaactgtccattttggtggttgtgtttttcagtcaaatataagcaggatgggcgatagagatatatttatatatagatacatattctatatatctaatgcctaaatatgggtattaaagggaaaatttttaaagtctgattaaatccaatatgacatgaaattaaatatatggattagtaaggaaaaatgttaaaaagtagagaggataccaagaagattaaactggactagccttatttgcaagtgaaggatctggtgctgctttcagatgtttatcttttatttttttcccttaagctttaatcttcgtcattgtcttaaagtcaactggtgtttcttgttcattgactttggtacgatggtgctttgcaaggatgtatttatgttataatggccaacatttggtcagcccttgtccacttattcacttccctccttttgtaaaataagtgctttaattataaactgtataaaaataccttgtataaaccccttttttgattattacaataaataagctgaattgtaacaaatgaaatttgatttttgtaataaaacagtggaaaagtaaaagtgtctgtcctttcttttcagcaagaaattaagacagtagctggttgtccttcgctgtttcagacacaaaacccagctttattgtttgcattttaaataatactctgccagtacacctatagtcccagctacttggaagactgaagtgggaggatcacttaagctggggaggttgaggctgcaataagactcgtgattgcgccacttgcacggcagccttgggctacagagtgaaaccctgtctct

SEQ ID NO: 8235 - DNA, 3523 bp, Homo sapiens
ctcctagtcggagaatgacctcagtggcaacagccaagggctataccagtgacttgaactatgattcagaacctgtgcccccacctcccacaccccgaagccaatacttgtcagcagaggagaactatgaaagctgcccaccttctccatacacagagaggagctattctcatcacctctacccaccgccaccctctccctgtacagactcctcctgaggaggggccctcctcctctgactgcctccaacgtaaaaatgtaaatataaatttggttgagatctggagggggggagggagctattagagaaggatgaggcagaccatgtacagttaaaattataaaatggggtagggaatactggagatatttgtacagaagaaaaggatatttatatattttcttaaaacagcagatttgctgcttgtgccataaaagtttgtataaaaaaaatttgtactaaaagttttatttttgcaaactaaatacacaaagcatgccttaaacccagtgaagcaactgagtacaaaggaaacaggaataataaaggcatcactgaccaggaatatctgggctttattgataccaaaaataaaaaagaggaagaagaaaaattaagtccatctcagagcagcaaaccatagatacatggatgtagccagatagccttcagttaactaacatttgagggccaacaagtaagaaatgatgaaaggaaaaaaatgcaattaatactaaccttggacgaagggctttgttttctctaggaatccaacagtgctagtgaggaaagtagatatttctaaaaacccattctgggtgttgctgttgtaggagagatcagccctctggtaagatgccatgaagctgtgtgtgtgtgcaagtctctgtccctacctttagaatccatacctctgtcaaaatgaatttttttctctaggtatgtttaccttgctgcctcctccagcaacttggtaagtcattttgctaagataccatgatttttttaagctgaagcattgactaaatggaattttctaaattaaacttgattttaatatttcttctagctccattccccagtaggcttagctcttcaatttgactgctgtttttgcataatgatcaaaagttagacatattatttctcttcttccaagattgttttaatgctcattaaaatgtctttttacaacacatatagacaatgtttaagaattaaaaatttaaccattatgtttttgttgtaaatctcatatccttgcactactttcagcatatatcacagtacgaaatcatttatatatatatatatatatatatatatatatatatatatatatatatatatattttgtttgtttgtttgttttctgagtaaaacatttaaatatgttctggttagagacaatctatttaaaaagatttttttcttattaggattttccctatattaacagtttgtgatgttttcatgttctttagaccggtttttctcagaataatgtctacatacatacctcttctaatgtgtgacatgaatttaatatctttctgttacccactgtgaatgttaggctgttttcaaattatccacaaattattcttgtaatcacccaatatttttatgtgggtcctctcttacccattatggattaagatagtttaacaaatttaacaatgaggattaaatgagaaggcaaactgttaacttctcagctgtcagaatttgggtggaagggaataatggaagcctcttttgtgatctgcctgacctgctgtcatgtatggtactggggctgctacatcttgagctatcagggctgacctgtggaatgattctagcacttgctctgccaccttgccagaagttcgtttcctgctttttacacatgtgtagcacttctctgctaaaattgaatggttttaaactaatgtatttttagcttaagaggtgttggtcagttaattattgaattttttttttttcttttttaattctgtcttgccaaggcctctctgggtttcagggcccaagagaaaacagtggaagaaaggattcagaatttgggcaagggtgaagtaactgttcatgcaagttaaaaatacctaagtaaagtttttgaagataaaattgtggtttcagaataatgctgattgttggagactgtaagaatcaggtgcacttgattttgcatataagcaaatggtaaatctatcagaatcctaaaacagacaagcatgaactcttcccattgctggaactaagtgcccacagtgtcagacaaaatggacattgaacttggattctgtgatacacagggcacttgatgcttaaatgaagatggaaaggttagcaatacctgggtgtcagttagaatttgagaattctatatgtttacatatttaaatgtgcatcttgatctggtgggcttcccatgtggagacttgcactctaattaactaagaagaatattgccttgttggatctcagtccacgtgcttgcactgcgatggcaatggcctcttcttcaaaatactaatttgtgtgccaatttgtttaaaattatttgaaggcagttcagcctaatctcagtgttctctttctggggtagatgagatggattcttaatatttctgggagtactttttaatgagagaattgtcaaatttggaaagatttattgagccttaggttacatggacagttaagcttaagtaaactgtatattgattatcaaacacaagctgtaattggaaaagttgagaggaaaagcatgagatcacaaattagggggaaaaaagaaaagggatttttaaatttggtgtattaaattcattgtccaagggggaaaatgaataatgtttcattagattccttatatgcaaaagtatttattttgaacatgtgtcctaaaatatatgcactaactgatgtgattaaaattgtccaagaaataaacttgagcataacatactttgtgtgcaccacagtaagctattctgcattgaagtggtcttttataactaaggcctggactttgctccaacagagtcgtggtcttctgaatagtgacttaaggagttttgtttgcttaagtcagataatagcacattcacagggaaacaaagagagttggtggatagaattttctgactattaatttttcttccatgaaattttattatgcctttggcactttctgccactcttacagcatatcacaagatatctgtttagcagaagattatgtagttactttaattttaatataaaagtagcttgtgatacattaccaagagatctctgattctttagtaagtttgagaacacctattctacagagatgataggtacttagaaatgaagactttaaagtacattttaatctaatataggccagtaattgggggaaggggctttgagcagtacaattttaagatgattttgagggttgtatttctttatcatttaaaaatatcctaaagtcagtaatttatatgaaggaaactcattcattat

SEQ ID NO: 8236 - DNA, 1102 bp, Homo sapiens
gatgattagaaataattcttaccttggggtgagtcagtcattttttctaattgtgttctgagaagccaggtggggtgagagtgaagctgttcttcataaatgcctcaggtatactcagaactctgggtccaccaccactgctcctccagagaagtgccatttttatctgttgtatatataagttagggtttttcaaactactgttctaagttcttttctacatttctatgaactagaatatttactgcacattgggcacttacttgctcttgattgcatattaatatctagtttattggctgttttctagtgtatgtcttaccatgatttttaagttttgtggtagagatcttgttttttttttcttttctctacctgtagaatctaactggtagtcagtaaataattaccaaaagtataacttgacccacatgagtcatttctgttgaattttctccttttccaaggtgctaaccggatagtattagaagactccaatatcttgcagcctgtgggacttactgtgtttgaaaactggctctattggattgataaacagcagcaaatgattgaaaaaattgacatgacaggtcgagagggtagaaccaaagtccaagctcgaattgcccagcttagtgacattcatgcagtaaaggagctgaaccttcaagaatacagtaagtgttaatgggataaagctaattggaggaatcatgtgttataataaattaatatgtacttttgtggatttttaaactctgtttccttgaagactttcatgcacttttagttttgccatttttttgaactctccatgcttttttttttttggagacggagtctcactctgtcgcccaggctggagtgcagtgtcacgatcttggctcactgcagcctctgcctcccgggttcaagtgattctcatgcctcagcctccagagtagctgggattacaggtgcatgccaccatgcctcgctaattttttttttttttaatttttagtagaagcagggtttcaccatgttgtccaggctgatctcgaacttctgacttgaagtgatctgcccaccttggcctcccaaagtgctgggattacaggtg

SEQ ID NO: 8237 - DNA, 1253 bp, Homo sapiens
atacacatttatttatataaaagaggatttatatatatatacacatatatatttatataaaagaggatatatatatatatatttggatacaaggtttggctcgatcacccaggctagagtgcagtgacacaatctcagctcactgcaacctctgcctcctgggctcaagtgatcctcccacctcagccttccaagtagctgggactacaggcacacgccaccatgcctggctaatttttggggtattttttgtagaaatggggttttgctgtgttgcccaagctggtctctcactcataagcttaagcaatacccccgcctcagtctcccaaagtgctgagattacaggcatgagccactgtgcctggtcaaaaaatacgtattttaaaacttttaaaaacaatacttaaaaatactctacctccatttgtcttaataagaatatcctcattttatgtggtttcttactccagtaacttatttttttcctcctttccctctaggtatatgtattttaccaatcttcaggaaaggtctcctaaaattgaacgggctgctttggatgggacagaacgggaggtcctctttttcagtggcttaagtaaaccaattgctttagcccttgatagcaggctgggcaagctcttttgggctgattcagatctccggcgaattgaaagcagtgatctctcaggtacccaagaaatatgtttccttattttaatttgagtttttaagatgattcatctattgtgtttttcttgcatcgtattgtttttggcacatttcttggcagttttattcattaaatgtagtcagcatcaggttggttggtgaagagctttttcttcaactgtcaacatgattactcctctgttacttaactacctgccagttttcttgatcttggttctgtaaataatatatttctttttttttgagacggagtcttgctttatcgcccaggctggaatgcagttcccgggttcacgccattctcctgcctcagcctcctgagtatctgggactacaggcacctgccactgcgcccagctaattttttctatttttagtagagacagggtttcaccgtgttagccaggatggtctcgatctcctgaccttgtgatccacccgcctcggcctcccaaagtgctgggattacaggcgtaagccaccgcgcccggcgtaaataatacatttctaatgcatcctttcctaactcttctgctctagtttatgttcttgtcatc

SEQ ID NO: 8238 - DNA, 1180 bp, Homo sapiens
cttggaccatatgaccaaatacattttcaagctttgcttttgacttcagttaaaggcttagtatttataattacctttcatgtacttctgcaacttattttgaggaagagttgattacacaagtcaaaaagtaagttcagcatattaaaaactcaaattagttaatattcaaaagtatataaaaatattttactcagaagtgaaccagattctgagaccagagctttaaacctttgctgttttcttgaatgttaattttacaaatgccagtactgcaataaactgttggtttatttccaattcctaggtttggatggaacaaatgtattggaaagactaaggaaagctgactcacttcctttttgggatatggaaaaaaatatttagtttagggtgccaaaataattgaaagcattgtagccgtgattttgtttaacccatttccttgatttgctgtatgttttctttaaatttatttagttactttgcatgaatatgactctttcccccagataataaaaaattgaaatgttaaatatttattattttgaatttagatttatgtattggactgaatggggtggaaaacctaagatagacagagctgcaatggatggaagtgaacgtactaccttagttccaaatgtggggcgggcaaacggcctaactattgattatgctaaaaggaggctttattggacagacctggacaccaacttaatagaatcttcaaatatgcttggtaagctttactactttttactcaaacagtatattctttccatgcaaatatcagtggctgctatttatcattggttagatacttttaatacaacttcatatgaatgtgtccattcttcttctgttctggaattgtatcctgtttgttattaatagtgatccaggtacttggattcatctttttattatgtgaaagtttcattattattggacttgtaatgaaatttataactccctagatactcctgaaatgacttttgtaccagtaaaatatatatatttccatcttttccttctatagttcaagaagaaaaagtgaactgtagacccttatatagagaaaataaaaccacatttaaagtagaccatttgcaagaattttaggaaactgagtgatttgtagcaggaatataagtttgaagcatggggtcagaagata

SEQ ID NO: 8239 - DNA, 1159 bp, Homo sapiens
actttgagatttattctgaggacaagcatagtgacaaattacacctcagtatataccaatgccttagagccatctaaacatccaggagccgtaagaatcacttagcactgcaggaagaaatagttattttgagaattcagtttgccatctgactaatactgctgggataagccttttgtgtcagagagatgacaagccatcaaggaaaagagagagaaagttcatggaaaagggcacacaaaatatttaaaaaaaaaaaaaaaaaaaagaagtaaaactgtaatctcattattgggaggcattttcaggattggctctagaacacactgatctgaaaatttcccacaatcttatatattgctgggataaatgtcttaaacacctcttcatatgtttttttttttttccccttccttggcattaactgatgataccagtgtaataggagggatggatctcacctttagaatatctgaaagttacattttattatctatttttagctcattttttgtatacttctctaggtacatgtattggactgactggggagaaattccgaaaattgagcgagcagctctggatggttctgaccgtgtagtattggttaacacttctcttggttggccaaatggtttagccttggattatgatgaaggcaaaatatactggggagatgccaaaacagacaagattgaggtttgttttttgctttttcattttcaagccacttttataatgggttttgagtcgacagtataatgatttgagtacagatattcttttttcttaacagttgtctggggtgccaaaggtaccttttacagaaattttactcaaccttcatgattctagggataatatattctcttccacataatcctaggatggagagatgtattggtatgagaaatggctgctgatcagtttctagtcttaaaagcttatgtaagtgattttcctcattttgggtaaagccactttctgaatttcctaggggcaatttctgcaaaccaaaattatgtaagatctatactggaagaactggctgtcctaagttaggaaaacaaagcccacatgtatgtgtatatctatatctatatctatatctatatctatatctatatctatatctatatctatatcttttattgctgtt

SEQ ID NO: 8240 - DNA, 1430 bp, Homo sapiens
acatagcatataaaatccatccattttttaaattgtacaattcggtgactttttagtaaatttacagagttacgcagttatcaccacaatccaattttagaacattcctatcaagcacaaagattcttgtcctaaatttctttatctttttttaaaaaatgcttcttgaacaaaggatctatatcctacatttccttctcctttaatactgagctacttagcttcttagtcattacatagtcattattcattgtacttttaaatagctggattaattccaatgaaaccatagaatgtatcacaacttaatttggagagttagccattaaacagcttgacctcagagtagactcttctatttcactgtattactttccatttccactctaaagagagtgcacatccttttgtgttaatttatgtatattttatatttatttttcagttcttgattctttatctagagcaggtaaattttacctctgggtttcaaagtattcttcatttcactttgttgttctaggtgccacagaattattgcttttagctcgaaggacagacttgagacgcatttctttggatacaccagattttacagacattgttctgcagttagaagacatccgtcatgccattgccatagattacgatcctgtggaaggctacatctactggactgatgatgaagtgagggccatacgccgttcatttatagatggatctggcagtcagtttgtggtcactgctcaaattgcccatcctgatggtattgctgtggactgggttgcacgaaatctttattggacagacactggcactgatcgaatagaagtgacaaggctcaatgggaccatgaggaagatcttgatttcagaggacttagaggaaccccgggctattgtgttagatcccatggttgggtaagaagctctactgatagtaaattctgtgtggtgtttctgtttttcacaggttcctgaaaacattgactaagataacatgacatatatattggtttccagtaaacagctctttaatggctgtctattttaggatatggtgattagaatacaatctcaagtttaaaaattgctagttttttgccttggatgtcttagatattttttctttctaaattaagtccatgtttgctgactttgggtgttgtctgcagattttgctcggattgcatcattaccatgaaaaatgtgggaagaaattgttttcagaactctttcccttcccctagaagctttaattccattttcagtactttatagtaagaatatagcttacttttttttccctaaatacatgaatgacttgatttccaaaactttgccagcccatgcagctttacttctagtttgttgttgttgtttgttttgttttgccatgccaccctgatcatagtccagggaagtacaact

SEQ ID NO: 8241 - DNA, 1170 bp, Homo sapiens
aggctcaggttctttgttcttccacatcaagaaggaaaaaacctattgctgatataaatctacttcagtgccaactgtaacccctgtgatttttctcattgcttacctttctctgtctgatgacatgaattgtgtgaaagggtggaagctgtgagtccagagatggtagttgaagagtaggatttgacagcagtgcaaacaatgaaaaagcagtgctctctctctgccgggtatcttgtactgaacttgaggctgctgccaagttagggactattcccaaatgcttgtttggggcttttggacaccttaaaaatatatatgaattcattatgtgaattattttttataggtgtatttgacctattggtatgtattactcaagatttgtatgtgttaatgtgaactaagatcattttaatgggagaggtgacgttatgatagaagaagaaaatttagaaataagtttaaatttttctctttatgttaataggcaggcagtggttaaaggttcccttccacatccttttgccttgacgttatttgaggacatattgtactggactgactggagcacacactccattttggcttgcaacaagtatactggtgagggtctgcgtgaaatccattctgacatcttctctcccatggatatacatgccttcagccaacagaggcagccaaatggtaagtgatccttgatttttaaattgcaagttggaacagctttgtagcactctaatgtctggctttagtgaggatcaggaggagggagggcatatccaaagatagttggcgggaataaaaaagagttaaaatcctacttgggaggctgaggcaagagaatcacttgaactcgggaggccgaggttgcagtgagctgagattgcgccactgcactccagcctgggagacagagaaagactgtgtctcaaaaaaaaaaaaaaaaaagttaaaatcccagcactttgggagactgaagcaggcagatcatatgaggtcaggagtttgagaccagcctggccaacctggtgaaaccctgtctctactaaaaaatacaaaaattaatggggtgtggtagtgtgcacctgtagtcccagccgcttgggaggctgaggcaggagtgtcacttgaacccggaaggtggagattgcagtgagccgagattgt

SEQ ID NO: 8242 - DNA, 1322 bp, Homo sapiens
acaaataaattggtatgagcatttgcatacaagtctttgtattgacatatgtttttgtttctcttgagtaaatacctagatgtggaataaacagtatctagctattgccttggattgtatagtaggttgtatgtttaaccttttaggaaactgccaaactgttttcccaagtggctgtaccattttacattcaccccagtagagtatgagtgttccagtagctccatattattgccaattcttggtatagccaggctttaaaattttatctgagttattttaacaagaaaagactatcgtggtggaaatagttccccccatttcctatgtcttattttttaaatgctgcaaaaataatattttgtgtgtgaagtttagatggtctcctaatgatttatttattcttttcttattttcgacagtctttgctcacttaaaccgatttgaaacgcagtttataagaaccaatacgttttcttccttttcacttacatatttttctttttttgttctagcggcccctttgttgctttatgcaaacagacgggacttgcgattggttgatgctacaaatggcaaagagaatgctacgattgtagttggaggcttggaggatgcagctgcggtggactttgtgtttagtcatggcttgatatactggagtgatgtcagcgaagaagccattaaacgaacagaatttaacaaaactgagagtgtgcagaatgttgttgtttctggattattgtcccccgatgggctggcatgtgattggcttggagaaaaattgtactggacagattctgaaactaatcggattgaagtttctaatttagatggatctttacgaaaagttttattttggcaagagttggatcaacccagagctattgccttagatccttcaagtgggtaagtttttgtacagtgtacgaagatcatcatacctcctttcggtttttctccactgacatacaccaccctgacccctatgagaaaagaaagatcgaaaacaggaattttagattctttgggcttctttgttgagtagacttgaatgtggaaagttacgttgtgttattattatttttgacagggtttttgctttgtcactcaggctgtagtgcagtggtgcaatcaaagctcactgcactgtcagcctcccaggctgaagtgatcctcccatttcagcctcccaagtagctgggactttaggtgtgcgctaccacacctggctagctaaaaaaaattttttgttagctgggcgtagtggcgcacatctgtaatcctagctagacgggtggctgaggcacgaaaatcacttg

SEQ ID NO: 8243 - DNA, 1237 bp, Homo sapiens
aggagcgccagaaaagatacgccaagtatgccgagcagatccagaaagtgaacgagatgtccgccatcctccgccgcatacagatgggcatcgaccagactgtgcccctgctggacaggctcaacagcatgctgcccgagggcgagcggctggagcccttcagcatgaagcccgaccgcgagctcaggctgtagctgctgcccggcctgcctggggctgggagccccagacaccgacaccctgaggacgtgtggagctaaggtcatatcatctgaccaggtctggaggctggcgggaggctccctgaaagtgggtgcgaaggagtccggctggcatgaaaatctgactttgcccagctcttttccttgatgcagtttcccggtgtggaaggaacctaaccagttctcggtgataactgaagctggaacgtgtgaattattaggaattctttgaagaactctgcattgagaattatttttatttagtttttttttttttttaattgagagtatatagtccagtccaggtaccggaataaaaatatggagacaaggggaaaatattttacgaagctctgtgttctcaacgccctcatgaacttttcagtaggctgtctggtttatgtgtggtcaacttgaaaaactaattgaatctaggtctctgtattgttcctgtttctaccctgactgtttccgtcacaccaagcccttatctggggcgcgtcttcctgcccaggtggaacactggcattttgttgactgtcaggttaggtgtcccttagtcgtcatcagaagctgaagccttcctttccacaccctcatcagattcatctccactgataaccggtttccttgatgcagacatagtttagctttctttgactgcagagatgtctcattccacagacatttcttgaacccatttgatgtgtccaatattgtgccagggatacaaatatggccgtatagcctcaggccttcatttctgaaaagaaaaaagctcaaaaagctgctgaatttctctgggagtttaggaaaggaagttatttgagtaacaacaaaagtgcttagtgtcgtactttacacatcataggtgttctaatggaagcaaggactggagaagcaaagagtggaatgtgaggagcagacctaggcagacaccttgagactaaaagtcagagctgaagggagtcgctggggccaggacggcatgcaggcctgtaccctgttccctaagt

SEQ ID NO: 8244 - DNA, 2176 bp, Homo sapiens
gacaggaaagtcggggctttgaccactaccatatctggtagcccattttctaggcattgtgaataggtaggtagctagtcacacttttcagaccaattcaaactgtctatgcacaaaattcccgtgggcctagatggagataatttttttttcttctcagctttatgaagagaagggaaactgtctaggattcagctgaaccaccaggaacctggcaacatcacgatttaagctaaggttgggaggctaacgagtctacctccctctttgtaaatcaaagaattgtttaaaatgggattgtcaatcctttaaataaagatgaacttggtttcaagccaaatgtgaatttatttgggttggtagcagagcagcagcaccttcaaattctcagccaaagcagatgtttttgccctttctgcttcactgcatggatacagttggtaaaatgtaataatatggcagaattttataggaaacttcctagggaggtaaattatgggaagattaagaaaggtacaaattgctgaggagaagcaggaaacctgtttccttagtggcttttatcccctcggcatgcgatggggctgatgtttctatgattgcctcagactttcacatttactagtagggctgagagaggctttagtgaggaaggaatattcagaataaaacggttgagaaagctgagaagaccattgagttttgatcagttgtgaatagagtgcaaagccatggccaagctgtttttggaaacgctggccggcgtgtcttcagtggaaaaagcaaatcaaaatggagcgagagcaaaggggcgtcctcagtcctcaacctacaatcactgtatggaatcggtcctggcagctgaacataggaggtcactggaacaagtgatagtgcagattggctttcaaacatcctcctggcttgagttttatcagctacaatgtgggtcctcttttgaagccttaattcacaacagcagctttttgggggtggggctgggcgggtgttgtcattgttctttcccttcctgtaagtgtcgctagttgctgcctcgtatctcaggtttttctctgtttttgagaaatggacagttttttgaccaggatgtgacttcatgtttcctatggtgacttctaaaaccagcacagaatgatatgactcaacacagaccgacttggttatggggatgatgagccgcacagacctcactagttgtgcacaaataatgtgctatgatggggtgtaaagtgaaggcagaagagggtcagccgcattgttatgatactgggaaagtgctggtcaacgatttgagttagtttttagatatacattgaaatctttaatcagacattctcaagtttcacacagtagtttttgatgttatgtacacacacaccaaatgtgtaacagttcaccacttccagagtgtggtcatgcccaaaacatgtttaagaaaggaaagcagtagctccttgctaacgatgtttcaggaggtttgggggacttggttttaatgagcttctgtcatttagggcttctcttggccatggtcccccttccttctggaactgtgatgtagtcacatcctacagcctttagtgctggttcactagtgtcagataatcagttcttggaatcgagactgccgtggcgaaggggtggcctcggaggcaggctctggagctgcttggatgtctttaggtggggtggtggctggctctcttcagcatgtaattggggaaaccctcgcgtctactaggggtgatacagatggtgattttaaagagcaaaactagacttctatgtgagaagtgctggaaaatgatttaggacatgtgtaaagttagatggaaagactgtaaatgtttaatatgaatatagtgttcttttgaagtaaggccagctgttgaacggttaaactgtgcatttctcattttgatgtgtcatgtatgttaatgtatgaaatgattaaataaaatcaaaactggtacctgtttatacataaatacgagaaaagacctatctttgcagccataaactcggtgggaacaccaccactcaagttgccaaaggaggcagtggtgaaacctgtcctgttctcacttaaatgaggatttagctcaaaataaagtggtggtgtcatcaggtttattccgtgttctgtcattcacat

SEQ ID NO: 8245 - DNA, 1160 bp, Homo sapiens
ttgagtttttacattttgaggtaaaatggaattatcactagcacatttttctgaagccataccaatttgtcctttttatttgtttgttcaaatgaagcagtgcatcaagtatggaattagattaatggagtaaatattatgaatcatacactctctctaatctgacactctttcttctttttttgacctcacgttttgttttctgtctttctctctccgcgtaggctttcagtccagtgtaaagctgttggagcgcgggagcaaaggtaaagaatgatgtaatgcgctggctgctccaaagcatcttttgttgtggaatggttattccagtcatctctttatgaatcaaatgtgaggggctgctttgtggacggagtcctttgcaagagcacatcaacgggaaagagaaagagacattcacttggagggctcttgctgaaaatgggtttaactctccttttgccagtcaccaccagcctgacctcatacacttttagtacaatggagtggctgagcctttgagcacaccaccattacatcatcgtggcaaattaaagaaggaggtgggaaaagaggacttattgttgtcatggcccatgagatgattggaactcaaattgttactgagaggttggtggctctgctggaaagtggaacggaaaaagtgctgctaattgatagccggccatttgtggaatacaatacatcccacattttggaagccattaatatcaactgctccaagcttatgaagcgaaggttgcaacaggacaaagtgttaattacagagctcatccagcattcagcgaaacataaggtaaacgctttcctttttgccttttcaaaataaatggacacactgaatgaggaataattttaattgaagcctcctctttaagtagagaaagtaatttgaggaagttttggttgctttttaaattttggtgccttgtggtacctcaaaataatttattgtccatattgccacatttaataatatttctaaactatgaaggattaacttgctttagtttggacaagtgctatattttcttgtggcttgctaaaatgattttattaaacactattctatattatctgcaaatttactgaaaggaaagtcattcttttcaagttctttggaaagaaagtaggaacta

SEQ ID NO: 8246 - DNA, 1227 bp, Homo sapiens
catgtaattgtatgtctgtgtgtgttttatgtgtcaccacctttcatgtttttgattgccctacaaagagaaaccaaatgagctgattactgactataagttctcagcctttatggacctaatcttatttttatttacttgagtaatgtttattctctgcatgaaccatgatttctcctgtgagccattccagcataagctgtgaatatgtattaacaaatatatacatttctatttttataatccataaggatatgcctgttttaaataacatacatattaacaatatctatcaggaaaaccctcaagacagcttctagttaaaacctttgttgctgtcctctcaaactatatttataaaaatttgctagggccaaatccatacttgcagaataattcatcaaattttatttttaagtgaaaagtaacctttcaggcatttcagcagcatacattgacaatctagggtatatatgtatgtatgtttcttattgtatgtctatatatgtatgtggggaggacaggagtgaatgttcacacacttttcttgcgtactcaactaaattggagaatgtttctgaagaaaattggatgaaattagctgctgagattgagtttctgccttaaaatctgaaacaaaaaaagggacaaattgctggtagatctactgactgtagccatcaccagaacacttagtttcttcccagacatgaatttcctgacaggctctgagccagaaacacactgtgggcgtgcatctggttcagccctggatatgcctccactgtggagggaagcattggaactggagttgtgcacagcaccgcagctagtgggcctggctgggggtgcagaagggcagggtagttctttccatttccccttgcagctacacttactttctccctgactaccaaatggagtgacggttgaagaatcaagctcataatatgatacacccagacagacccagaaatcttttgatttccccagcgagatacttaccactctctcttctctttcccatggttaaaacaggagttgtgttctctgtcgctgctaaattattcttcacttgagtgaagcaaatatttagcttccaaataaagtatattttgttctgaactggcagtttaagaggagataccgtagtctagattgtctttgaggtagaatatatgatggaccacatagtttaagattacaaggtactttccctcttctctc

SEQ ID NO: 8247 - DNA, 1237 bp, Homo sapiens
gagtgcatatcgtgcttatattatcaccgataagccagacatgccaggaattcacaacacattaaatcacaatactgaggtcatgatgtaatcatataattccttcccatccccatccttgaggtaatttttcctttgtctgcttattatgtggcttttatttaggatgaagcccctggttttgtgctttgatataaggacttctcctgtttgctgagtacagatctcctgcctgccttaaggctaagtggggaatatgtggttcacagagatgataatgctggttaaggaatgcaaagctggcagctggaggtctggataattgaaaagcgactataggcttagtctttaccttatgtatatgccaggtctccaatcctgtctcccaggttcaatgacatatattgttttgggtttgtaacttaggatacctacctggtttatattctaaatgaattggctggaaactcctttatgatattctgcagcacctgtaataatacccagagaacagctttgctactgcgaaatcttggcttcactgccatccccctccatggacaaatgagtcaggtaaggattcatcatcatcatcagccatgcactggtggcgtgagcgagataaacctcctaacagtaggtttgtacaataaggccatagggcaccgatgcctgtttccataattgttgtaattttatgggctttgaagtgttgctctagatacttactttctcctttcagggtagcgagaggctcccattagaatatttcatatgtacctgtctggtttgcaagctgttgagttgatttattcagccctagtggtaataatgactctggcctctaaaaacattaataaattatttcccagttacctttctatcgtgtcaaactacccttattttgtatcatatatatttttttaattttttgttgcttccatatttctgttttgacctgtgaagccccattcaaaacttagggggaaaaacctttaaaaaatttatgtctgtttgttctcgtgtttgtctattttgtgttttgtattccaaaacataggttaagttttccaacatttctttttcattacctcagagtaagcgcctaggatcccttaataagtttaaggccaaggcccgttccattcttctagcaactgacgttgccagccgaggtttggacatacctcatgtagatgtggttgtcaactttgacattcctacccattccaaggtg

SEQ ID NO: 8248 - DNA, 1367 bp, Homo sapiens
tttacttccttagaataaattcctagaagtacacttgttgggccaagggacatacacagttaaaatttgaattcatacagaatgccaaattgtcccccgccccaagaaaagctatagcagattgcactataaatgagagtatatgtgaatttttctacaccttggccaatactggggattacccttctcttaagtctttgccaatctgccatgtgaaaataaaaccttactttagtgttcacgttttgattactaataaggttaacatctttgtatatttggagttgggtcttgttcctttgctaatgtcaggcatcagcaagttacttgatacttgatcttaaggagaggggactagaatgagtaaccttcagtgccagtaattcattttcaatcccatcctctctttttttcttgcaggagttaagggagcatggagaaaagaagaaacgctcgcgagaggatgctggagataatgatgacacagagggtgctattggtgtcaggaacaaggtggctggaggaaaaatgaagaagcggaaaggccgttaatcacttttatgaaggctcgagttctgctgttctgtaaaagagaattggagaatgaaacctgctccaacagagatcatgagactgaaattggtcagaattgtgtccagaatgtgctcagctaattcagtattcttccccattctgggttggagtttactgcagagtaattcttacagtgctgatgtcaagactgttactgttcttcgactttgattccttgctcatgacatgagtagggtgtgctcttctgtcacttcacacagaccttttgccttttttagctgcaagtcaaggactaggttgatgatgcccatgacctgtaattgtaaagaagcttggacatctgcaaatgatatttaaaccatcttggcttgtgctttattcaaactaatgtgaaacaataaatttaaatattatttttaaaagattctaactccttaaagaccttggtgttaaagggccttatagatttaagtaagatcttgttaataggtaagaacctgacagtgttgattacatggcaaattcattggttgtcctaattaagataaatatttattacttaaaaaaatcaacaaggaaacgagatgatggatggctttgaaagggaagccccagccgggtgtggtggctcacgcctgtaatcccagcactttgggaggccaagatgggcagatcaggaggtcaggagattgagaccatccttggtaacaccgtgaaaccctgtctctactaaaaatacacacacaaaaaaaacattagcctggcgtggtggcgggcgcctgtagtcccagctactcgggaggctgaggcag

SEQ ID NO: 8249 - DNA, 1299 bp, Homo sapiens
ccgcattagagtttttcacgtccattactgcttttaacactcaaaactctagaggaaaaagaaaatatatctcctttttcagatgaggaaactgaggctcagagaggtaaaatcaacccatctaggaagtggtgactcagtccccagtcttaccactctagcatgcttgtcataataaacatggtgagtgacttttttctaaagatcccccctctctcagaggtcatgtcctttcgtaaccagcccttgctcttgaacccccaggcagtttggtggttatgccaaggaagcagactacgtagcacaagccacccgtctgcgtgctgccctggagggcacagccacctaccggggggacatctacttctgcacgggttatgaccctcccatgaagccctacggacggcgcaatgagatctggctgttgaagacatgagtgacccactgaaccaagaacttactggaagtgtgcctctgtgtctccttcctcgggggtaaggaggggacagtgcttcccaagttccagctgcaagtccaacttaaccaactttccttcaaagtcagttactgccaattttctgaaaaaagcatgttccatatactaagtctcttttctcacagtaggaaataatacagccaagatatgcagcatccttctcattgatgtagaaaattctgcgatagaccagaaaaatcctggcagcttttctccaggcatctgggtcactaaaaactgattttctaaaattattggatttgtattttgttattaagggggaaaatgtgatttgtgcctgatctttcatctgtgattcttataagagctttgtcttcagaaaaactaaaaataaaaggcattgacttaaacagctgagacaaatcataagtgtaattatttccaaggttctacagtcctgaaggtaatataggtatgagtactattgatggtgtttaccattgcaggaaccctatatttagagctcccaagtccttccgaatataaacgcaaagataccaggacacacaccatccctaaactagacatttcccatgactgttatgtagcactctgtgattataagttgaggattttgtttgcagctgtggtctgcgaagggttccaggagtcacaagagcagaccaagaagaaaaatcattgcactatggtgcacagactaccctggagacaggagattttccaggaggattggtttagggggatgagatgagaagcagctggggtccagtttcattaactgaagaggataggaaggaaagaaaaggtgcagtttggcctgc

SEQ ID NO: 8250 - DNA, 1117 bp, Homo sapiens
cttttcccctttttaattagctgggttttgtggtcttttttatatttcttctgaacaaaagatttaatgatagagtttacattagtgatagattactgcataaagtctccccaaaagaaacattttcttggttgttacttggtggtaacatgaaataaaggcataaaatcattcagtcattggcagtgaggccaaggggtgggtggcttgggaggaggtgtacctaggctcttctgtaatttctctctcagctatcccaaatcaacactgcaagctaagtaaaaacaaagtgcttgccatgcaaagcaccttcaagacaagtcccctacctctgtgtactggctagatcaccacccctcccagaatacttgctcagaagagcagtttttggggtaaacactgtttactaaaagatagactgaaagggcattcaaatcacaggatggttcttagaagtgagatttcaatacatcttcagatgaacattcagtgttcaactttctaagttgtttccatagaaacagttgggaagccacagatattgggctgtgagaagcagcgtatggagaagaattgttctaaaagtttaccaggaaagattaggatgtcacagatctaagaagatctgaggcaatatgcacattaggcacatggagagttgatgtggagccatgatctttttcttgagtgagattcaaacacattaagagagctttctttttaaactaaaggcattttaaatttgctaacttctgcctccttttccattgtcttaaactcatgcaggcagtgatcctggagcactgtgcttttgtttttccttccattcctaacccctgcttcactggcttctgttttacagatagccaccaaggttcaaacttgatgtaaacctggatttttttgttttagttttccgtgttcttctgggtatttacagttgccatatatttggtgagggtgtcttctccccagttccccttgactctctgtttttctgtattttcagggaagaagagcccagacctaggggagtatgatccacttacccaggctgacagtgatgagagcgaagacgatctggtgcttaacctgcagaagaatggaggggtcaaaa

SEQ ID NO: 8251 - DNA, 2580 bp, Homo sapiens
agacttcttcgtcctcatttaccacctccctgatggttgcaaaggcttgggaaggcatgttggagtctttgacggcagcatgatctatttggctggggcatcttacctaccttttcagtccctgcattaatcccctctaggaactctgcgtggatcgtttggaaatgtgaatctcttaagtatttaatttttttggtatgtctaatttatgaagtcttgctgggaaagccagtgaagtctatgactaggaaacattttgttgtacattgtgctgtgtgtgtgtatattttagtgttgtggtgaagttattttccaggtatgtcctaagcttcagggatccagtttcttgtccttctgaaatatatctggtttgtttggtcattttgagacttccagatgccctacctctgatgttgagggccacttatttctctccttattctttcccacctgtaccttggctacttccaaattgtagacagaatgagaaagatttatagtggaagactgagttagccatccaagcattttcatctctcttgttttatatcctatttccttagattttccatccatgtctattaagtgaccacaagaataactatattcctatcacaaggggagcaagaggatgtagtctcagtgacccatctctgaccaagtccacatgttgtgttatatgtggctctgatggttctgccagtcatgatcttttttctgtggcgacatcagaagtgtatgtttgcatgctgtcttcaacttagaggagaactggaagtcaggagcctttgatgtccttatcctgctgtatgtcttctctgcatctttttctatagggcaccctccttagctcccctcactctgttttctcttctattcagggatatgtttctggactttttcttctgctacttgagtccaggatgcaaccattttgtcctgcatctcttctttcctgtagagcctttgaagcattgtattttgggaaaattcttctgtaaatactataacttttataaatggttaagttatttagaattatctccagtgcttacttctcccttcttctgtataaatctgctacttcaattaagttctcctctaaacttttaggtcattgtttatatagcagaaaattcaatgttagcggatggaaaactgcttcttgaataaccttgataggtcatccctgagtgcacctcaggttctctctttacctgggcttgtatcttttttttttttttttttttttttttgagacagagttttgctcttgtcgcccaggctggagtgcagtggcacaatctcggctcactgcaaccttcgcctcctgggttcaagcgattctccagccttagcctcccaagtagctgggactacaggtgcccgctaccatgcctggctaatttttttttttgtatttttagtagagacggggtttcaccatgttggccaggctggtcacgaactcctgacctcagataatccacctgcttctgcctcccaaagtgctgggattacaggcgtgagccaccatgcccggctgggcttgtatcttttagcttgtgttagtaaaaggattctagaaaattatgaagtccagattcaaagggatctctgttaattacccactgacaggcattatgacctaacaggaggttggtagcagtagatccaagcatgcatgttgcctggcctgtagattggccttatcaggtttctgggtgcctctgccttaagatcctgaaggcaaattttgtttcaacagtttggaagtcatctgtgggtccagcttgactttggaggaataagaagatacttctagagtatgggaatgattccagataatttctgggatttgaatctacttgagtttaagggcctgggacctaatttggtttagtatagaatttgaagaattaatttataggcagctgaatacccaaaacttgggtggtggtcctgtggtttggctgagctgtccgggcataacctggttctctgttatgttaaggctttctgggaagccagccactctgcgcaggagtgaaacatgaagttgttttctgaggacctgttttggtgggattgtttgggcagaggactgtgtttatgcagggcaaatcccagaaagataagaggaagctagagaaacttaatgtacctgaattcttcatggtgtatttgcaaactaacttaacatagattcttttgactatggtaagtttgaatctctccttgccaaacaacattataagtttagttttcttcttcctcttgcagccggtacagaaaggtgtaagtggtggctgaaaattgaggaagcttcatctgaccaatgtgggtgctggtttcttgtgaaatgtgtccctaagcctccttctccttgcaggcagccacccacccaggtgtctaagataggacatgctcctttctttctctaatcccatcctgaggttgccggcaaagccaatatgaccactactgagaaatagtaatgacttctacaaatgcaagggtcttaccctcctctttcccttaaacaccctcccttttccttagaccccgtttttgccatcc

SEQ ID NO: 8252 - DNA, 2409 bp, Homo sapiens
gggggagggggaagcaaaggggggaggtcaaatcccaaaccattactgaggggattctctactgccaagcccctgccctggggagaaagtagttggctagtactttgatgctcccttgatggggtccagagagcctccctgcagccaccagacttggcctccagctgttcttagtgacacacactgtctggggccccatcagctgccacaacaccagccccacttctgggtcatgcactgaggtccacagacctactgcactgagttaaaatagcggtacaagttctggcaagagcagatactgtctttgtgctgaatacgctaagcctggaagccatcctgcccttctgacccaaagcaaaacatcacattccagtctgaagtgcctactggggggctttggcctgtgagccattgtccctctttggaacagatatttagctctgtggaattcagtgacaaaatgggaggaggaaagagagtttgtaaggtcatgctggtgggttagctaaaccaagaaggagaccttttcacaatggaaaacctgggggatggtcagagcccagtcgagacctcacacacggctgtccctcatggagacctcatgccatggtctttgctaggcctcttgctgaaagccaaggcagctcttctggagtttctctaaagtcactagtgaacaattcggtggtaaaagtaccacacaaactatgggatccaaggggcagtcttgcaacagtgccatgttagggttatgtttttaggattcccctcaatgcagtcagtgtttcttttaagtatacaacaggagagagatggacatggctcattgtagcacaatcctattactcttcctctaacatttttgaggaagttttgtctaattatcaatattgaggatcagggctcctaggctcagtggtagctctggcttagacaccacctggagtgatcacctcttggggaccctgcctatcccacttcacaggtgaggcatggcaattctggaagctgattaaaacacacataaaccaaaaccaaacaacaggcccttgggtgaaaggtgctatataattgtgaagtattaagcctaccgtatttcagccatgataagaacagagtgcctgcattcccaggaaaatacgaaaatcccatgagataaataaaaatataggtgatgggcagatcttttctttaaaataaaaaagcaaaaactcttgtggtacctagtcagatggtagacgagctgtctgctgccgcaggagcacctctatacaggacttagaagtagtatgttattcctggttaagcaggcattgctttgccctggagcagctattttaagccatctcagattctgtctaaaggggttttttgggaagacgttttctttatcgccctgagaagatctaccccagggagaatctgagacatcttgcctacttttctttattagctttctcctcatccatttcttttatacctttcctttttggggagttgttatgccatgatttttggtatttatgtaaaaggattattactaattctatttctctatgtttattctagttaaggaaatgttgagggcaagccaccaaattacctaggctgaggttagagagattggccagcaaaaactgtgggaagatgaactttgtcattatgatttcattatcacatgattatagaaggctgtcttagtgcaaaaaacatacttacatttcagacatatccaaagggaatactcacattttgttaagaagttgaactatgactggagtaaaccatgtattcccttatcttttactttttttctgtgacatttatgtctcatgtaatttgcattactctggtggattgttctagtactgtattgggcttcttcgttaatagattatttcatatactataattgtaaatattttgatacaaatgtttataactctagggatataaaaacagattctgattcccttcattgtgtgaatgtttttttctaaaaaaaatgtggagaaatatggataattatgacatttatccctcattaagctgcctatcagtttgatttggacaacttgacatttatttgagacattaagctactttctggtaatatattaggcatttctgcaatagctctttcaggtaactgaatattattaagcatagttttatcttgctttgattaaacctcttaggcaaaaaatggaacttcataagctaatacattagaaaggggttatgattataaatcagaaatgcttgtgacattaagaaatgaggcacttgtgaaatttctttgaaatagccagctcctctaatgtgtcttcaaaatataaagtgattcacaaaggcatgcatcacacctatttgtagcagcccattcattacataaaccagggcata

SEQ ID NO: 8253 - DNA, 1100 bp, Homo sapiens
gtaagaaaaaagttactccgagtttcattaatctatggcactttgtccctcctctcccctgcggcctaactcccaaatccccttcagctatagtgaaatacacagacgctgaatatttgggaggattacttaacgttttagctttcctggtttgcttagaacatatgatctactacccgccagtaatattttatagcttagaagatcatgtctgagtcagtaaattccatgttaatatgtgtaagactcaggattaaatcaatctgtaaaatgcctatttgtaatcgaatctagcaattttctttctgaagtaaacagtaatcacattaacaacctagtgatttcactggagatgggaagatataattttatttaacagattttctctctcagaggtgacctaactttgtgatccaaaatcattccaatattgaaaaaaaaaggttcagctaactccattcccctgatatattcagttctcagtgccccttggcttcccaatttaagtcaatgtaatcacaatgcacacaaggctcttccactcagaatcttcttgactggagaatggaaatcattggagaggggctgccctaaaggtttgtagacaaggttttgaagaatcgagctacaatgcttatcaatgtctgtctggaagaaagcctacgtctctttctaaagccagcctgtcaccatttctgagccatcaatggcagcacagcctctccttctgccagagctcacagggaatgacaaatctctgagggaatacaccagagcatctggatgtgggtgtcatcgtctcttcaccaccaaaccattctaccccaatttccctcttctttgtttctagattatttttttttcaactcagtgaagaacatttctcagaaccaagctttttgtctgcttgtcactgaatctatttcccattcaaccttctgtttctcattccaatagacacacaatattaatggttaaaaataacatgcaacaactcactgggcgagaaatttagaaacacttgcctcctatgaacccagggccaaggggagctgaggatagtgtcacattaccagcatgttcaagctagacatcctcca

SEQ ID NO: 8254 - DNA, 1132 bp, Homo sapiens
aacaagcagtaggttttctatgtcttaaacattacatgaaatgtgctgcttgcatctcttctaagatcaatttgtattaagtctacaattaggtggcttctgtttcagttattaaactctctttctcttttttcttaaagattcagaatggacagtttagaagaacctcagaaaaaagtctttaaggctcgaaaaacgatgagagtgagtgatcgtcagcaacttgaagcagtgtacaaggtcaaagaagaactgttgaaaactgatgtcaagctgttaaatggcaaccatgaaaatggagatttggacccaacctcacctttggaaaacatggattacattaaagacaaggaagaggtgaatggcattgaagagatttgttttgatcctgaaggaagtaaagcagaatggaaggaaacaccctgtatcctaagtgttaatgtaaaaaacaagcaggatgatgatttaaattgtgaacctttgtctccccataatataactccagaaccagtctctaaactgcctgctgaaccagtttctggtgatccagcccctggtgatctggatgccggagatccagcctccggagtactggcctctggtgattccacctctggtgatcccacctctagcgagccctcctctagtgatgctgcctctggtgatgcaacctctggtgatgccccttctggtgatgtgtcccctggtgatgccacctctggtgatgccactgctgatgatctctcctctggtgatcccacctctagtgatcccatcccaggtgaaccggtccctgttgaacccatttctggtgattgtgccgctgatgatatagcctctagtgaaataacttctgttgatctggcttctggagcaccagcttccactgatccagcctctgatgatctggcctctggtgatctatcctctagtgaactggcctctgatgatctggccactggtgaactggcctctgatgagctgacttctgaatcaacctttgatcgtacctttgaaccaaagtctgtaccagtttgtgaaccagttcctgaaattgacaatatagaaccaagtagcaataaagatgatgattttcttgaaaaaaatggagctgatgaaaaattagagcaaa

SEQ ID NO: 8255 - DNA, 1104 bp, Homo sapiens
tgttaagaataactattactgtgctagttttgtaaggctgatgattaagaattttttcctatacttacggaggaaaaagaataaataattaaagctgtgcatagttaaaaatctgacatgagaatgaatactatattttgtcagaggattcatgtgcactgtgacatttagttacaggaatgaatatgagatgatttcatctaccttcttcatgacacaattgtgaggcagttcttagtatgaagatttcaaggaaattctgtgttcacagtgtgcattgcttgaccattagggagttcttatttagtatattgaaagtcatttgaagtttaaagctaaaagctatataccttctaagatctccaaaacagtttacaaaatagttggttgagaaggctattatgatagaaataatattttgctaaggatggataatatgcattaagagctataagaaaaacacctgagtgtgatcattgtggttttccttctcagatgaattttctagacgaaaacgttctaaatcagaagacatggacaatgtacagtctaaacgtcgtcgatatatggaagaagaatatgaggcagaatttcaagtaaagattacagccaaaggagacattaaccagaaacttcaaaaggtattgtgtcaattataagttataaaccatattgaataaatagcaccactatcttcttctaggtttctgacattattctgtattttattgacataatgtggtttatcatagaaagaaagaacttgaagaaagtggttgagcttttaaagtctattactggccagatgtggtggatcacccctgtaatcccaatcctttgggaggctgaggtggatggatcacctgaagtcaggagttcaagaccagcctgaccaacatggtgaaactctgactctactaaaaatacaaaaattagctggatgttgtggtgggtgcctgtaatcccagctacctgggaggctgaggcaggagaatcacttgaacccgggaggtggaggtggcagtgagccgagatcatgccacttcactccagcctgggtgacagagcaagactccatctcaaaaaaataataaataaataaat

SEQ ID NO: 8256 - DNA, 1105 bp, Homo sapiens
gtagcatgattcattacaaaaccccaaatagaacttgccaaatttgatatggtatttggtatttcctagaattcttgatataaaatgatacttctacgtatgttctctaaggtgttttaattctaacattctaaaatagttctttttgcaatcatcattaatcagtgtgacctgtttcttcaggagcccccacgccccgtgcacccagcacccttaccagaagctccacaaccacagcgtctgcccccagaagctgccagcacatctctgcctcagaagccacacttgaagttagcacgcgttcagagtcaaaatggcatagtactgtcatggagtgtcctggaggtggatcgaagctgtgccactgttgatagctaccatctctatgcttaccatgaggaacccagtgccactgtgccctcacaatggaaaaagattggggaagtcaaggcacttcccttgcccatggcatgtactctcacccagtttgtatctggtagcaaatactactttgcagtacgagccaaggatatttatggacgttttgggcctttctgtgatcctcagtcaacagatgtgatctcttctacccagagcagttaaaccttggagcctttatattttcctcttttaaaatttccaccttttggtcttgtttttaatcttgtgcatgataccccatgtaaaatccaccttgtgcaagatttcttggacagatgtgtgtatacactacatttgtttataaccagaagcaaaataaactcagcccacaaagctagaatcttttcctggacagtttaggctttggggtttggaaatgtaaatgtgtaccttgctttagttttgaggctggggaatatgtgtgggtgtttatgtgtgtttttccttatgtaggtgttattgcattggagtctcccattttcattctcaaatttacctcttaaagtacgaagtaagtagatcaaaggatttgagatgtgtaactggcatgattctgcttttgaaggatctatagtatcattttagttaagtgggtcaaacagaatcaaaacaaaacccaaagaaataaataaaaaacaaaatggctaaatagtttaaaataggt

SEQ ID NO: 8257 - DNA, 2890 bp, Homo sapiens
atgtggttgagaatattttgaaaggaatttatggagtttgtgaaataacttcgaagtcctcttcctttacaatatttgaattcatatttgtaccttctcaaaatagtgattcatttttcctagaattacaggagggagctcttttactaatgttgttttgtttgcaactttgatggcttataataggaagtattctagttgtaaagaaaactctttagagacttttgactggtcagtatactgaggtgtgagatttgattcatgatgaagaaagcctatagattgccaaaaaattaattctccaaaccacctttcactctcagaaaatgagaccacaaaggagtatgctataaatcaaatttgccaaccaattatgtagatattactcattctaggactaatgatgatggtaaagaagttgccagtgttatggcaatgaaaatttcagaaaggaggagttgatgatcttctagatgtatatgaacacctgtctatatctgcatgtatatgttttgacctgcagtggttgcaatgttgatatgtgttcaagattattcctgtctacaaaactgaaggcccatgttcaaattgttctttattgggtgtttttatggtcacgtggtaacaattttcttacctaacctacaaaaggttctcttgatgaacatttttatttatatttactaatcttttttaaaaaaagctttcatagcattatataatcagatgaagaaagcccagtagaataaaaaaaaaattcattagcctagcctatattatgttttctgtcaaaggaaaacaaattctcaaataggaattctaaaaatatttactaaagtaaaataactacttaaaatgttttattccagttggaaggaaggtacagggagaaatcgcaattatttaggggagaagtatatttattataagatggtgtcctcaaattagcctaccatggcacgtaggggcagcagctatattagatttactagaggtgctaagttagaacactaggcttttattgaggcaggttttaatattgatagatgctttttgtttggtttgtttcttctgggagagaatggaggacttaagtagaagtagctactgataacagactttctagtagcagtttccactccacggttacctttttagtttcatagtatcttttcacaaagtattacaaataagctagattctcccagtttgggaatgcaagtttgctacatttttagcctggcaatatttgtgtaggtattgccttattggaaattctggaaacctgatactgcaacctgcaatgtaggatgtttgtatggcatttaaaggtaatggtgatgtttattattctatactttgcattctgtgagagtaattttcactctgtcttaagtgtgagtaagcctcttctaaaaatcttgttcttgccaagaaatttataaatcacatacgaagacgtctgttgctaacagttaactttatgaggtaactatatccttctatttctctggactcatttttaaaaaatatgccgaatactgcatactgtttaaggtagtatataagtttatgagagaagtggagagctttcttccttgaaaagtcggtatttgttgagataccatttgcctcacagagaggtgttccccactcccatccccattgccagataataaatattttgagaaaagtgacctaaaacagctgaaatcttaggtgcatctgtctgcagacctccttaagcaggctgtatcttacaattcccttactgcactgggtaagtgttaacttagtttttgttgtttgctcttttgctttaaatattctccaaattaccatttatgcaacatggttagggttaatactgcatggtattcatttatcttgtttcatgaactttccagtactgtacaaggtcaacaaagtaatgcctgtggtatcctcatctctcacttttttactctgtgattttagcacagtaaggtactgcaaagaccttccttccaaatgttctccttgactttatttcttgggccaattcagtatcctcaacatcctaagattttgttgttttatcactgacctgtggttggcctgttttattctaatttccagaaaagtcaagtcccagtatttgcaatatcaaataactctaaaaccgatgtgtgattctaccttccttactatttttactgggcaaatgccctatttttttaattattattatttttaacttttgggacacacaaaaatcagcaattctcatgaagcgtttgttagtgtggcagacttgtctaattcctgaaactcattcatccccttgagccagccaatggggaggaataggataatgcaaacacatgttttgttttctcattttcaaataatttaccatgttaaaataaacttttctttgttttttatttgtagagtcagctaagtacccatatttaaatgccgtctttattatttttttgaggtctttgtttttgtctgtttttgttttgttttgttttgtaaataaggtaactgggcaatcaaacaccttttggggattctggctttagtattttatcagccattttaaaattaaatataaaaatcctttgtaagaaacttgcatcctaatttttctttattgcaattgaaagtgtaaataataagacaatgtaagtaagaccttcctaatgtctaatacaaactgggctccagcaagtggccctatttttattagggttttgaaggtttgtgtgtgtgtgtgcgtgcgtgtgtgtgtttttcttttttaaatgtatagtagagtggtgtctgtataagtgttacctgtagtggggttttgtccagcaagcctgaaatttatactttgaaataaaactactgggttttt

SEQ ID NO: 8258 - DNA, 1239 bp, Homo sapiens
tcttcttctggattgttttctgtttccaaccatgttttcttatttcctacgagtttatgtgcttggaagcgagcgtggtcgtggaaaacccgtaaccgctaaattcatctgggtccccaaagactgagccggctggcctcgttatttatgtgagcggctatgtaaatgaggattcggagattgctctattgattggagagagctggaggaggcggtctctcttccagagcgctagttgggagcggagcctgcctgtcattggtcaccagagccaatggaaaggggctgccgcgcggccgtaaagagtttgtagaggcagttcgggtgcggtacgttgcattccggtaccggacgccgagagcggtttgtctccgtctctggagttgtaggcgagaggtgatcatgtccggtcgcgggaaacagggcggcaaagtgcgagcaaaggccaaatcccgctcctcccgcgcgggcctgcagttcccggtgggccgagtgcacagactgctgcgcaaagggaactacgcggagcgagtgggcgccggggcgccggtgtacctggcggcggtgttggagtaccttacggcggagatcctggagctggctggcaacgccgcgcgtgacaacaagaagaccaggataattccccgccacctgcagctcgccatccgcaacgacgaggagttaaacaagctgctgggcaaagtgaccatcgctcagggcggcgtcctgcccaacatccaggccgtgctgctgcccaagaagacggagagtcagaagacgaagagcaaatgaccctgacgccgccctcagggagctggctcccccagcaaaggcccttttcatggtcgtcccgcaatgcttttgaatgtgctggatgtcatggagggccggtgacatctagcggggaggtgggcggcgagggtcccggcgggagccaataaagttggtgaaaatcgtttggtcgagagagctgtgtagtcgcggggacatgtcggatggccccaggggaggggggcgaccgggaaacccctggagcaggcactggtgggtgggcttgagccactctggacggctttagtccgcaggtcaccctcgaggcgtcaggggagggtggcctggaggtgggcagggtggaagccacctcgctgtcagtagggcaaaggggaggcagagtcggtgcggtgaggcctccttcggaattatttttacttccctttcacagagccttcgctctcctgc

SEQ ID NO: 8259 - DNA, 1281 bp, Homo sapiens
caaccatcagtgccaagccacagatcactaatcccaaggcagagattactcgatttgtgcccactgcactgagagtacgtcgggagaataaaggggctactgctgctccccaaagaaagtcagaggatgattctgctgtgcctcttgccaaagcagcacccaaatctggtccttctgttcctgtctcagtacaaactaaggatgatgtctatgaggctttcatgaaagagatggaagggctactgtgacagcttttgatgccagaaaaggcttctgttcacaacagtggcccatggagaaagaggctcttattaaacttagatgaaagagctgcttccattgtcagggtattttctaatttcagttcaaggaatatcctaaaatttagccttgttcagaatttactgcacataaaaaagggtatttcatccagaatagatcagttattgaagcagtgctgctaacatccattccctttcataccaccattttcaccctgtttcttcccctcctccagttctttggaaatttgtgatcgggggatcttagttgcttatttgttttgactcttgtgtgctgtgggcactggagtagagatttctggagaaaaaaaaacagtttatttcatcttgccttttgtgtttgagttatttttaatattttcctgtaaatattttgtaatattttacttgtaatgaaatggatcacaatgtcatttcctaatacaaggcaggatatgtgggaagaatatgtacaattatttgattaaaattatttcccactgacctaaactttcagtgatttgtgggaaaaataaataaatgttctacaccaagatactctgtgttactgataatatgtaaacataatacctattttatggacagaaaaagttaaatatttaaaacttgggtctttaaggaactgcctttctggtacagaatgagaatcttactgaaaacatggtaaaaactacattttaaattttaagggataaaaaggagtaattatttcccttttttaagattgtcatactggctttagagaaactgagaggtgttaagaatagtatggtttggcttttattatttaaaagatgtcttaccttcagtggttacttattccagagcttcttgaactgatacgagttgaatggcaaaagtcattttaaaccatttttaagctataaaagaatcagaagaggttagctttttttcctttctgaattggtgggtttggtgtgcttttatattaaaatatgaatgaataagagtgcttaac

SEQ ID NO: 8260 - DNA, 1461 bp, Homo sapiens
aaaaattattaatgtgatatattagtgaagtgcagaagcttcacttaaaaagtagagctgttagctttcctaaagagatactagaagaaaaccacagtagaattttatcctgagccatttcatgatatgacctgcagcctgcacaagtcagtaactatcttgtctgaactgtttatctttcaggatagcagtggcagctccgagttacaagaaattatgagaagacgacaggaaaaaatcagtgctgccgctagtgattcaggagtggaatcttttgatgaaggaagcagtcactaatttgtttgtttgtatttaaactccattgtttttggcattattccaacatgctttgttttaagaagccttgaagggaatgtcagattcatttttcttgatgtaatttatcaccataaaaaaaaacccatgcaaacctgagtgagcacaggatttgcttctaggcccattatttttattaaaactgaaaaaatttaaactgaattttttgaccttggaaaatatttttcttactttaccaaggtgaagtttccttaattagactaattattttatccccatcccagggtataaacaggaattgttttgatagtggtggagttattcactgcaacaaagcaacaatgttgtccatgattcaaaatctaagcagtttcgattttgcctgtgaatatggtgtctgtcattcagggcatagctcactgtaggctagcctctgcttacttaagtctcttctctgacatactcaatggaagaatatttagatttatttaaagttcttaatgccaacagtttaaaaaaaaattaaaacatttgaatgaactgtaaagtacagccataccttggacatgcaaatataaatctatggagcattctcaagagagtttgtcatggctctgttgattgcaactccttgtatagcttgtattttgatttagtttatattctgcttattatgtatactgtgttcttatatatgagaaagcacaaatgcgaaagaggtcatgtcttctcaaaatctagcaaaggaagtagtctgcattggtgtgcattacagtattttgcttaatgaaagcctcagttctgaatgttgatatgagtagttaaaaggaagtggggccattttatgtgtttatctgtgtcaagtatttctggtaataagaagcacttaatttacacatattttaatcctgtgaaagattccacatagagaaaagaaagatacctaaccttcaacaaatgttatttttggaaacacaatttttgtcattaaatgttatattatttcacatatataaaacagatgttatgtaagaatgttgtatattttaacataaatcatttagagaaattatctagattcattaattttcatagtgcctttttcacatgagtcagctggaaagtctgcaataaacagtatttgctgtctgttaataaatggtt

SEQ ID NO: 8261 - DNA, 1254 bp, Homo sapiens
gaaagtggagtaatcatttctgcttcaaggatgactatatgatttcatttatccctaatatagtacacactacatagtaggcactcggtaaatctttattcattctttcaggaggcaaagcaggaacagattaactaattaccagctcagaccaagttaagaaaaataaagctacagattgtcatttcaaaatttgcctctttttgctgtctcactattttaaggagtgcccactatatcactaatatctctggcaagaaagcattccatgtgtatgtatgtaagtgtgtatcttcattttttgctgtcaccacacagacatcaggctttttcacaaaatctgaccccctcccttgaccattttttataactacctggcatgtatcactacagagcttttgttctggtccttctacttggactttggcagatatttgaactcttctgagccagtgctttcctcttcagggatttgtttttaagattttcttccttgccaaccacagagactgaattttatatcccacagatgagtctgagatttccagccccctccgtaaatcccatcactctgtcactcttgacagtgtaattatcccttttgtttcttgctgctttcctgcttgtaatctttgttcctcaacatgtccttcatctgaaaaaaaaggcacccaatccttcttgctttgtcagctctttaatttctcttgtgaaatagtcctcagatatcagctccccacaaaggctttctggaggagaagtggcattttgcttccttaaatctttctgtctattcaattttcatgagtgactgataactagccatcatattaaagtcttctgatcttatatttaagtatgattttttattagatttatgttttgttcagtgtttatgctgttcagtgtatgcatgtgctatgtgtacacttttaatatgtgtatctatacctgtatttgtaaaacagagaaacctaaaggccaaattctgcatcttatttttgaaccaatcaagcagcctactgatgtgagacaaatttcaacaaatgcttaagacacacatctgataaatatataataaaacttgtatgttgacagagcttgtaaatttttaaaattcatatttttccatctttttgttcatttctctgttatttgatgatgatgagtcaggattcttttaatgagataatgagatctttacaggtctaatgtccaaggttgatactgtggtggtgagtgaatcaccatatg

SEQ ID NO: 8262 - DNA, 1141 bp, Homo sapiens
ttgtggactatttacttggaacacatgaagttgggtgttcaaagaaggaaaaataatttccaattatggaaaaagggtttgagagttctctggatctctttatctatggtggcgtatatgactgttgctctgtttggacagggtctaaggatgaatagctattcacttattcctcacttgctttcaagccatgccaactactaaatcctcagatcagctactaaataaaacaagaatatgttattatgtgactcatccttcttgtttttccccctgtatttcaaatttaaaatggtgtcgtgtgaagagattcaagatttccattcctgcttttccctttcctgccaagctcatgacctctgccagctccatcttttccttcctctgcttacagttttggtttgagttctggattcttggagtttatagaacaagagtcatttaaactcttttttttttttttccaaatggaacaagtgtcttaattgaggtcaggccaacacttagtgtgacagaatcttctcctcaccttccttgggacagagagaattcatgccaaggagaatggtgtgaaactgtgaacccaaagagtgtccattgggataaagctgatgcccagttggaggcacagcacagtgactgttttgccaggctctgttgttctgtttggtcccaagccagatggtggcctggtgggtgaaccattggctctggcctttctttcacctcctcaggtataagatgaaatacccagctgtccctttccttgcatgagtgaccctctggaaacagtaattgccctcattgttacttaatgtttacatgattttgtttaaatttggcttttaaaaaatatggtttattggtagtatgaaagtatcaaattaataaaattcaggagtggaatttatttaacaccatattcgagtttaaacagagcttctggagtgagcatgagagaggaagtgggcagatttgaatgagattgaacgagtatagttcatgtattatatatatcattattttgatcactagaaatacgttcaagatgtgcttgcattagagtttttattacgtgttatcttttagccactttgtaacatacataagatggaaatgagcatccaaggtctccctcaaa

SEQ ID NO: 8263 - DNA, 1261 bp, Homo sapiens
gtttttaaataagacaaattgcaaaaaacgttgccagacagcgttcgctggtttgggccgtcactgggtatggctcgtgtccgtctagatattcagaggccgagcacagtcctcagtagggctgctcggcaggtacacagctgacgctggtccttggacttatgggagtgggaacaactttcaactcggccgcggaccaggaaggcgttctgacccgctagagctcggggacagggaccccatcccggtgcctagagcgtctcccttagtcggcgtgggccagcgccagttacctcacgagcactgaactagcgcctgcgcccttctatacttctcgctctttcttcaagtcacttctacccggcgagcccgccctcccgccaatcgtcatttccggcgggtgctctgcgtcatttacgtcgtcacttcctgccgatgccggtgtggacgctgtgaatcgtggctggcccggttctccgcttctccccatcccctactttcctccctccctccctttccctccctcgtcgactgttgcttgctggtcgcagactccctgacccctccctcacccctccctaacctcggtgccaccggattgcccttcttttcctgttgcccagcccagccctagtgtcagggcgggggcctggagcagcccgaggcactgcagcagaagagagaaaagacaacgacgaccctcagctcgccagtccggtcgctggcttcgccgccgccatggcaatgagacagacgccgctcacctgctctggccacacgcgacccgtggttgatttggccttcagtggcatcacgccttatgggtatttcttaatcagcgcttgcaaaggtgagcaaggccgcaatcctggtcctcgacggctgggactgggctgaaagggatcgggacccgcacgctccagtgccgaagcggtggtgtggtgaggggggagggggcgatattaacatctgagatgagagccaacactggtccggtggagaaaggagtgtgttagggaatccgcagctggagccgagaggacgcttttgtagaaactattacctccaactaagacctctctccttattttatttttattgctatttttgaaggagctggtcagcatttgcctagactctcgggacaacacggtaaatagctttcaaggatttggggaaaggagaaattaggccaggccgtgcaataccttacaaagacgttcgctcttgtctcactggatattcctttgtggtattagcc

SEQ ID NO: 8264 - DNA, 1874 bp, Homo sapiens
actaaaagagagggccagatccttcgaagacatgactttaattccgggtttgttatatagctggagtctttgaaaatttaggccagaaagggacccttggaggttgagttatggtgtaagagaatctagtggataaaacacatgaactctttcttctttgccttttcaatgacatgagtctagttgttagtggcatgtgcagttgctctcttctttcccttaccacagtatgctttacaaacactttttcattccttcattacacagaaatgtagatttgcttctttctttcattaagttgactaatgtgactttttttttttttttttttttttacttatagaagaaattgcttcagagaattcagattgcatctttccttcagctcctgatgttaaggcctgagcgtcaatcatatgtgcagttagtatacaactgactaaaacaagcaagcagagaaaagcatcagccttccagagttactgtctgcttaaggcagaaacagcagtaaataatgaggaaaatgaattagctccagtgctggaacaactaactaacttggtgttacctgtaagtgaaaactcaagtgtcagatgaagggaggtggagttatcctcttatagtacagtggcctgttatctttttaatgaatatatacaagccaacatccaatttctattattacaattagggttcttgtagctgtttatgttaatatggagaagaaaactatattggctgattttttctgatcttaaagcagaatgccttttctttttttgcttcagttgtaaagaagagggaatacatgataaagtaactggtttgatttctcgttcattgtacactgcctctgaacatctaattgtttttagttgtctaaataaaatgcctctaaaacaaaacaatgtttggtttttttggggaaaaactactaatgtgagttttataagtggaaatagccagaaggtttttctgtatcataaccatagcaaaaggtaagccaattaatctgtagtaaacattattttataatattgagattcagttacttgtcctgaatttttgaaattcttatgtcctttactagtgtttcatttaccttctctattcccagattggatagaagtgcttgacatgcctttttaaacaattatttaaataatacatgctagttataagaaaaaaaaaatcaactgaaatttagcagtaagctgaaagatcacttaaaatcctaccactcctcaaaaaactattaaaatcaaatgaccatgaatgcatgttagggcatctctgtatgtatatacagatagatagaatggattttataaaaatgggattactatagtcctgcagtggtttaagaagtatggaattttacctcattctttaaatttgggtggcattcagaaagcccttctaaaaccttctaataaattggatcagctgagtttagacttgtaatttattttttaaaacaaagagggcatattaaatgagtaatttggaaatacttcagatgaataaataacatctctgcaacttcctttttctcctgatcagtcctgtgagtgacccttgataacttttcttaaaagcaatatgagtcaaccaaagaataagattaatttttgaggatttgtgataaccagaagaaagcactgtaggctgtgacaacctgtgagggccgagagaaatacaggggagccaactggtgatccatattggctttcatagagtggtagtatttttgtgtcagcttgttacatgcctgaacctctggattgcagcagtgttgtcattgtaccagcagttgctcagactctaatcagagtctgatttaccctcaataaagttctgtacgcatcagattg

SEQ ID NO: 8265 - DNA, 1262 bp, Homo sapiens
ggagcagcgagatttccttgcggagcaatattcctagggtacagacctcgtagcccgggcccgcgactccgccccgggagcgggcaggggcggggcgagcgctccagctggcgggaaggaggaagggccgggcgcggcgcagaggcgggcgcctaccagccggcagctccggagctgcccgcgccatgtccgcgcacaatcggggcaccgagctcggtaaggggcccgcggggctccccatcccctctccctcgcgttcagcgccgccgggactagcgcggggcctgctgccgcccagtgccctggctgtgggtccccgaggggttttcgctggggcgggaagcagtggcgtctggtcagccctcaccccaagtaaaggccgaacccggcacgttcgcgccgcttgtctttgcacctaagcttttactcttgtatgcggaaggagtaggaaagggttagattattatcttcctgccttttcgttcactctagctcgctggttggaaaacccaacaacccaaaaaacaaaacccaaaacaaacaacccccaagcaggtaaaaacagataaaaaccttctttctcctccttttaatagaatacttgtgtaatttaatgcagtatttccgtagataattttaaccgtaaccttgaagtggccgtgctcgtggaaaagttgtcagccgtctgtgctcaaaatgtaacactgcagattcatgggattttagagttacaaagatttgttaaagtacctgtattatttcccagttttcatctttttttatattgttcaaatactggcaagaaaccttagttcagatttcttttttttttttttttattgatcattcttgggtgtttctcgcagagggggatttggcagggtcataggacagtagtggagggaaggtcagctgataaacaagtgaacaaaggtctctggttttcctaggcagaggaccctgcggccttccgcagtgtttgtgtccctgggtacttaagattagggagtggtgatgactcttaacgagcatgctgccttcaagcatctgtttaacaaagcacatcttgcaccgcccttaatccatttaaccctgagtggacacagcacatgtttcagagagcacagggttggggataaggtcacagatcaacaggatcccaaggcagaagagaatttttcttcagatttcttaacatgtgaaaaatttataattcaaacagcaaaaccatgatcaagagaaggtttaagcgtctcgtttaa

SEQ ID NO: 8266 - DNA, 4509 bp, Homo sapiens
tcatctctagacccctttgattccctggattccatggaatactaggtttatgtatgttaggggctgtcttcatctaaaaattatttatttcagtggatagtagagataacactgaaataatgtgccttcccccaatgaaatattcatgtaaacatagaaggcaggcaaagattgtaataagtattaaattattaacaatttttagggttcagtcagaagctgttttgcacatcgataaatatttattgggtgctttttatgctaggtactgatctggctaattttacatacattaattttagatattctctattttatggatagcatttaccttgtaccctttaaaaaagacatgtgaaatgattgacaaattaaagcacaatgaaaataagatataaatgaaatcagaagtaagttagctttaaaaaaaaaaaaaagagttgggggcagagagcctgttgtctgctacagagacaggccatctttctttttaatgaacttcagcaactttattgaacaaagataacctaatgaacattaaattgatatggaacaagtcattcaatctccctgcctctcagtttgctcataggctctggcagctaagtgccctgtctacctaagagtgttgttctcaggactaatgagacaatgaaagtaaagtggtataattatgggcggtgatggtggtggtagaaagtaactcacaatatttaaagtgtgtgaggtgtggctaacacaactaaatctaagacagaattttataggaggctaggactctagactagtctagtgtcttcattttatgcagagaaaaaaacctaatatttatttagtgccttttaagtgttaagaaacattgctggctctttttatatattgtctcctttaatacttaaaataatttgacaaaggtaggtattgtaaattgtcccttctcccttttaagcagatgagaaacttaagacacaaaaaagtagccagtccaacatcatggctagttaaccaggatccagaatttgaattcactttttttttttttttgagatggagtctcactctatcgcccaggctggagtgcagtggcacaatctcggctcactgcaaactccacctcctgggttcacgccattctcctgcctcagcctccctagtagctgggactacaggcgccagccacaacgcctggcttatttttttgtatttttagtagagacgggatttcactgtgttagccaggatggtctcaatctcctgacctcgtgatccgcccacctcggcctaccaaagtgctgggattatgggtggctcacacccaccgcgcccagcctgaattcactttcatttgctcttttccgccatactgtggaggccctgagagtctattttgtctgagatgaaggttatgtaccttcaaatgttatccccgctgtccatcactgatgtgtttcagtgtcctggaaaactatgtttaacttcttgtttgtgattttattactagtttttcagtgtggtcttcctatctatctatctatctatctatctctttcctgttctcttgggaaaaataaaataactcatttgggaccattacaaatttctaatttccagatttcacctgagtcctcagtaaacactcagtggctctttaaatggcccctaacctcctaaccacctctgtagaggttacacaaccacacccttctctctcaatagagaaaagttggctgacaagaatgttctttatccaaatttttccttctagcaaccaaactcagaattttcttccatttttacttccattctttctgtttgaaggggtaaccattattcttctctctcaagaaatttttcttgcccttttgctatggatttccaccccctgaccaaggctctttaggatgttacttgggtaacactcttttcactttgttttatttcttcaaatcagaaaacttgcttaagccaccccctttctgaaaaggcttcttttaacttgccctcattcttgatattttccccacttcttgctctccagatgtttttgtttttttttttttttttttgagatggagtctctctctgttgcccagggtggagtgcagtggtgcaaactctgctcactgtaacttccgcctcccgggttcaagcgattctcctgcctcaacctcccaagtagctgggattacaggcgtgtgtcaccacagctaatttttgtatttttagtagagacggagtttcaccatgttggccaaactggtctcaaactcctgaccccaagtgatccactcacctcagcctcccaaagtgctgggattacaggcgtgagccactgctcctggcctttccagattatttttttaatagccagattcattgacaccttttgaatgtggctatgatgttaatctttctttcttggcactattgcccaccccttaaaatccccttctttacctggctcagcactgctctcagtggaacatctctgtgcttctctgaagacaactcagtcttgtcccttggctcatcttctaccttaaatgctggtggccttgcttgcttatatccttaatgtgtgcttattctcgatatctgttctccctgagtggccttattctttcaatatgtatcatccacagccacagttgatacctcataaaattttatctctggctgtcttctttccccagcttcaaaccctttttttccatttctacttgcggatgtcacagacttatcaattgaagatattccaaagtaaacacattcttcctccctgccgtttttccccacctcaactcctctgttttccctctattttttctcctcaaagcaagcaaccaactaacctggacaaagctcaccaaaccaactaacctccccaaaataaaacagcaacagcaaaaataccccgttctgtccttcatgaagaccccagtctctgggacactcacccactcaaattatatagaagaccttaagagttagagttttggagctgctgaaaatttcttttcttgatggggtggagatgacgatcccaccagtggatatattgcaggtcttcaaagaagtgctacatgatgtttggttttcctgtttagtagtctataaatggctttgtaagaaacacacactgtctatcccatgatcacagcactatttatgtcaagcttacacacgtgcatctttgcagctaatacatgcctgatgctcagtaaacatttgttttttgatttagaaaccgaggatatgagtacctcacctcttttctgtgtactctattttttttttttttaatttatgaattacattttggatcaaaagaatcttatttctgggtaggaactttttatgttatggcctcctagacatcattttacaggtttttagagagtgtttatttaatcagttttaaattggcagtgataggctctttgacattcagaggtgaggtctgaagtacagaagagttaaactagaaacctgtaatacctgttcaacctgtgctttaaccaagactgggaagtttctctgtaggattcacttgggggaacttcctacacttagtagtttgtactgtcatttacgctctaaaacctctgtattttggtctaactatcaaatggccagaccactttgggggtgcaatttcatcatagttacacaatgagcagttttgaagaaggttcgcaaaagggaaagtacagtacatcctcacttaatgttgtcagtaggttcttagaaacttcaactttaagcaaaaggacattcagcaagtccttgaaccttgttttcctccttgtcattttgttacgaggttgatgaaaaaaatggttttattgtacttcatttcattttatagatggcaactgaggcaaaaagaaggcagtaactgcccaaggtcagacaggcagtaagtggcagagttgggatctggctcccaagtccctgttcttcagtaacattatgctgcctctcataatgttctttttttcaataaactgtgtgtgggcttctaaaatagtaacagttctttatataaaaggggaaaaaagttttaaattagagcagggttgaagaaagttcaacttaaacttaacatttgactgaattttatctgactttttccatgtaatattgacgtcatcgaaacatactgtagttatttaaacgtgtcgtggttctaaatgtcttgcatctaatgttatataactaaatggccaaagataacagtgttacctcgttatccctgcttttgcctctttttatttgagtgtctgtggctgtcttttcctgcgggttttttgcgcccgtactcatctttcacacattattgattatcacgcctgagtgatctgccacatcccaaatttgtccttttataccttacctgactagtggctgtgatccaggaactttcctccctggcacctatgcaaagatcagtggctgccagctctaagttccagatcatgatttctctactctctgcaatttactagt

SEQ ID NO: 8267 - DNA, 1313 bp, Homo sapiens
tattttaggattttcatggccatgcttgtcagttctgttgttacagaatgtcacccttagttactttgggaaatggtaattaattaacgttgcaggtgtcaaagtaatttcctctctcttatttttcagctatactgacttctgttgaaaccattcaaagctaaagacatggaccttcagcagtgtaagaagatattgtacagtatattttaaatctatgaaattcatagttctgatgcttttggtcacagagcatcattttatcacttctggaaaatgtttattccaaaacagctttaatggcccatatgtacacttcgtaatctcaaggttattattctgacaccagcttgctgctatgatttcagagcacataagtaaaggtgctttttaatgtgcagtctatttccagagcttacttagttgctgatttccagatttcgatgtttcttaagtctaggtgaatttatatatatatttttttgcttttcattttctaaagttagttattatttccattgaagcttgttttcttttttttcttcccattttagctactgcagtgcttttgtttcacacttgatttgtaaaaattttatatatatgtatttaaaatgtgccattttattgctaagtgaagtatgtcctgttttctgctataattctttctcggtcagattgcaatgtcagcagttactgccacactcctgtcagcttaaacacaaatgttactgcttatcttttcttaaaaaaaaaaaaaacaaagtgtaggtattttgaagtactgggcttatatttcattggaatacatgtgtacagcaataagcaggtttccaaatccggtacttagtttgtgtacaaatgtaattatgttcattgtgtatatattatacaatgagcacatgtaatgtattaaaggctacttactattgtttaaatgcaaatgttcatatctcatttctttttttatcatgttaaataaatgttgatgttcttaaatcagtgttagaatttttgttctttccatccaaaattgaaagtcttaagactcaagagacctctagaagaaaaggtactctgttaattttataatcctagacaacatcttaaaagatccttgtcggtccaaccctcccatgtcaaagttgaggaccttgaggctcaaagagatcaattgagttggccacaatttaatgacagaattttgaccagactatagttttttctgactttttctctaagtacattacattagctcattaccactagaggagtttagttttgtgaagtcttttaccacgtttctatttgct

SEQ ID NO: 8268 - DNA, 1170 bp, Homo sapiens
gtgcaagaaagaattcagggagagtccgcagtgcaaagtgaaagcaagtttattaagacagtaaagaaataaaagaatggggaggctctgggtgcctccccgggggcccggtccctggcgctgccctggcggcctcatggccggctccgaggtggccatgccgctttccccgtcacgaggggcccaggaggctcgcggcaggggctgccacatgcaggacctgccccggcgttggggtgtggggtcccctggcctggagcgggctcgtcctggcgggcctggatccaagcacagtctcagcttttggagccagcagcagccgggccgaattcagtttttccggaattcatttgttctgacccaagtttagccgacaggatcctggcgatgcagcccaacaggaagcaaagcacagggaagcagaaatgagaaacagtatcttaacccaagttttggatcagtcggccgggccaggtttaagtaacttagcacttgtaaagcctgaaaaaactaaagcagtagagaattaccttatacagatggcaagatatggacaactgagaaggtgtcagaacaaggtttaatagaaatcctttaaaaagtaagccaacaaacagaaaagacaacaacagtgaaattcaacagaagaaaagtaatggactctgatgaagaagacgattattgaactacaagtgctcacagactagaacttaacagaacaattctaggacagaagttaagatctgattaaatatttagtttgtttattgtctatatgccttttaaaaaataaacttgttatgcaaaataaaaaaaaagaaataaaagaatggctattccatagacagagcagcccagcgggccgctggttgtccatttttatggttatttattgatgatatgctaaacgaggggtggattattcatgcctcccctttttagaccatattgggtaactgcctgatgttgccatggcatttgtaaactgtcatggtgctgctggtagtgagcagtgaggacaaccagaggtcactcttgtggccatcttggttttggtaggatttagctggattccttactgcaacctattttatcaaggttttttttttgtttgtttttgttttttgtttttttttttgagacagtctcactgtgtcacccaggctggag

SEQ ID NO: 8269 - DNA, 1211 bp, Homo sapiens
aaatactgcaaaatttccccaattctttgacatgaaaagaagtaggatgtggcagcagttatattttcagattaatgaatagaagagatttcaggtcaacaagtgatttgcagagctataaagataatgctttgattgtgaattatttacagctggaaactcttactttcttatgcttctttgaactgtagaagggatgagatgtgataagctgtgtgtgtgggggtgtgggtgtggtttgttttctgtaagatgtagtattgagttcatgcctgccaaaagttgcttaaattattccatttctgattttgaggtactgtcgtgtttctgtcttgatttgtacttcattgccaactaattaatttaaaagcattgttgttttctcatggagaatatggttactatgctttgttcacatggagcagaatgtcaagtggtaatcttaattaaatatttataagatcatattcatgttagtgaatttctaggaataacacagccttttttcttcttttgtagcataagcagtactataatggatgtagacagcacaatttccagtgggcgttcaactccagcaatgatgaatggacaaggaagcactacttcttcaagcaaaaatattgcctataattgttgttgggaccagtgccaggcttgcttcaactctagcccagatctggcagatcacatccgttccatacatgtagatggtcagcgaggaggggttggttttgtcatttctttttttcgctccctgttttcgttagttttattaatttataattgctagttaggcttttttgctgaaagtaatttgggattatttttacacaggcttagttttttcaagtgaatttttaataattatttcccatatacttgatagaatcaaataaaaatagggtatgtgctggattttagtttgtttttagatacgttattttgaagaaattagacttttaaaagtatagtaggtgacagtattattaatgaatacagtgtattccagggttctgatgttttgagttgagaacatttagaattagcactttcttgattttcctttgttagaggatcctaaattattcctgacgcttaaattaactggggagactattggtaccaggattagtgtatgcaattctattaaataacaacctgaactcattatttgtgagtgagaattgatcatctttcccaggtcttgt

SEQ ID NO: 8270 - DNA, 1089 bp, Homo sapiens
acaatacgctgtctcaaaaaaataaaaataaaattcaggaatccagtcattgccaggatatctaattatttgttgcaaaaacagcttagtgcttctgctataacaatgattaattcaaaaccagatttttctgggaagaagatcccattatttttgtattgcatatagtggaaatagcagtaaactgggaggtcgtgaaacttgttgcattttcaagctttgtctaatgtatgtcatcttacttggcaacttacttcgtaaagtgaaaagactactagtcccttatgcttcctttctggaattagttctattgtactacttatttacttccgaaaatactagatattcactcattgatattcttctcgtgccctacacagcatgcctgacgttatttctgttttattttcttttagtgtgttgttggtggctgcaatgccagctttgcttctcagggagggctagctcgtcatgtacccacacacttcagtcagcagaactcctcaaaagtttctagccagccaaaggccaaagaagaatctccttctaaagctggaatgaacaaaaggaggaaattaaagaacaaaagacgacgctcattacgtaagtgttacactgagaaaatctggtgtatttcatggttttaaaagatatcttagacttttatgcaaatccactttgaacttcaactcctcttctattaaaagtaacaaacaggtaggatgcctgtctgtcagtgagagtgagaattcagtggcacatgtttgtagtagctaagggagtatatgtggccttcaaatataaactgtataaaattagatttgggggctactctgattctcttccaaaataacatttaaaatatagtaacattggtatttctagaaatattttagaaaatttgaacatgttaaaagtaaatatcaagtgaaagttaagtaatctatctactccaaagtagtgtgtgtacctgagctgggaggtagaggctgcagtgagccgtgatcgcgccaccacacttgaacctgggagacagagtgagaccctgtctcaaaaaaccaacaacaaaaaaaaccaccacaaagcaat

SEQ ID NO: 8271 - DNA, 2038 bp, Homo sapiens
ctcccttttcaggactagggctttctcatggagtacagtatgttaatatttacctatataactaatctgttaacggtttttgaaaaacctttcaaattatttgaataatcttcatattttcatttaacctatatgactctaattttttttctgaggaaatcatttggtttttgagttgttttttcttaatgtaagaaaaattgtattttttttacaagtatcttcaaactgaatcttttatgcaccaaagttggtcttgaaaaggaaaataaaatcactttcttgcttggtaagcaagaagccatatcgattttttttaacttacagaaatggaaatatgtgtaacttgttagtattgtattaaacaaatgttgcatagagataatagaacattgcttgtaaataattcagcagatttgtaatatatttttatattttgaaatgtactgtagatgttttctagaggcatgaaagttaaatgtatatattatggtagaaataatattgaaggatattgtacttcactagtgctgccagaggaattgttaataaaagcaccttctttaacaataaatgtctttcacagacttaagggactatgtactactgttaatatctctaagaacaaaacacattgaacatccttccagaaagtctttgagggaggacctatacccataatagaattatggcactcatttctgacagtgatcaagaaatcagttatttccttactgttggaaggacattgtaaagtatgtggttatatgcagtgaaactgcagaaaatactcctggttgaggagttttcactttactacagtgatataaaaaccagcagtttttacactaaattttttaaagaaatattagacaaaaatatagaattaaaacctttggttccaaaatgggaaaggttccacgatacataaatcatttctcatttgctttaaaaaatttaaaagtgtaaaaattatgagagactttattcgttaacaatgggggtaaagagctatatacatgaaaatgagtcttataaaattaagtgaagtgcaaataaaagcactgctactataagacattctggaatggttgtttaataagggtattatccatttgatctatagcaatgtgattttatttttaaaaagaaaagcagtgtgttttctttttttgttgttttcttttgcttaagcacttcatcaattgctttattctgtatctgcgaagtaatctgcaatctcttttgttctttttaaaatttgatttgttataaaattgccaaatagaagtgtttcagatacatagtttgtacctgtatttttattttattgcctcatgttcttgtaagtcattcttaattgaccaatgattgtagaccttgcttgagtattttttctaataaaacaaagcaaatcacatttagcttcaaattgtaacaattcaattgaattttaaaatgacacctgaaaagatacatctgatattttctatatagagcacagtaaataagttttttcattgtgtagaaatacttagatgtcaaaaccagatttcgtgatccttgattaacttctgagtactcaatcaatcataatccttttgctgcttatctgatgttggtttgatactgttaacacaccaaaaagaatatggaattgaaatgagctagctttataacttgtatgtatacatatatacacataacatccaattatgactgggtaataagtgtgaaaattttaatttgtggttttcatttattaatgtctgcccatctgtattgttgctcctaccttcaaatatgacacctgaaataataagtctgttgtccagaatttatgtattgttcagcatcaagcaaactacagctcacaagcatacccatttatatgttgtctatgcctgctttctcctgcagtggcagaattgagtggtgagaccttaggtcctgcaagcccccaatttttactacaggttggcaatccctaatccaaaaatctgacataaaaaatgctccaaagttcaaaactttctga

SEQ ID NO: 8272 - DNA, 1696 bp, Homo sapiens
aactgatacagaaagaatattttgaaatatttaatctcatgagaaaactgaatagctggatttttaccaaggtgcttgctttgttttttttttttttttgtaggctgaatcgtctcaaacttgtcattctgaacaaggtgataaaaagatggaggaaaaaaattcaggcaacttccagaagaaggctgcaaacatgcttcagcaatctggttctaagaatacaggagctaagaaaagaaaaatcgatgatgcctgatatgaatgttactaaattttctaattaaagatggtttatgcatgtatatgccattatttttgtagttagacaatagtttttaaaagaatttcatagatattttatatgtatggatctatattttcagagcttatctctgaagatctaaacttttgagaatgtttgaaaattagagatcatgaattatataattttccagtataaaacaagggaaaaatttttatgtaaaaccctttaaatgtaaaatatttgagaataagttcatacaatcgtcttaagttttttatgcctttatatacttagctatattttttcttttgacataactatctttttgaaagcaatattatactgacagaggctcactgagtgatactttaagttaaatatgtagatcaaggatgtccaatcttttggcttccctgagccacattggaagaagaattgtcttgggccgcacataaaatatgctaacactgatgatagctgatgagcttaaaaaaaaaattgcaagaaaaatctcatgttttaagaaagtttacaaaaaatgtaaaatatttgagaataagttcatgtaattgtcttaagttttttatgcctttatatacttagctatattttttcttttgacataaccatctttttgaaagcaatattatactgacagaggttcactgagtgatactttaagttaaatatgtagatcagggatgtccaatcttttggcttccctgagccacattggaagaagaattgtcttgggccgcacataaaatatgctaacactgacgatagctgatgagcttaaaaaaaaaaaaattgcaagaaaaatctcatgttttaagaaagtttacagatttgtgttgggctgcattcaaagctgttctgggctgcattagacccgtgggctagagttggacaagcttgtagatgatttcaggttataaaaccagaagtacaattcaacaaaaaaggagtaagtcatcaatataaatattagcaaacgagatattgctacatctctatttaaagtaaaatacaaccgattttaaagttcctgaaaccatagccatattttgacatttcacaaagaatggttctagtctactagagtacatttggctaagtagataacttacctaaatttgctccaaagctaaatcacaagtaaacatatttatgtttaaaacacagaaataaataacttaagatttttatctaagcggtcagtgttgtattggaaagatatatctataaataaactttgaactgatttcaaacttagaatttatgtttttatatttttccactaatatcattatcacttctgtaattttcagtgtggtcatcattaactcaatacagtcattcattttattgacttgtgatttttctggtgtcatttggaactttatatgattcctgaagaaattccatttt

SEQ ID NO: 8273 - DNA, 1101 bp, Homo sapiens
ttgttactttttttttgtttttgagatagggtcttgctttgttgcccaggctggagtgcagtggcacaaccacaactcactgcagcctcaaactcccagcctcaagcaatcctccctcctcagcctccttagtagctgggactacaggtgcacagaaccacacctggctactttaaaaaaaatttttttatagggatagagtcttgccatcgcttgagctcaggctggtctcgaactcctgagctcaagtaatcctcctgcttaggcctcccaaaactgttgagattataggcatgagccaccatgcctactatgtcttataatacatcatttaacttgtttttgctttgcttagctagtgagttaatctcaaaactattatcataaaagtttaatggtctataagtattagaagtcttatatatgtttgtctcattcttatcaaacttctataatagtcttacatgtttgtctgattcttaactttcttttcctagattttccatggtctggtaaagttaaagatattctgcaaaatgtctttaaactggaaaagttcagaccacttcagcttgaaactattaacgtaacaatggctggaaaggaggtatttcttgttatgcctacaggaggtggaaagagcttatgttaccagttaccagcattatgttcagatggtatgtactaaaaaaattaattttgagttgaagaagtgctttgtcatcatacctttttaattcttttaaaaaataatttataatcatacatatataaaaatcaagtgcatttttgtttgatttcttctatattaatagaaatttaaagtttcacttaaaggaggaattttatttattttttattttagattcaggggtatatgtgcaggtttgttacatgggtatattgtgtgatgctgagatttggacttctaatgatccatcgtccaagtagtaaacatagtacctgctaggtagtttttcagcccttgccctcctctctccctaaaggaggagttttaaaaacttctgagattaatccttttatctggttcctgaaacataaatttaaaaacatattgtactgaacattcaaaatcctctc

SEQ ID NO: 8274 - DNA, 1214 bp, Homo sapiens
ctcttgtttataattaccaactccttttaccaccaagtgagcccaaataggaataccttcataaagtaatagcaaagtaattagggaattagcttccttttgcttcaaagtctgatactttacttaaatgatttaggagattgttagaccacttctctacaacataataaaaataattatcatgtattaaatatttgtgtaccaggtactgcgtctagaactcctaatatattatctcactagctcttcataaaaatactatgaaagttagatattgtccccattttacaggaagggaaatggggatgcaggtgagtatcttgtctgaggtcactcagcaggtaaaaggaggacctgagatttaacttaggtctatatgactcaaaaacatgctcataaccattctgctatactacttcaagtttgtctgtaattgatatggcgggcaacacccagaaatcaatctggaaacctaaagttgtaatttactctgtctaatcattgtatccgcgctgcctcccatagctctaactgaggaactggattctataaccagtgagctacatgcagtagaaattcaaattcaagaacttacggaaaggcaacaagagcttattcagaaaaaaaaagtcctgacaaagaaaataaagcagtgtttagaggattctgatgccggggcaagcaatgaatatgattcttcacctgccgcttggaataaagaaggttaacttttttttttttttttttgctagttttatttcttctcatattttaaaaaactagaatgaattcttgatgggacagtgctttccagtaggcttagaggtgaaactggccatttctccagtggaatgggaaacttgcaggtggatcattctttccctgtgttctgtagtcttcaaattaaacttttattattcagacatttttttccagttattgttacagcaacattgatcatgtttagaaaatgagatacttcctttacctacattaacaaacagttaagaaaaaaaattcaaactccttgccaaaggttagatcattttcctgccctagtgaacaaacctttcatgattcaagaccttatcaaacatcaagtttatcaattataaatagaataatagaataattagaataactctagaagggattgtgctttttgtggatgttgcttttcaatgattcacgtctgaacaagatatttacaccaa

SEQ ID NO: 8275 - DNA, 1113 bp, Homo sapiens
atgaatatttcagaaccaagaggaatacccttgggtgacatatttatgggcagctttcctctttatgccttgccaactcatctgcttgactaagccttcctcatccagctaaaactaggaaaactactgcagacacagatgccccttggtaacgtctaatctttctttgtttctctttttctccatttaatcaagatagaagaggaatgagacaagtggaacaaagctacaactttaaaatgcataacccactccttggttctgctgcttggttgtacattacagttctgtctggccagttgcccacattaaaagccaaacaaatgtgcttctttttttatatttagctttgactttacgtttaaaatttatgcattgtgtttaattaccttttccgtgttgtattttctttctcttttaggttttatttgtagccggcttggcttttgtaattggtttagaaagaacattcagattcttcttccaaaaacataaaatgaaagctacaggtttttttctgggtggtgtatttgtagtccttattggttggcctttgataggcatgatcttcgaaatttatggattttttctcttgttcaggtaaggcatattattgtctctttcagtaaatcagtgtgtcagatagttagtacaaaaactcagatatttgcatcagttggagtaagatgatgatcatttccttaaatggaattttatttaggttgaatcttatagatttagatgaagcaactataaaaatgttttatcacatgtgaatgattgcctaatggtataaattatcttgttttgtcagcacaataaagtttattttattggcattttaaggcaccatctttatgttggatatttgtatcaactaaatagtggtaggtaggtcggtcgatcgatcaatcggtaggtaggtaggtagatagatagatagatagatagatagatagatccagcattttggtgtgtagaatcttatacttcatagctactgctacttgatggaaatttatttagcacatatacgtattagaagattgtttaccaaatacactactatgggagattttgagcaggtaatattttgtaaatgccagttagcag

SEQ ID NO: 8276 - DNA, 2814 bp, Homo sapiens
cagcaaattagcaaagaagcagtgaaaacaggcttctactcaagtgaactaagaagaagtcagcaagcaaactgagagaggtgaaatccatgttaatgatgcttaagaaactcttgaaggctatttgtgttgtttttccacaatgtgcgaaactcagccatccttagagaactgtggtgcctgtttcttttctttttattttgaaggctcaggagcatccataggcatttgctttttagaaatgtccactgcaatggcaaaaatatttccagttgcactgtatctctggaagtgatgcatgaattcgattggattgtgtcattttaaagtattaaaaccaaggaaaccccaattttgatgtatggattacttttttttgtaaacatggttaaaataaaacttttgtggttcttctgaatcttaatatttcaaagccaggtgaaaatctgaactagatattctttgttggaatatgcaaaggtcattctttactaacttttagttactaaattatagctaagttttgtcagcagcatactccggaaagtctcatacttcttgggagtctgccctcctaagtatctgtctatatcattcattacgtgtaagtatttaacaaaaaagcattcttgaccatgaatgaagtagtttgtttcatagcttgtctcattgaatagtattattgaagatactaaatgatgcaaaccaaatggattttttccatgtcatgatgtaatttttctttcttctttcttttttttaaattttagcagtggcttattatttgtttttcataaattaaaataacttttgataatgtttactttaagacatgtaacatgttaaaaggttaaacttatggctatttttaaagggctattcatttaatctgagttttcccttattttcagctttttcctagcatataatagtcattaagcatgacatatccttcatatgatcactcatcttgagttaattagaaaatacctgagttcacgtgctaaagtcatttcactgtaataaactgactgtggtttcttaagaacatgacactaaaaaaaaagtgttttttttccaccgttgctgattattagacagtaggaaatagctgttttctttagttttacaagatgtgacagctttagtggtagatgtagggaaacatttcaacagccatagtactatttgttttaccactgattgcactgttttgtttttttaacagttgcaaagctttttaatgcataaaagtataattgaaatctgtggtatttatttacaaacatgtctacaaaaatagattacagcttattttatttttagttaaatctcttaatacacagagaactcccaatcttgctcatctaaataaggaaagacttggtgtatagtgtgatggtttagtcttaaggattaagacatttttggtacttgcatttgacttacgatgtatctgtgaaaatgggatgatattgacaaatggagactcctacctcaatagttaatggaataataagaggctactgttgtgtctaatgttcttcaaaaaagtaatatcctcacttggagagtgtcaaatacatactttgaggattgactttatataaggtgccctgtagaactctgttacacatatttttgacccatattatttacaatgtcttgataattctacctttttagagcaagaatagtatctgctaatgtaagggacatctgtatttaactcctttgtagacatgaatttctatcaaaatgttctttgcactgtaacagagattccttttttcaataatcttaattcaaaagcattattagacttgaaagggtttgataatctcccagtccttagtaaagattgagagaggctggagcagttttcagttttaaatgagtctgcagttaatatcaaatgtgagtttgggactgcctggcaacatttatatttcttattcagaacccttgatgagactatttttaaacatactagtctgctgatagaaagcactatacatcctattgtttctttctttccaaaatcagccttctgtctgtaacaaaaatgtactttatagagatggaggaaaaggtctaatactacatagccttaagtgtttctgtcattgttcaagtgtattttctgtaacagaaacatatttggaatgtttttcttttccccttataaattgtaattcctgaaatactgctgctttaaaaagtcccactgtcagattatattatctaacaattgaatattgtaaatatacttgtcttacctctcaataaaagggtacttttctattaattggtggtcaagtatatctgtgttatgaagttctaaaagctaatttagcattgcaaaataacctcatttttaaaaaattagccttatatgcagtgttctatttatcaaatgatcttcacatctttcatttccaaattgttgaaatgtactaatgaatacaaatagacttcaagtaagcaaaaatgttcttaattttgaaaactgtaaaataaagtcacttaccttgggcaatatgctattttttaaaaatcagactcccagtttgtatattatgttattcaatagacattttctgagtaccccttgaatactaaaagtcctgtgttgaatgtgggagacccaggagaacaagatatgtgccatctgctcattaagtgcttagaatgttaacattgcttttaaattcttagccgtatttccacataacttgtcctgacttacactgcaaacaaatggtggtagaagaatttgcagtcgaaacaccccaacctcttatttttctccca

SEQ ID NO: 8277 - DNA, 1290 bp, Homo sapiens
atttaatttgaagactcatatatcaaaatttattaaagtgtatttaaatagagcagtgttcaataaaatacgtatataataaaattaaataagtacttgttacttacaaatatctaattttctcatagtgtatgtttgcatattctatgtataaaacctaattcaaaacataagtattggggaaatgtggacctgtaagtgatgaaaattagattagggaatgagttcaggcctatcaagttttctacaattctttctgttggaacatcggacctttgattattctcttttttcccccctttagagattagttcttgctctgtcacccaggctggagagtagtaccgctgtcatagctcactgaagcttcaaactcctgggctcaaacagtcctcccacctcagcctcctgtctttgatcatttttacttacagtttcatgtcttaatctcgatgctttgttgttctggcaggggatgtatggcattgagaatgaagtcttcctgagccttccatgtatcctcaatgcccggggattaaccagcgttatcaaccagaagctaaaggatgatgaggttgctcagctcaagaaaagtgcagataccctgtgggacatccagaaggacctaaaagacctgtgactagtgagctctaggctgtagaaatttaaaaactacaatgtgattaactcgagcctttagttttcatccatgtacatggatcacagtttgctttgatcttcttcaatatgtgaatttgggctcacagaatcaaagcctatgcttggtttaatgcttgcaatctgagctcttgaacaaataaaattaactattgtagtgtgcttctgtttctgggattccttccttaatgattcctgaaagatttcagtcagtctgccaagtcattcttaccacacgtcataaatgtccctaaattccaacatcatctacactcctccctctggatgagacaaaaattcttttttgcaacaggtgccacggtttgttgttgttgtcctgagaatatgattatctttttaaggttataactgaagaagttgtaacggatgtcaatgtatatgacatttacaaaggaagcccgttttaaaaggaagaacccctaaaatggaaactttgttagaattctatttaataatgaaggaaaatgaaagtttggtctggattattcagattgagtctacttggagatagcataacatgtgaatttacagggaaacttaggtagacttcctttaacaaagagttccaaatttacatgtcatatgtagggg

SEQ ID NO: 8278 - DNA, 1188 bp, Homo sapiens
taaaatggaccaggaattaattatttacttatttttaaagaaatgacaaagcacatcctccaaatgggtatgattgtagggaaataggaactcttttaacaaacactgctgatcaaactgttaaactgggacagtctttctggaggttagtttgataataggtatcaaatgtagaatgattattagcacaagctgtgaagtcagactgtaccactgattagccagttgtgataagatgaatgttgtttcctcatctgtaaactggagatatcgagagtacctattaccgtagggctctggaagggattaataaaataatatgagtaaagcacttagcagaatttctagtacatatgaattacactctgaatagtttttgctgctaattgaatgtacatactttttcctccaaattccaattccaggaaagaaatgagacaaatgggccaatagtgaagttaaaagaacccacttaaatgtcctgtgaaaaatagaatatccctaaaaaggattactatgcaaccattacaaacagtgctgtgacctgtatttatttgcatgatcaaatataacaatgtttttcacttggatattaagcaatacacttacttaccaggtacctatgatgatacgcagcatggaactggttgtgggaactgtaggctttctgcttgcagagcttacagtctgatgatgtcaacattttaaaattgataagttattaagatgcataataactataaatcatgtatgaaagcagtatttacaagggtaatatgagcctcaaaataagaagcacaggaaaaactttgggagcatgtgatctagagacttcaggaataacccttaaaccacacatgaagatttaatggacataaatgctgcagaatgtttgttaaagacagatccaatttttattagaagaaaattttagtggaatgtataacaaattccaactatacttattatctttctttgggatgttaagcaagcttctgtataccttagttttctacttagaatataaacacaaaccaaattttataaagccattagaaagaaaaacaaagataatataaaatgcttaacatagtgcctacagatagtaataagtgtatcatttatataggtaaaactctagaattatatgtgtcaaaatgtagtgattatctacaaatagtgataatt

SEQ ID NO: 8279 - DNA, 1168 bp, Homo sapiens
agttatttaataagtggtagctattatttttttactttataaacaaccaacttttagctagcagaggtcgttaagcttttaaaattatgagttggttttcaaaaaggtttggaaaaaaccagtatcttacaactagataacataaggtttatctacaagttgacaatgatgaagtcgtctgaaaaagatggaaaaattgcactgggaaatagaacaactttcacactctccttgtaataatttgttcctacagcagataattttaatgctcagccgctttttctttttcttcactttataaccaatcattgtgtgtgtagctatactgcatcaacattttcttttgcaggaatgccatttttcttccaaaagaattccattccagcatttcctctcatgtttttctgtctctcttttttaattgcatgcagtgcatgataatttcttttctttcatgacatggcttagcctcacagacagctgaatgttgtcaccacttatttggaaacctcagggaataattgtgttaccagcgtctgttctgaatgttttctcatttttctccaattttagccatgacagttgaaaaagcaagtccagtgggtgatggaaatttccggaatcgttctgctccaccttgtgcaaattccacagttggggttgttaagatgacacctctttcttttattcctggagcaaaaataactaagtatcttgggataattaacatgttttttattcgagagactacttctcttcgggaggtaattttatagaagttatttcattttttaaaaaattttctctgaagatttagtaacaaaactaagtttcaaattgttattttttgccaaaaacttacaaatatttatttatattttaattatctggattgagtctagagtttatttcatttagcagcgaggattatcacaagaattgtgttagttttaaacctatttattgttagaaatcttagaaccttatcatatagtaaataaaacaaatatctgtgttcaaatagaagtttaaaatagccctgaaagaacagcttcgtttcctcagtaatttagcaatttttgacagatcacatttagaaatagtagaggactgtattacagatacatgtctaaggagatactttatgtaatttagctctgctgtttct

SEQ ID NO: 8280 - DNA, 1239 bp, Homo sapiens
ttattcattctttctatttttttgtacccattagccatccccaccttccctccagcctgccactacccttcccagcctctggtaaccaaaatatttttttctttgggaattttttttgtggttatatttgtcaaccagtgggaaaatgtcatcattatcatctaaccattttttaaaaatgttgtatcccagagaaaaaactttggggtgatagtgatgtttgtcaggtggtaagtcatcaaacaaataaattggtgcaaaatgactttgcaattggtaagtcttttctctcataggaaaaatgtatggttctgatttcatggtcattttcaattcttatcagccttagtggtacttttgtagcctacagcagtagaagttggatagttcgtatacaagtactgtgtatgtaatatcagttacataattatttttgaaaaaattggtacatttttaaagaatatcttatttttttatttatttatataggcttgaagaaaatttgcctacacgttgtggattttgtcatataccatatgatgaactgaatatgccatttccagctcatctcacatattgctataactgcaggaaacaaaaagttcctgatgttctgtttacaactatagacctcccaacagatgcaacagttattggaaaaggttgtcttattcaagcaaggtatgtttgtgaaaacaacactcggtgtccctgaaaaagtatgagatagggagccgtaaacctatttttaagtgtcagctttactgtttcctacctgtttgatcctgcacaaactggacaattctgctggaactttgtattttattgcatgtaaaaaaaaaaccctctgtgtaaaactcaaataagtttgtgtacaaaagcagtttttaactttaaattctacacaaatatttgtcattttgggaattattaacctgccaaaggctagggatgtgactaagtatagattgcttcaattacattcaatatgtaacacattttagaagttgactctctttttttcttttaaagaacagtgccatgaagtgtttcttttactgctttaattagctggtaagagttccttttaaaatgcactggagtaggaaatcctaattggggaactcatgacaacagctgccaggttaccaaatccatcaggtacttctgtcctcatcttagttctgacatctcagcaatagtgacaccattaattattttcgccttgaaattcctttg

SEQ ID NO: 8281 - DNA, 1176 bp, Homo sapiens
ttgttatattttgcctcatcattgctttccttagcctgcattttctgatcatcttctgaatctgcatcttttctctgctactttcctccacagcaccttacccacagggacctaggatttacctgtgtcccagctccccctctctctcttgtggttcccttcatcttaaaaagtcctgtctcctcctctcggaatctagccttacccctcatcattctagccttgtcagcccagttctgaggaaaagtgtttctttcagtgaagagctgttcctggctgcttctggtaggatcacattatgtcagctttttaatccctttatttttcatgctgtaaaaaattattgggtattttatacaagatgcctttctattatttttcttactggtagtcagagttaaataattggaattataaggatataattgaggattacttgatggctaatcatgaatattctgccaaattattttatatattaaaaaattatataaggacatagatctgggtatttctaatattattagattcttattactacagtttctgttttagatgctttactttctttcccttcataccaactccattcacattggacctgtgtcatcatgttgctaaaccatatgattacattagtaaattattctgtttgaatcagtttaagtctcattttggtgatattcttttattatctttttttctgtctgttgcattaattattaaatttttctgctctattttctgatatttcaattatcactacaaatttacattttattttctggcttttaatatgcttcgtataaagatcttagtttcatttctatgtttagtattgtatagtctctaaaaataatgttcagattactataagaaaaaccatttttttgtttttaggaacagaatgggactatacatatgctaacctttgtttccttatccaagaacagctaaaaatgtaaaagttaattagttcctttttaagtcgttgtggtaaatttggctgtatgcatcttacgttttgaaagggatgggattaactctagtctgtagagcactggcttcttacctgtcccctgctttctatgattgtttgaccatagttgatctactggcatggtcagaacaataaaataaggtagggaaagaaatttaaaattaagccgtaaaaaa

SEQ ID NO: 8282 - DNA, 1296 bp, Homo sapiens
ttgttaaggacttctataagtaatgaaccatactaggaatagggcagtgttcccattctcagagactttccaatctgttggacataggagagattccctgtatgtgtacattccctgtatgtgtacacacacacatacacacaaatgtgcaaagattgtgatacaaggcagactgtgagaaatggcaggtatcaagaaagttatatagaaatattgaagacagaatgtataattaacactttggatcaaggaaggcatgttatatgaattaagggcaacatgttaacattagtggttctctttgtttaaatatagaattaaaattatagatgttagataaaattgtattcaaagatggttcttttatgtgaagaagttggtgttttctttaattagtatttaactcatgattttcaatttatctcctgttctctaaagatagataattgctttttttcccatttttaaaaaaaatttttggcagctcttcacagatggaatcacaaataaacttattggctgttacgtgggaaacaccatggaggatgtagtcctggtgagaatttatggcaataagactgagttattagtcgatcgagatgaggaagtaaagagttttcgagtgttgcaggctcatgggtgtgcaccacaactctactgtaccttcaataatggactatgctatgaatttatacaaggagaagcactggatccaaagcatgtctgcaacccagccattttcaggtacattttcttttctgaatttttccttttgaaaaatagggcatttaagtgcattaaggaaatattttttaaaattgtctttgtttgagcaactatttggttaacttagaaactttctttagctagggtttttgtttttgttcttgttttccctaaaaagatagaagtaaatttctttatatttgcagtttatcatcgttgactctttgcaaaggaaaaactacaagatgttttggattaaccggctgcagagggtcaaggcttctgcttagttttttctagttagtgtttgagttgaagtgttatacatttcttactgccgattgcttattacttaattgttcatgttttcagagttcttgcctattaaaattttattaatttggttaacaattctttgttctttacgttgttcattatttaatttaatatattatgttttctataaagaataatgtcatatatgcttgatcatttttccaaaattgccagctttaaaaattctctttctgctcttgaaaactctagaaaatggtctggatttgaaaacag

SEQ ID NO: 8283 - DNA, 1099 bp, Homo sapiens
aaaacattttgctaacattagtaggattatagttacttttcgtatcgttctcttcgaacctgcctaacattgcagagcaagtagggtgagttggaaagatttttcaggttctcatattgactattttgcttttcatttttattcctttctcctaacaacaaaataaaggaattcagacaaacatgtcatgtgataattatatagccttgggtaatacattattattttttagttttaaagtactttaaaaattggcagagtatttttagtatactaagatttgaacagtttaaccagtagtgtcgggatttgattacgctgataaagatatgcaagaaataaagtaataaaagacaaaatgtaggtttggaaaattcaaattgtagttttatccattaatcatatactttactttgtgcttgtcattgtgataattacataaagataaataaaataacacacctagcccttaaagtagtagttctttactttttaaaggtcaggggtcccttgagaatctgaaaaattgagaatctcttcctaagaaagtgcacatacacataaaattttagggaatattctagttgtcttttcatccttgaaaccccaattaaaaattcatgtcttaaagaactgagatgatgatcatgctatatgagctagttaattattaatgctgatgtggatattcgtttaaataaagcgaaattttagaaatcagaagttaaatttatagaaggaaaaagtatattttctgttgttaggaaagcattttccagtaatttgatttttctggcaccctaactaagggaagttggctttttaaattttactttgttgcagaagattaaatttaaggttgagttccactttgtttgcaatagtttgaaaaagaatagttaatgcagattttttttttaaatttttttccttttaagctttgtgtcttgtacaatgtgagtttgccaaattttcttcatctgctacagattaggtatgccattgttgctgccatgtggcggcgcaccccgtgcttcttaaacgcactgactggaggtttatcgcatcacttgttcacatgcacggagcctggtaacag

SEQ ID NO: 8284 - DNA, 3993 bp, Homo sapiens
tattcaaaatatgcaactacaaatttatcctctgagaaatcttctgaggagtctaatgtattccaaatgacttaatattctcagacaaatgctttaaaatacttggattatctcaagatttttgaagctaataaagtaaatagaaacacaggccattttaaatggtaaattctagttacataaatataatcttaaagtatgtttgtatctgtaacagtgttagaccagatttggtttctacctccccaatgttataaatgttcacttttgtttttataaaccatattactgtaagatcaatagaactttgcctagttaagtgaatggaaccaattaaacaactagtagctttttataatgttagtgtgaacttgaaaaattgtttttggtggaatttttgtctgtggttagaacattttcataaaacagataaagaatgtgtaatactcttaattttttttttttttttttttttttttttgctttctgccttctaaagtgcaacagtatatatcttgtagaactgtgggaggagagaagataatttttctaccttactccatattcttacttcaaactattttgaatagaggttcactgagccattgctgatagactgtgcatagctactagctgtcacactattgtaggttttttggagagattcatagggaagtgaatgtaaccaggaataaaggctctcactttagctctgggactatgcagtggatcttgggaacaaaataagatatctaatctattttccccattctggctagattttggttgttgtgatgctcctacttcctgtataggtttttgggatcatggtgcaggctagtaataggattcagaattgcttcccttttatatcgaccatgtaagggattctaaaggagggtaaatctcaaagtgctctgaaatcatccctctaaaatctgtcctgtggtgtgctaagatgtctgttgcctttttatgttaagctaaggaacttgaatgccttacctaataactcaactagtagtaagctcattttgtaaatatgaaaatggctgtaagaagtggcattcatgtatattcaatgttagtcaatagaccatagtggcctggatgctttaacaagccaaattccgcaattttttttccttttttccccttcatacttgtatgatctcacctgaccagtgatttcttttcctcctaaccccatgctaccaccattttctggaaatcaaagagatgtggtagtaaatcatacagtacacacgatcatctgagatcaatatgagcacaaaactcatcaagtaggtctgcctggaatgtatataaaaaatgtaaataaaaatttgtaaattagtgtgaactgtatcttgcatatgagactgtgtattgttttgcattctcttcccttttgtagaaatttttctgtaaggaaatgattcagcttgttggttttagagtaaaaatagccaacagttgtggctacacagtgagatcacaggaactggaaatagggtttgtcggctttggttaatgtcagtactcatttatttagcctctcagtgcttaataagacttttctttattttttagttagccgttaggttttgtgaggttagattcctggaagcagtgaatttatacactgttatattaatagagctccgttctttgagtcatgattccaagctaaaggaaattaaaaatgtaatttaataatttcctatttttagggttgttaatttttttctacaaaaaaaccttgaaattttagatatcccaatgtgaatctaatttccatatatacagaaattagacaaataataagtctttagttcaacttaagcatatctcaaatgacttctctaaatttaaagttgatcatgataggatcataaaagacagaaaagacttaagtaatcttgtaatgacaattatttccatttttgctgaactaaaaatatttaacttcataaatatgttactacagcttccagatttaaagaaaaaaagtttcccccactctcaattaaaagttagaaccctccacttttaaaattatacaaatatttcttttttacattacacagaagccttctgtaccattttacgaatttctgtcttcataatataagtgaaaatactgtcatttcaattttctgctttaaattgtttttaataagcattccaaagtgatacagacttaagcttttaatcaatcagtcattcagttgatagacaaagttagcgatgctttatgctaggaaacttgttgacagtaacctgtgcgactttatgcagaagacaaatgctagtaattattatgcacagaggaaaaatcattttaagtatgtggtaaagcagcttcatctttcaaaattgatttgctctggtttttctttagtccattagattccagaatgtccttttactgggaatttagttatgtattaagataacctgttttcagttctttttgaaaagaagacattatttatattgaaccaccttattttaaaatttttaacttttatataccacttgtgtgattccagtgtcatgtcttgggtttgatgtcgttggacagaaaagtgtatcaattattttaaatgaatttttccccatgtttgaggcttagtctgtaaatgtgttgctgtaacagaaaatacttgggtatgcattacttgaatacttgaaaactgaaattaataagatgtattacataatgaattagatttctctgaacagtttttacactgaaaatcttcatttctggattgcagtttgaaatggaatgaagacctgaattatttgggtagaaaaaattatgatagtgcttataagaactgtaaactgttttaaactattttgtgtttgacgcatcaaacttcaagttttttgtaagtttctctcctgaaattttctttctcttctatactttatgcacttactatactactgatgtaataaaagagcagggttaaaaatattgtatctgtattcattgtgaatcctgtagcttttctagttaacaaaaaatcgctttctaaaatactcttaatcccattgttttggttaacatcttacccatttgttgtatttcaaatgccattaatcattttagtacaacacctatgtttataaaaatttgaaaacattacatattgtatttaaaactaattagtgaagagtaagaaaaaaactagccaacagaattgtaggtgatgcattagttaaatttcaaaactcataataaaggaactttcagagattggttgaaacccagtggtatccctgtaaattagctcctgtgactggaaaagaccccaaaaaggcagtagaggagattagtgtttacttgctgtggttgtggtgtgctgctacttaattataggtagtgacacactgaaattcttatttgtccaataatctgaagtagtttcctatatttatctgtactaaattgactataaattgagtctgcaaagaggaaactttttgactgtactgtatttaggagcctttgtacagcttggtcaaatttccatgatatgaagtatttgagttttaaaatatactgttattaaaaggaaaaagacatggccattattccatgtgcttaaatgataatttccttattcagtttcagaagaaaaagaatgaaattgggtaactgtcattgcgttagctttatgttgaattgggaaattgtggcataaagcttaaattcgtgtttatcaaatgtgaaccatagtagtataatgctgctttgtatataatgtaagtgctacaaatagtctcagcactgaaaatgtattgatacctcttaaatgaatgcaacttttgatgtaggtgttttgctatgcctcagaaaatatctgtctgagaatttgttaatctgtttgataatgaagatacttcctgttttcttgtttcatattttcatgttcaaaatttaagttttacatttttactactgttaatttaaataaa

SEQ ID NO: 8285 - DNA, 1162 bp, Homo sapiens
tcaatttatcttccaattaatctactaggaagactaaagaacatctcattgaggaatataggcacataaaaacattgctaaaattgcaatccctgcctctaacttcccaacagtcacattggagttgtatcacctctaatttcatttgattcaagacaaagacaaagtagccatattcttttagaacaaaaatgaacagccatgtggattttttacatagtactcttcttcggcaaaaagccacagaactttttttaaaaatcgtttccaaggatgaaagtgactttgccaagcaaagtggcttcaaaacaggcctcaaaaatactaatagaaagacagatggttctactaagagcttggctgccaaagtggaaaaaaaaagtaaaaaacaaaacaaaaaaaaaaggagtgatgctattgaagctgactgcaaagttatccgatgactacaaatacttttgtcccattgcaagtgctaactctgcctccagggctgatatagccaaaatactaacttccccacatccaatccccctgtattcctacccctcctaaatgaaacctgtcagtgccaagccccagaaaacagcacaagcatgcacttgattctgactgactgctctgcagaagcaaaatattgcattgaagaactcctatttaggaacagacctacaaggaaaattgcttttcttttcaaaactgcctgtcacattttctttttctaattcccctcttcctcctcctccctgtcaccaaagggcccctgggccctatgagtttatatgatacaaactcaatttgtataaagaaggcaagaagcagcaccacagagaggtgaagatagtttgcaaggatagagaaataatccagtcaagacacagtgcaattttctctccaaactactactacaataatacctccactttatttccttcagggcaactgtcatttctttttaaccagattgctactagatataatagaaactgaaatattatatggtcactgactctttctttcaatggctcatttcactactgcatttttacttttgcatgatgtgtttattgttggcaatattactaggatacaaccactttcaaaggatatagaattaagacctctgttactttaacacaataaaatttcattcttaatgcta

SEQ ID NO: 8286 - DNA, 1188 bp, Homo sapiens
agctgctgtcaaagacactttggcccgtttatccagtgctttctcccctcctggagctctcagcttcagcttcagcttaggaccttctctccacactgcatgactggagtcttgcagggatcttggctctgacgatctgtctacatttcagagtcggagaacataggacagccatcctgccttttcccaactccttgtcctcatttattatcctaggcaggcttttcccacctcccactccctggacccagccatgtcctgctcctctcacccattgccacttccaggtggataataccaaactgaatgctttataagtggatgaaagagttaaaggctcacaatagatgattactgaacactatggagaaattaagcctcctttttaataaatgataagcccttctcatgtctggtgatccaaaactgtatttcatgaggctgaccatgcatatatcaaatcataaaactcttacaactcataccctgactgcattttcaggggtatctactatatatttcaatcttattattaaggcagtggagcttcatcagtgctcactacataagaaatcatatgaaagtctattataactttaaaagtacacaagaaatgtggcttttgatgcctggtagagggggcatgtagacataccggaaacatcatcagctctctatcccattgaagtttgtttgaaagaaactgaggatgcaggtacaaaatggctgagtgatttttttttctgaccaacggagccgctcgttagcaacttgaaaggatgcctagatccaaaatagtattaaacaagtgtttcttcaatatgagatcattatgtttctcttctaaatccaaatactaattgcaaccttgctgtgagcatacaatattaaggccatcatagccatggcaacagaatgcaacatgaagtggaatcctatcatctgcacagtgttgttagtggtttgggtggcagacgagcactttcttacaacatcgctatacaacatcgctaatgtccaattccacagaggggattgcattgcatacctttaggcaattttgccacacaggttctgttatctttgaacattctgtgtatctctataattaatttcaatacaggatggcttgttaatccacagacaaaaatacaagcacaaattaaaatttcaacaggcactttacaa

SEQ ID NO: 8287 - DNA, 1110 bp, Homo sapiens
tttaatgaaagatgatatcagaggaagaataagtggaggtagagaagaaaggaatgatagaggaggggaaaaaaacaaaacatatttttgtgttatccaaaggagctttttccttattctgtcaagcattgagatcttcttcagctttcaatgtagttgctaaatacaaataatgctactaggtagtgactaaatatagcaaacacttcatcagatattagaattaggtcacactattgaggttataatctgaaggttgtgttacatagaaaccactttagattattatcaacttggactaggctttattttataatagcatagtaagtaatatctattgtgtcatttcttcaaccattttattctaagatccatgaagcttcttgaggccaaataaaataataagtttagacaagaagtagattgtgacttttttcccttagagatactatttactatctcctatcctgataggtggaaggtttactgaattggaaattggttgactattagtttttaactaaaatgtgcaataacacattgcagtttcctcaaactagtttcctatgatcattaaactcattctcagggttaagaaaggaatgtaaatttctgcctcaatttgtacttcatcaataagtttttgaagagtgcagatttttagtcaggtcttaaaaataaactcacaaatctggatgcatttctaaattctgcaaatgtttcctggggtgacttaacaaggaataatcccacaatatacctagctacctaatacatggagctggggctcaacccactgtttttaaggatttgcgcttacttgtggctgaggaaaaataagtagttcgaggaagtagtttttaaatgtgagcttatagatagaaacagaatatcaacttaattatgaaattgttagaacctgttctcttgtatctgaatctgattgcaattactattgtactgatagactccagccattgcaagtctcagatatcttagctgtgtagtgattcttgaaattctttttaagaaaaattgagtagaaagaaataaaccctttgtaaatgaggcttggcttttgtgaaagatcatccgcaggctatgttaaaa

SEQ ID NO: 8288 - DNA, 1140 bp, Homo sapiens
atagatttaacaggaacatctgcacatcttttttccttgtgcactatttgtttaattgcagtggattaatacagcaagagtgccacattataactaggcaattatccattcttcaagacttagttattgtcacactaattgatcgtttaaggcataagatggtctagcattaggaacatgtgaagctaatctgctcaaaaagatcaacaaattaatattgttgctgatatttgcataattggctgcaattatttaatgtttaattgggttgatcaaatgagattcagcaattcacaagtgcattaatataaacagaactggtggcacttaaaatgataatgattaacttatattgcatgttctcttcctttcacttttttcagtttctacatttcagaccgagcttgtcagcttttttgaaaacacatcagtagaaaccaagattttaaaatgaagtgtcaagacaaaggcaaaacctgagcagttcctaaaaagatttgctgttagaaattttctttgtggcagtcatttattaaggattcaactcgtgatacaccaaaagaagagttgacttcagagatgtgttccatgctctctagcacaggaatgaataaatttataacacctgctttagcctttgttttcaaaagcacaaaggaaaagtgaaagggaaagagaaacaagtgactgagaagtcttgttaaggaatcaggttttttctacctggtaaacattctctattcttttctcaaaagattgctgtaagaaaaaatgtaagacaaaaaaaaaaaaaaaaaacaaacagaggcagaggcaggcagtagcaagaaagcagagcgtaacatcagctagatggtaacatgcaatgtcagctctcttgaagacatgggaaacctaagttacaccttgggttaaaattcttcaccatattagttttgttgcttcataaaatttacctaagcaagtggtcttgcttgcctcaaatccaagcagtcttgaacacttggaggcaattaatgagtatatcttagtcaaaagaattgttggagctttttattaaagctacagtttcagttctgcttttggggaattgtgctatgaaagcagctgccaaaataagctcatttattttcttcaatc

SEQ ID NO: 8289 - DNA, 1099 bp, Homo sapiens
ccttggatacattaaaaggtgttagataagagcgctcacacttgctgctcttctattgcaacttgacagaagttacttctctaaaccttagtttctcatctgaacaatggaaataatgatagtgtctatctcatagtattggtgtgagatttaaatgaaataattcatgtaaaattgcttggtgtgtggaaacatagtaacttttaactgttctcattaacttggctatttacctgtgttcttctatcattacatttcaagttaaaatttcaaggtttcacgttgttctctctccaatgaatgcagttaaatcacttagattttctaatgagttttcctttaatgttatgcagttgactagagagtgtatatatattaagaacataataccttcactatgtccacatgtgaattaagagcttgaggctatcagagggtagaagatgagggagtggggatgaagtatgtttgtaacctgtgtattttctctttcttaaaggaattacggctcatctctttttgcccaatgtgaagcagtagataatgggtgtcagcaggtcctgtggctctatggagaggaccatcagatcactgaagtgggaactatgaatctttttctttactggataaatgaagatggaggtaatccactcagatttcactgtgtgcatttctcagtcattttcaacaggaccagaaagacaagagctagaaacttagtacaagggagtaagtagcacagttccaaaggctaagtaaggactactgtgcttttgctgcccaaatagacacaagtttcttttttttctttctttcttttttaaagaggtggagtctcactatgtcacccaggctgcagtgcaatggtgtgatctcagctcactgcaccctggttcaagcaattctcctgcctcagcctcccgagtagctgggattgcaggagcctgccaccatgcccagctaatttttgtatttttttttttagtagagatagggtttcaccatgttggtcaggctggtcttgaactcctgacctcaggtgatccaccggccttggcctcccaaagtgctgggattacaggtgtgagccactgcaccc

SEQ ID NO: 8290 - DNA, 1250 bp, Homo sapiens
ccatgtcctgaagcagtcacttaggctatgaaacagaaggatgagttagagaagtaaatattatattttaccccccaaagcctaaaaccatgtctaggttctcccctttctcaattcccaatcatgcaaccttgaaaggtgttatatagatagttgttagaaatatgtctgtcctccaaaaccctactaacacgcaaaaatggacaaatctagcttttttgctaaaatcctaacaactcagaaagcaaagcaaaatgaaatgtatgtactccattctcaggatttccttcttaaaaaccactaggctttgtgtaactcaattttaaaagtatggtaatagctcctgtaattcgatggcttcttctgggagacagatataaatctattctagactttaagactggtgtccacattttaagttacagttgtatgtacttctactttgttgcagccttctcttggagtcaagaagcctaccaaagccctgctctttgtactcttgagcccagtgggaccttatttttcaagtggaacctttaatccagtgtccctgtgggccaatcccaagtatgtaagagcctggaaaggtggaactggggactgcaagatgggagggtaagtaaatctgtgtctctgtctaaaggaaagacaccttcatgaccatttagttagtgccatttcacttcagtatgaacacatataatacttttcaaactttaatgctcattgtgtttcatggttaattttcagtttaatctttcagcaagccagctgtagtagcttttcctatataaacgcagtatgaattcagtgccctcgcttttagatgtgctagtttaaaggatagcccatggccctttgtaagggagaaacactggatatgatatctagggaagaactgaagtaagaaactacaacaagcatcacatcggtgctttggataaacttcccctgggcgctggtctctggctgcaggctgacggctggcattaaaaagcatctggtcctgggacccaggctctcagttggctccagggagtcatgtctggggaaggtgcccgcttcactgaagtgctgtcttcattgccacagattgtggccacacctgctgccaactggctgcgggacagccctgctttggctctgtcaggccagtctcataggccatatgtagctggcaggaaataaaagagcatttgaaaagtgttggacgatttcaggggtggacttggccatgagttgggaatgcc

SEQ ID NO: 8291 - DNA, 1128 bp, Homo sapiens
cttcatgatttgtgttttacatctcctacttaagaatcctttcctaccttaaggtcacagagatattttgtactttttaaataaagtcttagtattttgtcacatttaagtatatcatctaattagaattgattggggggtatggtaagatgtagggatctaatcttatctttcacatgtggatagctcgtcatcccatcacaatttttggggggaaaatcagaaaaaattgtttggttttattattactttaaaattttttttattggtaccataaattatacatatttatgaggtacactgatgttttcatgcatgcatataatgtgtaatgattaggacaaataagaaagaaataaataaaaattaggataattaggatatccatcacctcaaacatttcttatttttttgtgttgggattattaattttttaacagtttaaatgcttcagtgaggatcatttattattgccacattgtgagaaaattctgtcatttattatgtttttcattctttcaggtatttgacaaagaagagctcttagagtgtattcaacagcttgtgaaattggatcaagaatgggtcccatattcaacatctgctagtctgtatattcgtcctacattcattggaactgaggtgcaaactgactctttattttggggtactttgctgggcaagttattattgtttattgttgtttgaaacttctagcatatagtttgcagtagccccccagtagcatcattaatgacttcttccttctgattgtcaagattagaggtagcaaacattttctgtgaagcgccaatcagtaaatattttttggctttgtggccatatagtttctaataagaaattagatccctacctcttaccataccccaaaatcaattataattcgattatatacttaaatgtgacaaaatactaagacgtttattaagaaatacaaaatatctctgtgaccttaggtaggaaatgattttttttttttgaggtctctctctggttttttttttttgcccacgttgtcgcttaggctggggtgcagtgatgcaatcacggctgactgcagctttgacctcctgggctcaagtgatcctcctgcctcagcttcccaag

SEQ ID NO: 8292 - DNA, 1180 bp, Homo sapiens
gtggcttaacatagtatggtcttgagctgcctggtttctgtgatttagggactgaaccagctctggtcacatctggattatctactatccagcattcaaatgaaccagattacatgaaaggatatgggggtactctttgggggccacggtgccacaaggcctttggtttcgatctccattgcctagggaattaacctgtgctgtgtgattctagatgttttcttcctgctcccttaaataacacctaaatgtgttattcagcagtgtggctcctgctaagcagaggagaactcggaattcctaccaaattctgataataaaataactttcctccacctcaaccattgtttttaccagtcctgtcaactgttagctttcctggatttaatgatctcaagttgaggtcaatgtcaacagctttatgggatgaataagatgaacgcccataggaaagtcagtctcttgaacacgggttgttttcttttggttaccctctaagattttttctctttgatctccagttatttgaaggattgaaggcatttcgaggagtagataataaaattcgactgtttcagccaaacctcaacatggatagaatgtatcgctctgctgtgagggcaactctgccggtatgtaagtgtaggagtttcttttgtgtttcttttaatgtaacgggtcacggtgttgaccaccaaataaataatttctgaatagttagataaatattcagtacaaaccatatgaacattaacattatttctgatctactttagttaggtaaaaatacaagaaaatggccgggcacggtggttcactcctataatcccagcactctgggagactgaggtgggtggatcacttgaaaccaggaattggagacaagcctggccaacatggtgaaacaccatctctgcaaaaaatacaaaaattagccgggtttggtggcacatgcctgtggtcccatcggtgtggctgaggcatgagaattgcttgaacctggcaggtggaggctgcagtgagccaagataatcacatcactgccctccagcctaagccgcaaagtgagactctgtaaaaaaaaaaaacaaaaaacaaaaaacccaagaaaataatatcatttggcaattccacaattttttaaaatcagtgtctgtgggggattcatatgcaagtgaga

SEQ ID NO: 8293 - DNA, 1239 bp, Homo sapiens
agtgcacccagaggattttgaaggcttatgccaacaattctttggggcagttggagtgtaaccattgctaaatagcagttcagtacttaatgacattcattttagtttaacaaatcattgtgagtgttgccattttttattagggaaaacatctctttcatctttcccaaatactcaacatgagtcctatggtgagagtgaaaaagggttgtattctttttttgcatcatcttaccccatctgctattttgtccctcttctatatatcactgaaatttggttctgatattctattaggcagtgtacattgcagagattatgaataactggccgaattctgaatgcaggcatgatttgttcagctcagagtgttaaatttctgtgttagctgctaacctttaaaagtcaattgatttcctttttttttttcccctctgtataatctagccagcgaatgctcagtagcttttctgtaaatagtgatgatttttcttccccaggctaaagacctaatagtcacaccagctaccattttaaaggaaaaaccagaccccaataatctggtttttggaactgtgttcacggatcatatgctgacggtggagtggtcctcagagtttggatgggagaaacctcatatcaagcctcttcagaacctgtcattgcaccctggctcatcagctttgcactatgcagtggaagtaagtacatgggaattaaagagagtgacatgcttgcacttcactgtgggtactaagtagcttctcctgctaaaatagctcttgggcagtatgggctttatcatatttaccagaggaagccgaaaatgtctttaaaagttttcctatagacagttggattgaagataaatcttagcagctaatttttcagataatcttgcattttctgtgacgtcaataaaaaaattatttaaagcaaatagaaaggacagctggtgggaaaattggcaattaaaaagccagcactgttgataatttaataagtcacctttcttcttagatcttctaataattgagaaagggtcattgagaacaatattatgatttgattttaatgctaactccacatttttatgaccagtaataatgtctagttatgcatgttaagggacatgtaattaaatgtcctccttcagccatgagttgaaataattttaagcataaaatgtttaaagaattctttctctggtccttttcagggtgcacaattaaccagatg

SEQ ID NO: 8294 - DNA, 1201 bp, Homo sapiens
taaagctgaatttatatttagtaacttctgtgttaatactggatagcatgaattctgcattgagaaactgaatagctgtcataaaatgaaactttctttctaaagaaagatactcacatgagttcttgaagaatagtcataactagattaagatctgtgttttagtttaatagtttgaagtgcctgtttgggataatgataggtaatttagatgaatttaggggaaaaaaaagttatctgcagatatgttgagggcccatctctccccccacacccccacagagctaactgggttacagtgttttatccgaaagtttccaattccactgtcttgtgttttcatgttgaaaatacttttgcatttttcctttgagtgccaatttcttactagtactatttcttaatgtaacatgtttacctggaatgtattttaactatttttgtatagtgtaaactgaaacatgcacattttgtacattgtgctttcttttgtgggacatatgcagtgtgatccagttgttttccatcatttggttgcgctgacctaggaatgttggtcatatcaaacattaaaaatgaccactcttttaattgaaattaacttttaaatgtttataggagtatgtgctgtgaagtgatctaaaatttgtaatatttttgtcatgaactgtactactcctaattattgtaatgtaataaaaatagttacagtgactatgagtgtgtatttattcatgaaatttgaactgtttgccccgaaatggatatggaatactttataagccatagacactatagtataccagtgaatcttttatgcagcttgttagaagtatcctttatttctaaaaggtgctgtggatattatgtaaaggcgtgtttgcttaaacttaaaaccatatttagaagtagatgcaaaacaaatctgcctttatgacaaaaaaataggataacattatttatttatttccttttatcaaagaaggtaattgatacacaacaggtgacttggttttaggcccaaaggtagcagcagcaacattaataatggaaataattgaatagttagttatgtatgttaatgccagtcaccagcaggctatttcaaggtcagaagtaatgactccatacatattatttatttctataactacatttaaatcattaccaggaactgtttgttttgtagtgaaccttgagt

SEQ ID NO: 8295 - DNA, 1352 bp, Homo sapiens
aagcttttgaatcatccctattctgtgttttatctagtcacataaatggattaattactaatttcagttgagaccttctaattggtttttactgaaacattgagggaacacaaatttatgggcttcctgatgatgattcttctaggcatcatgtcctatagtttgtcatccctgatgaatgtaaagttacactgttcacaaaggttttgtctcctttccactgctattagtcatggtcactctccccaaaatattatattttttctataaaaagaaaaaaatggaaaaaaattacaaggcaatggaaactattataaggccatttccttttcacattagataaattactataaagactcctaatagcttttcctgttaaggcagacccagtatgaaatggggattattatagcaaccattttggggctatatttacatgctactaaatttttataataattgaaaagattttaacaagtataaaaaattctcataggaattaaatgtagtctccctgtgtcagactgctctttcatagtataactttaaatcttttcttcaacttgagtctttgaagatagttttaattctgcttgtgacattaaaagattatttgggccagttatagcttattaggtgttgaagagaccaaggttgcaaggccaggccctgtgtgaacctttgagctttcatagagagtttcacagcatggactgtgtccccacggtcatccagtgttgtcatgcattggttagtcaaaatggggagggactagggcagtttggatagctcaacaagatacaatctcactctgtggtggtcctgctgacaaatcaagagcattgcttttgtttcttaagaaaacaaactcttttttaaaaattacttttaaatattaactcaaaagttgagattttggggtggtggtgtgccaagacattaattttttttttaaacaatgaagtgaaaaagttttacaatctctaggtttggctagttctcttaacactggttaaattaacattgcataaacacttttcaagtctgatccatatttaataatgctttaaaataaaaataaaaacaatccttttgataaatttaaaatgttacttattttaaaataaatgaagtgagatggcatggtgaggtgaaagtatcactggactaggaagaaggtgacttaggttctagataggtgtcttttaggactctgattttgaggacatcacttactatccatttcttcatgttaaaagaagtcatctcaaactcttagttttttttttttacaactatgtaatttatattccatttacataaggatacacttatttgtcaagctcagcaca

SEQ ID NO: 8296 - DNA, 2040 bp, Homo sapiens
gcagttttaatgcagttgtcaacaagtagaacctcagcttgctaactgaagtgttttattagtattttactctagtggtgtaattgtaatgtagaacagttgtgtggtagtgtgaaccgtatgaacctaagtagtttggaagaaaaagtagggttgttgtatactagcttttgtatttgaattaatcatcattccagctttttatatactatgtttcatttatgaagaaattgattttcttttgggagtcacttttgatctgtaattttaaaatacaagtctgaatatttgtagttgattcttaactgtgcataaacctagatataccattatcccttttatacctaagaagggcatgctaataattaccactgtcaaagaggcaaaggtgttgatttttgtatatgaagttaagcctcagcagagtctcatttgttagtttttagtggtaactaagggtaaactcagggtttcctgagctatatgcacactcagacctctttgctttaccagtggtgtttgtgggttgctcagtagtaaaaactggcccttacctgacagagccctggctttgacctgctcagccctgtgtgttaatcctctagtagctagtaactactctggggtggcaggttccagagaatgcagtagaccttttgccactcatctatgttttacttgagacacgtaaatatgatagggaaggaactgaatttctccattcatatttataaccattctagttttatcttccttggctttaagaatgtgccatggaaagtgataagaaatgaacttttaggctaagcaaaaagatgctggagatatttgataatctcatttaaactggtgctttatgtacatgagatgtactaaaataagtaatatagagtttttcttgctaggtaaatccagtaagccaataattttaaagattctttatctgcatcactgctgttttttactataattaaatgaacctcatggaaaggttgaggtatatacctttgtgattttctaatgagttttccatggtgctacaaataatccagactaccaggcctggtagatattaaagctgggtactaagaaatgtcatttgcatcctctcagttactcctgaatattctgatttcatacatacccagggagcatgctgttttgtcaatcaatataaaatatttatgaggtctcccccacccccaggaggttttatgattgctcttctctttataataagagaaacaaattcttgttgtgaatcttaacatgctttttagctgtggctatgatggattttattttttcctaggtcaagctgtgtaaaagtcatttatgttatttaaatgatgcactgtactgctgtttacatggacgttttgtgcgggtgctttgaagtgccttgcatcagggattaggagcaattaaattattttttcacgggaccgtgtaaagcatgtaactaggtattgctttggtatataactgttgtagctttacaagagattgttttatttgaatggggaaaataccgtttaaattatgacagacatccactagagatgggtttgaggattttccaagcgtgtaataatgatgtttttcctaacatgacagatgagtagtaaatgttgatatatcctgtacatgacagtgtgagactttttcattaaataatattgaaagattttaaaattcaaaaaaaaaaaaacaaaaaagtcaaaaggtatccacatgatacttacactcaaaaaaggtggcaaaggaagtaagcagaccacaagatgtctttaaggaaatgactaagaaaccagaaagtagagatcaggaacatttagtgatttttggccatcccctgaccttcctaaacatcataacgtcactgcatgctgggggactgacctgcaaagggagcttgtcaactttgatgatctagagaacacctcattggggctctcctggaaccagcccatgcagaaatgattcagccatttctgagaatgtgtcccctgcagcaaaccagctgtgttgcatccaaaa

SEQ ID NO: 8297 - DNA, 1111 bp, Homo sapiens
gaaatgtatttgagttttgaagttccacctagttcctggaccagcccctcatgtttcacatggcgattctgttgtcctttgtttcagctagaaaataaactttgttcagtcttgccccaaatgagaagttctaggcagccaggtatttggcaagagtataagagtcccaccaaggtttaaagtataaagttgaatttctaagcaagcctaaagagtatgtgcaatacacatcttctgattttatgttgttacatgtcgtgaggggtttggtatcttcaagtaaaggttttaaaggaacctgaactagactcaaacttgaccctctgatgctaatcgaaaatacacaatcatcaaatggcattcttactccattttttaactattacatatcccattttgacaagttattcttaccttttttacataggtcgaactggaaggtacacccttatagagaaatggagagatactgaaagacacttagcacctcatgaaaatcctatcatatccttaaacaaatgggggcagtatgctagtgatgtgcagctcattctacgacgaactgggccgtctctcagtgagcgacccacttcagacagtgtggctcgaattcctgaaagaactttatacaggcagagtctgccccccttagctaaactgaggcctcagattgacaaatcaatcaaaaggagggaaccgaaaaggaaatcactgacatttacaggaggtgccaaaggattaatggacatttttggaaaaggtaaagaaactgagtttaagcaaaaggtgctgaataactgcaaaacaacagcagatgagttgaagaagctaatccgtctgcagacagagaagcttcaatccattgagaaacagctggaatctaatgaaatagaaataagattttgggagcaaaagtataattccaaccttgaagaggaaattgtccgtctagagcaaaagatcaaaagaaacgatgtagaaattgaggaggaagaattctgggaaaatgaattacagattgaacaggaaaatgaaaaacagctgaaggatcaacttcaagaaataagacagaaaataacagaatgtgaaaacaaattaaaggactatttgg

SEQ ID NO: 8298 - DNA, 1372 bp, Homo sapiens
caacagtgttgatatttttgtccagcagctataatgcaaagccttcgtttttatttgtagcattttgagagctttaggaaagtattatatagtgtgtatacataaataagccgtgacttaagtaagagtgaagagaaatttgtgactggcttagtttaatttatttcatgtaatcaatgtgtgaatgttgatgttttaatatttttattgacttatcctgtgactgacttacgttacatattgtgtgattatgaccgtgtgcatgttgccagactccatccatgcattgctgatttacactacacaagtgtcctagggtgctccaccatcgaagctaactccacaggaagccacttgcatttgttttgtgaaactgtcctagccattgcttaattaggtgaaataattcagggttttttaaatctggaatttagtcgttcctttacaatatttccaaatatacgtgtggccacagagcataacagatatttttcataagctaaattgtatgtataaaacatttgcagtgtttcagacactgttgaacaaaaatgtaattggtaagtatgtatccaaacaggcatggggtttcctgatacattatgtgttttgtttctgccctgtcttatcatttacactcatggatcttcagaattaatctaacatggaagttatagatacctgaaagctgggttggtctacttcaggaacattgctttaagtgatgtattttaaaataacccgcttcatatgtatgatctgttggtgtacacaccatgggtaaggtattgcttgcacataatttgctctgcatattatggaccattgtggtttcttccagtcacttagatggaaaggaggttaaacctaggtactttttagcaaggatataaagtcaaattcagcatatgtttttatttttaggcttgacttttacaagacattaatctccatttgtacatatgttattttatttgtaaaaccaaatatgactcaacacctttttgatgagtagtgacttaactaagatttacaagtaatatttagacagattcagtcagacaccacttagccatttttacattccctctggttagatttggtacagtataattaagactttaatctgaaatttaaagtagttttaattctgaagaagttacatcctctgtattatttacatgcaacaaaataaaagtggattaatatagtaatgccatggtaacaatagagctatgtcttatgcatgaaggcaactttggatgttttaacacatttgactgactttggtttagtgaatgctgacaatgctgctctacttaggtttcctatgaaatttttaagaatggctatgagactgtatagaagcttc

SEQ ID NO: 8299 - DNA, 1947 bp, Homo sapiens
accttgcttgtttgttataccttcatatgttcagtttttcctaacatatgtttgtgatgttgtagctaccttgtagatagtgactgcatctttgtttttgcttgccttttagcaagaaaacaaaggcttgagagagatccttcaaataactcgagaatcatttttgaacctaaggaaagatgatgcgtcggaaagtacttctttgtcagcattagtgaccaacagtgatttgagtctgaggaagagctgaagagtttctgagtctgtgagcttcttacatggctccaaatggtcaaataagtgaatgaatgaatggacagaaaattcaatcctttatttttttctctgtaaatatgtacagtgcacgggctatgagatagcaacaaaaaatgcatagttaatggtcatagactttattccaaaacataattggaaaatagaaactgagccattgccaaatggtaaagaaatgaaaagttttcacagtgactactgaatataccaagagcttttggcagtactgctggctttctgggtgattaattaggtaaacttgaatattcccagtaaatgtttgagaatgcataaaattataccaatttaaaaatataaatttttgccactgttttgtgaacggaggatttgtacgctaaatttcatccttatttggcgtcaaagttgatgcaaagtttatgtaccatgagacttctagtgattgcctactttcacatttatttaaatttttgtgaaagaaaatacagttttaaaggctataggaatgtgttatatgtaccttaaacagataatttaattttagcaatttatcataactgatacttagctaacaattgtccataacttgtttaagtgtaagaaataccatttcaggaatgaaaaagaaggaatactactttctaagaaagaagatcttataatagacatatttagtaggttaaactactcctttgaaagaataagttttggttcaaagtcaataatgaagacgagatttgtttttctcttctctggctgatttttaaggatattatgtagttcatttagttaacagaattgaaatgtttgatatggcaagataggtatggtaatttcaaagtgaattgggaattcctctggctcatagaacccttttttttttcctttaagtattcttgagatacaaaaaaaaaaagtaaatacaatttcaaaaaaaaagttccggatctgtttttaagctccatctggtcctcataacctgcaagatttttcttaaaacctttcagctgaaagtgggggtaaaggtggagtaatctgtggatttgtttctgttgtcttttaaaatgtcaaatatataatatgtaatttttttaaaaaccaccagatacagaaatgtgctttaacatcagttgaaacctaaattttcttatgttgtggtgattgtattaaaaagggataaaagaagagtgtcaaacatggttaaatatattgtactcatttatgttgaatacgtattaaaattaagacaaatggaaaattatactttgagtatataatttgttaaatattactttatatggtaattttatgtataatttcatatattggtaaaattcaaaactacacttgagaatttttttatcttaagtttggggtgaatggggtggatgagactgattgaatagaaaagggctaatggcccaaacattatatagatttctttttttcagtcagaggccttatttgatattttataaataaatgacagtttttatttttaaactttttattgtttttgggaaagtattccttaatttaatgacacattcattcagatacttcttatccctgctaataaaggaaatctatttcaagctacaccattgagattaagtctgaggcagttcattgaggcagctctactataaaagcttacttgataaataattattt

SEQ ID NO: 8300 - DNA, 1023 bp, Homo sapiens
cctagctaccacattcctccattgagagagaggctctatggccgattaacccagattaaagggctcttccagaaggagcagccagctggagagagaacgcctttgcttctgtagatgcccaggggcttggtcagtgtgcctcagctttggagttcatgcctggagtggttcaacagtctctggtgcaagtctaataagagatcaggcatatatatctgttctttgcataatattatggtgcccttattgatatatggtaagggtgtactaggggattaggatgattgtaagagaatgagaaagatgaccaaaaggttggtggtagggaggctttttcttatttccaaatacttgagaaattaccttttggtttacaaatctatgatcaacttattccattaaatagatacattaaaaaaattaaaaactgattcttctgcagagcactggtgtttctttttataaccccttgaaacaagtctctcacctgagcctgtctaaactttcggagggagtttattattgagtctttatctgtgacagtatttggagatttagggatttgatacttaggcctttgaattttagaatacaaaaagagaagcaagccagacatggtggctcacacctgtaatcccaatactgggaagccaaggtgggagtatcgcttgagcccaggagtttgagaccgacatgggcaacatgacaagaccccatctctacaaaaaaattaaaaaattagccaggcatggtggcacatgcctactcccagctcccaaggagactgagatgggaggatccctggagccctgaagattgaggctacagtgagccttgattgtgtcactgcactccagcttgggtgacagagaccctgtctcgagaaattaaaaaaaaaaaaaacttattttcttactaaaagcagtctgattacttagttgcatgcccttcttagtatcatacattatccaaaagttaccctttgtttttttttcagtattttttaaaatttttaagttgtga

SEQ ID NO: 8301 - DNA, 1203 bp, Homo sapiens
aaaaaaaaaaaaaaaaaaagaactactactacataacaaaacctcatgtaatattttcttgtttcagagactgttagacaaaaataagtgggtactgtctgcgagatgttaacagactgtctgcgttagtctgtggctaacattggacacatcctctgtgttaggcattgggctgtacactgaggaaagagcagtgcacaagagaaatacagttcccatccttgtttatagtctagcagaggtgaaaaaacttttttcatggtcgtaactagcatttatacattgtttatatcgcattttccttaaactattaaaaaaaacctttggaagcattttgtgtgagagcttgtttacattagcacatacaaaccatgtaagatggccttttgaccatattaaatgggttggtgtatattttaagcaagaattataatttatgaatataccatttaatattacacgtaggtgggattatcacagaatagcttaaaaaaatcccctaaacactaatcatgtgttatttttggcttcaggtggttaccctaacagctaatgataagacaagtgtttccttctcctccctcccgggacaaggtgtcatatacaatgtcattgtttgggacccgtttctaaatacatctgctgcctacattcctgctcacacatacgcttgcagctttgaggcaggagagggtagttgtgcttccctaggtgagtatgtggctttaaacttttacaaattctcctttggccttgcagataatgcttttgtctagttctcattcattcaacacataccttttgagcccctacgttattccactctctgttctaggcactgggacatagcagtaaacaaaacagcaaaaatacttgttctggagcttatattatagtgagggagatgagacagacaagataaatttataaaatatgtaatacgtgagaaaatggtgagtgctaagaagataaataaagtaggaaagggagataacacatgccagtaagaggaaaatttgagatagatagcatggccagggcagtccttgatgcaccacgcacgtacctgggtgtggcatgtaccaggcagagggagcagccaggatgagggcctgcacctgggagcctgtctgagggtgtgaagaactgcagtgatgacaggggttgcaggagaacgaggagggcaaaggaagtagaggtgag

SEQ ID NO: 8302 - DNA, 2182 bp, Homo sapiens
ataaaaggtttgaagggttgactcaacgtggctctatccccacctacatgaaagctgggaagttatgaatgaagataacattcacccataaccaagagaactcaggtagctgcatcaccaggcttgcttggcgtagataacaatacactgaaatactcctgaagatggtggtgcttattgactacaagaggaaattctacaggattaggatttctaagactactataggaattggttggcagtgccagctggctcttttttttaatattttattatttttgttaactttattatatgaaggtactggaataaaaggaacagacatccctttctaactgcactgcctacatgcgtattaaggtccattctgcctgtgtgtgctgtggctttgaactgtaacacctctaatcaattcaggagaaacacatatcatttaaagcaacataggctaacctgtaggtaacactgcagtattgatgttttactgcaaatcttatgggtctagataatcagtaaaagccatcttccatagttggtgttagaacattgccctattggtttggacatctgtagaatatatatgaagacaatttctgtaatggttttaagagatttaaaaagaaattcactggttctttacaaaatagaatttatcatcaagttattacacaaacttcacagtaaggagtgacaagtttataataaggaagacaaagtttaacaccttcactcaagcactccactaatatatttacgttgcattcagaaatactgatgaccttcatatacgtagtctgtatactcatagggagatgtactgtattatataacatgtaaagttgattttcttgtgacaagagaacttctttttttaacaagaggacatggcattattttaatttgattatggtgagttgaatttaagacatgaccatgaaggctgcttgtagaattagtgtatttttattaaactatttttttaaatgtcaaacttctatcatgtaaatggacttatagagaacaaaaagctatttactttggttttctagaaagttgttacatatcatggctggttaacttttatttcttttgatgaaaatttttcctttgatagtacttgtattattgtgccattattttcttatgctccaaatgtaccaaagatcttgaacagagtggatgttcacaactgagtagaattttcctttcctgtgggcatgctgtattcagacctgacagatctttgatagaggtcagcttattaaagggcaatattgttcttgtttagctacatcactgtggtgaatatagatggaattaaggaagtaaatgcaggccagggggttgtgatgagaggataggggagataatatcagcatcaaattctttgggtatctctctaagaattaaataatcttttctagcttaatattttaattctaattcaaacaactctgaggttttggtttcattagtaatagttgaggaataatatactagcaaagaatggcctaatgtttgtcataactgttaatggatgaaattttttaaagatacaaccatgataaccattataaatgatctatgatcaaaatctaaagtgatgaattatttgtaggaatgtcttcctaatggggaagaattgcataggagcattatgcaaatctacacaagcttttataaatgttgctgctgggtagctccacagtgtttcataaggccatcctgtttcccccaactcccccatttttggtttgtttctttttaaatatttgttgagtacttacgtgtttatctaacagttcacttccatttttctagtctggattttttgagtatttaggaaagagagctattaaaaactggggatttctcaatgtgactaactctaatttttctaattataactgcctttaattaacataatattaacttttgctgaggtttatgagattttctcaccccacatcgctcccctttttttaaaaaggactgttttgctagtgtgataatgaataggtaagatatgagataattgcaacattgtctagttctagtatggtaactattcttgaaatggtattgaaaaataccgttaattcaaattgacagagattgataaaaagaaactgatttacctaagtttactttttaattgcataatagagcattttttgttttg

SEQ ID NO: 8303 - DNA, 1159 bp, Homo sapiens
ttaatgcattgagctcattatctttcctcagaatttactctgatagtcttcatctgggttcatttcataacccttcatccacagtttttctaagccagaaatcatttggtccaatattggtccggaatggaccaggtctaatatttgtattttctgatctgccactttcttatccatcatcttcatgaggccagcacacctcacaccaaagcccaccaggctctttttctttctataccccatgattggcctcctagttacgaactggaccatggatatttaccactaactacatggttttaatttttgcaccatgtaactctgacttggagagatttatgtgattgaattctcttttttctgtttcttttgattgttccttactgtgactagactggtttaccgccttcggctttggtatttttatctaacataaatcccattgctctctctgtgattttgtttaacttaggttctaaggctctggaatattccaatgggatttttgattgccaatctcccacctctccattcatgggaagtttgcgagctctgcaccttgtggaagacctgcgtggattgttagagatgatggaaacagatgagaaagaaggcttgagatgccagatcccagattcaacagcagaaacgcttgttgaatggcttcagagtcaaatggtagggtctgcctgttccaaattctgttataaatcctttgttgcttattccaaaatttagaacatagaatagctgattagaacaagaaaagtttagggcaacacatgtgctccgattttattacttaagatatcttaattttcttttgactctaaggataactttttaaaaagtgctattagtgtacattttgtaaataccaacaacaggtcacctgattctgcccataaaaacagactggcttttagattgtgcctgaatgacctactgtggcttaaatcaaatagtcctgtaagggaaagaatcttgcacatgatagatgatttctcagtcatattgggttattcaccataaaggatccaatagcaattctaaatggaaagcatgatgaaagactttcaaaaagcaacaggatttacagcagtatttgaccggaagtgccatctagtggtttatggcaatcatttcagttccagttccc

SEQ ID NO: 8304 - DNA, 1207 bp, Homo sapiens
ttgtagaaacagggtctcaccatgttgtccagcctggtctcaaactcctgtcctcaagtgatcctcccacctcagcctttcaaagtgctggaattacaggtgtgagccactctgcctggcctaccactaacttgaatacattcagaatcacctcctctccccaaaatttgtagaaatagtttttgaggaagccaaaagcaaagcagaaacctttacagtattgtttcttttctctttgttaactgtgtcattacagcaaaatactagcagtctgcctaaacatgttcattgtacatttctcaggctatcaatgaatggaggtttttaaaaagttgaatatttgtctgaacattttatttcaaagttcaaaaaaacagaggctgcaaaattcattttataatggctattttgtgacgataagatgtagttcatgtttttctgtagcactgggcccaaatattctttgtaaagaaaatcgctgcagcaaaaactgttactgtgtttattatatttgtagaagtattagaaaaatattctattttttattcagtgctgcgtaattacccatggtagccaaccctacaaaagacaggttttcacaaattgaggtggaggtgggcggttcagtatctgccactggacttgattataaactgtatttgaatatcagtggtattatcttttaagttgtcagcaagttaccaaggtattcattaaagaacttgtaatatcaaattactatttattcataacaattgatttgatgctaataataattttctttaaactctaccattcattatgtggtaactgtattgaacttactttatttggattttattttaatgtgactagatgtcaccacttcaaaaaatcaatttgttcttagaacctggttgaaaataccaggaaactgttacagacgccattttttttttttttgagacggagtcttgctctgttgcccaggctggagtgcagtggcacaatctcagctcactgcaagctccgcctcctgggttcacgccattctcccacctcagcttcccaagcagctgggactacaggtacctgccaccacgcctggctaattttgtttttgtatttttagtagagacggggtttcaccgtgttagccaggaaggtctcaatctcctgacctcgtgaatcgcccccctcggtctcccaaagtgctgggattacaggc

SEQ ID NO: 8305 - DNA, 1299 bp, Homo sapiens
tcttgttggtgccagtattacattgaagactacctatgatagaggcaatgttgctttgaaaatctcccttcaggcggaggttgcagtgagccgagattgtgccattgcactccagcctgggcgacagtgcaagactctgtctccaaaaaaaaaaaaagaaaaaagaaaatcccccttcatcccccaggactgtcctttactctttgatagtatccctctattttcttcccaattctctaaatgctttatcattttttcctgagatgcttctgagggatgctgacctcccactatggggaaaagggttgcttggaggacctggggtggcagccccccgaccagaagcaccctattttatagatagcagtctgaatggtagagagtcctgtgtgtgggttgttagaaggttggttcttcctgttattctctctggctttcctttcaacccacttattttcagaggcctctccccttagcatcctttaaaaggttttctgatgaatgtgtgaaagagttgattatttcaacagtattggttaagtcacaacgacgaagtgctgagaaggttatgggtaccaggaagaaacaaacagaagtcttaagattagaatgagaaccaaagagaatttaaccctgccatttttttttttttaacaccaagatcctaagtaattccaaatgccttagatatcaatgaaagctacacaccattgagatgggcaaaattctttctctacaaagggagtaatcaagtaaatacctgttctctttcaatggactgttgcctattgagcattgtggatgatgtgttttcagatttccaggtgaagttctgaccctacctgtttggccaaagacgtaaattgagaggaaaggccttggtcttcctgatcaaccagcatttaacgaacagtggcttaatgcagatcactcaagaggcagcatagcaatgtaaaaggaatataagtaggtgttggatgcctttttcctagaccaggaatggggaatatataacacctgtgccaccgctcttttaaggaggcattatgaatgagtgcagcattcctgtcctctgtgccaggatttggtcttagaatccatgtcagattggtgcttccagacatctattcccagtccatcagagtgaaatgaaggctatttgccatccctgccttagacagaggagtgaaagaattaagtgggtagacaccaaccaaaatgactttgaaagcagtgagctgattgagctccagttctgtggttaccagaaatactgagtgtctgtcatgtgcaagacaa

SEQ ID NO: 8306 - DNA, 1399 bp, Homo sapiens
gtaccactgcactccagcctgggtgacagagcagaccctgcctcaaaaaagatagagatagagagatagagaaatagggggagagagagagagaaatagtagcttttggttactagaaaggattgcccaaaataaaaccttgtgtttagaggaaagagtataaggaataaaactaattctttggtctttttttccctccttttctccttaggttccttttgaggatggccacacagacaaccacttacctcttttagaaaataatacacattaacacctcccgattgaaggagaaaaactttttgcctgagacataaaacctttttttaataataaaatattgtgcaatatattcaaagaaaagaaaacacaaataagcagaaaacatacttattttaaaaaagaaaaaaaaggataaaaaaacccaaactgaaattctatatacgttgtgtctgttacaaatgtcgtagaagaaatcatgcagctaaacgatgaagaagcccaactggagtgttgctttgaagatgacgccttcttatattttcatagcaaatgggtggtatcaaaatcagacattgcttcttgctgataaaaagcctgaaggaaataagtgaaactacatctatgggaaaaaaaaaaacattgagaagtgcaaatgttcgcatccttttgtttttaaaagatatgatgtcagaataaaatgtggaaaacatacggaaaactagtctagactttaaagaattgtgatcaggtcacattgttaataaaaaaaaaaaacgggctagtccctatgttatagccatattaatgttaagccatattgacaagaccagttatccaataatttggtcttaaaaagtaactacttttctttgaactctggttattgacttatctaactgttgaagatagagtcttagaagactaaggtaaattctcacaggggcagatatgtaggtgttatgtaactagggtgtcattcacaaatggtatagtagaatcttatacacggaaaagaaagcacatttttttaaaaaagatgccaagttttttaatctaatcattatattattggtgtattttgggcaacatagggtgagttataaaaagatccgctactgatagtgaaaattaccggtttgtaaaacattaagagaaaaaataggatattttatacatgtggtgagtggagaacagggtaactttaaatgaaagtgtaaggcaaattgtaagcaccacaagatatatcagatttgagaggtgccatgttaaacattgtccattaaactataaaactgtattatgaagtatttgcattcagggtgtcctgaatatgattgattctgtattagattgtgttctaactttcttactatttaaggattggttctaaatcttc

SEQ ID NO: 8307 - DNA, 1112 bp, Homo sapiens
gctattagacctcttagccaccctgcctcatttgctttcaaggaaatgaccaaagaaaacttggtatgttattttagaatatgaaatcctgtaataataaatgtatgatttaactaagtcagctaaacattgtcatttttgaataagtgtcagctctctttgtgtacctttctgtagttctaaattattgcttcttatttaggatgctgcagctgattcagagtaggctacaagaagagcattcacttcaagatgtgatatttaaaagtgcttttaaaagtacatcaacagctcttccaccaaggtgagatctgtattttaaatgtgcaactgtttattatgaatttactttgacatagttaaaactaaagtgttggtttagttttctgaatcttatttttcttaggaagggaaaatagaatcattctgtactataaagacgccttttgctcttaaatttatagcctgtgattttgatcagaattatcacaaatatttatttgcatttaattttcttttttatgcgtggtatacccccacataaaattatattgagttttaagaaaaattagtttcatttactattttgaggatatataagctttggttagaaattttgttttatttcccgtttttgtattttaattaaagattagaggctgggcgcagtggctcacgtctgtaatcccagcacttttggaggccaaggtgggcggatcatttgaggtcaggagttcgagaccagcctgaccaacatggtgaaactccgtccctacgaaaaatacaaaaaaattagctgggtgtggtgggtgcatgtatgcagtcccagctacttgggaggctgaggcaggagaatagcttgaacccaggaggcggggttacagtgagccaagattgcaccactacactccagcctgggtagcagagcaagactgtgtctcaaaagaaaaaaaaaaaagattcgtggatatttggaaatgctataatcataaacataataaaaatatacaagattttacatttgcttaggaagaaaatgtcactgtctctttgaatttaggtggcatgcctttcctttacctcaatcatgtttctgccctccctccctctcc

SEQ ID NO: 8308 - DNA, 1111 bp, Homo sapiens
ttgttgttgttttcagcaccaatgcaatacttcatttttttccaaatgaagtcttatgtattacatagttcgccacataagcatggtgaggatatgcagaagtttgtctacttggcctactcctggttcctatctcctgagcctaaactcctgggttatttggaacacagtttgaactctagatgactttaagacttcatgaaggtctaaaaatctgtaattcctattttaaatcagatgaaaattattacacagaaaaaagttatcatagaaagcacaggactgaatttgatcatagccagtctattattcgcaatgcttcattctggtattcgaaaattgctttgatctaatcatttgaaaatgaaaggccatgaaaaattttaagcatcaggtgatttacttttggtagtttggttgcatttatcctgagttacatagacctagtttccagtatgccactttaatggtgatgtgatcttaagccaggtatttacactaccgtgaacaccagtggtttacttgaaaatctgtgaagccatccatttatagctccatgatatagaataaaggagataatatttgtagaacatctagcatcatgcttaatatatggtgtttgataaacagagaagaaagacaattcctaattcttgattttgagagttttacattcttaaaagaacattctatcaaaagtttatgtaaatagagattaagaggttaagactttttctgagttgcttagagttattgattatagagttgccattattaaaggatactgtgttcaaaaacctgtgaagtcagaaaggcttttggaataagggcaaaatagaacttgtaatttaaagagcctttgttttggccatgagaaatgcaattcaagttctaatcgacataatttattctgcttgaaatccaagtttttaataggtcagttgatttatatttctcatgttttgctaattaattggtaggtactaatgtttaatattttgtctttcagcaaattaagaattaatatagatattactgttgccatgaagtgtcaatgtaagtacaccttcaacttgctgaatccacatgtaggttatggttcaaacaattg

SEQ ID NO: 8309 - DNA, 1340 bp, Homo sapiens
gttgtattataaaatatgcactggctgtggtttttcataagatgttttgtggctttttaaagaagtgtcttactccctcttctctcatttttttctgccttgaaaaggggtggtatttcttttggggtcaacaaatacacatatcagtttcactcctaaccttgtaagttcaggactcattttcttggcagcaagtggcaggggctctttagtcactggagttaacagtaagtctgagtatattctgaataatgtaattatgcaattaattgataatcatacctaaagcacattgaacttctaagagacaggtgctacgtaagcacactgtctttctggatggggacttgtattttaaataacttatcattccagctatgttggactagggtccaaagcattttataatatttttttttaatctaggaaaaagacccaaacaaatctaacttcttgctttctcacctatttgaattttctcctacctaatttgtttgtgtctttattatagctcagtttgacttctcaaacttttcaagggttggggcagctgcacttttaggttgcctataggaaatattgcatatggagattacagtgtttttctgacctagttcaagaccagaacatgggtcatagggtttttattcagcaaaatgaaaacgtatcttcagaacttaacatattactggatgtgatacagattttgctttctgtggaattgaaaattcacaaaaattcacagcttaaatttcccatcagtgactggaggaatttttttcaggtgcttcctatattaccatccctcatgcatattaactctttagaattttaggttaagtgatgtctatagaagtagcctggaaaaccatgagttttggagttcagtgaccccctgctttcctctgctcctcccttcccaaggcattgaagctgaatgtgccaactggcagttagaagcgaaagatggcattgggagaaattttagagagctttcaaactctttattctcatgttccacatggtctaattttaacataaataatatgccttcacactggattgtaaaaggcatgtgatttttgagattttattttgtgatgtattgtcttctgcagtattaaagggaaagagatattaatgtgcattaccctatcttgtttttgaagccagggtagttgtatgattttgttaccagcagtgctaacctgaatgtgacctggttaccttggaaatgcaggaacttatatgaatgtactataaaataaaatgcggactgattcccaggattctgaacttttgtgtgtgaaatgttttctgaaatgtggaggtgctttaag

SEQ ID NO: 8310 - DNA, 1113 bp, Homo sapiens
gaattctaagctttttgaagaggttgctgatgtagtgtgatcaaaagaatctaaggagaacctcctctccaaaatctgattggagctgttcaccctctcaaggacaagataaagattgacttcagagatatatcacatcaagctagaggaaaaaaaaaaaacctcaaataaaatttttcctcattcgaagggatccagggtatccttgggttatgtaggagggaatcatatttgttctaatttacctgaatgtacttgtgtgtgaatccaatcttgattctaaacaccaaatcttgtcaacagtagagaagtatagtaaggagttcctgttgtcaatcaaatgagggtgtgaaacatttagaatgctctgtgttacacttgaaccatgtataaatgtaacctgtgtatcttttttttaattagcttttctgaatttaaattatattgtttttctttgtattgttagcaaaatgcatcagaactggattttttttctcatctgaacataatataaaatttgaaagagtattgtgatattaagcactttaacatacatatcagacaaactgacgtgggtttttcaggtttgggagtacatttaaatatgacttttcatgctttgttctttacaaataaaactgtgggattgatactttgttttgcttcattgttgtagaatcttgatagtgtttcataggataagagacttcagaaagcagagagatcaaaccaaaaccattatgtagaaaaaaagagccttctgagtaaggggtgaaaatttgaaccctacctcacaccatacagaaaaatcaattcttggtggcttagcaacctaaatgtgaaagatgaaacataatttttaggagaaaatacaaaatgtacttattaacttgggaaagggaagttttcttaagacatttaaattataaaggataagtgataaatttgactatgttcacaggtgttttgctataaaaaaattgactatataaaaattaagaatttctggtcatcaaaatatatcattaaaaaggagaaggcctgtaatcccagcattttgggaggccaaggcgagtgcatcacttgaggtcaggagttcaagaccagcctggc

SEQ ID NO: 8311 - DNA, 1234 bp, Homo sapiens
taaaaactgggagcaggccaggtacggtggctaacgcctgtaatcctgacactttgggagtctgaggcgggtggttcatctgaggtcagtcgggagttcaagaccagactggccaacatggtgaaaccccgtctctactaaaaaaaaaaaatagacaaaaattagcgggggggtggtggcagggcctgtaattccagctactcaggaggctgaagcaggagaatcgtttaaacacaggaggtggaggttgcagtgagccgagattgtgccactgcactccaacctgggtgacaagagcgagactccgtctcaaaaaaaaaaaaagaaaaaaactgcagccaaagttggatttgcggcctatgaataaaaccattactttaaaaagtaatacccccaaaaaagttacacctgaagtttcatcttcatgcctttgtgtaatattactataatggtgaaatgatgatttaaaaaaaacacatcagaactgacacatcctcttggatgatgggtccttcagtcaccttgtgagcccatgtacttattccgttgatacagcctgtgctataaacatgtggggccctccttgtgtgagctgcttgaatggccagtacccccattcttttgaatattcccaatggcagtcaatcttggcctttaagaataaatttaaatatttggaaatagtccttaggatccaagtttgatcaatgaaaaggatgcttaagctgagtttggggtcacataagaagtgcagttataaagaaataagacatgttgggcatggcagtacacacctgtagtcccagctgcttgggaagccaaggcaggaggatcacttcaacccaggagtttgagtccagcctgggtaacatagggaaaccccatctcaaaaaaacaaaacaaaggacttagtttttatgtggctcataagtgtctctaagttataccaaaagtttgagcacaacagtagtagcagaatgcttagaataaatgcttgacttttaagctgacttttggaaggaccatacccacatagaggcatcttttctgctgtggtaattttttaaattaatacattgctttaggattacatctcaaagtaaataaaaaaatcaatatttaatttgtttttttcctgcaaataaattaaatgctgggaccataatgattatttttgcatagtaatagctggtgaagaagttgttttaaaattaaattgccaaaagtattacct

SEQ ID NO: 8312 - DNA, 1148 bp, Homo sapiens
ggtaggtagcataagggaacattccactaacaggctcgtaggtagatagcataagggaacatttcactaacaggctcgtaggtgggtagcataagggaacatttgaggagtgatgttgggacttctcaaccttgcttctcatatttgggggcttgctagcattttgtgacaggcgccatgctagttatttactcctataacttaccagttttcccagtgaggcgtgtatttttcctattttcagttgaggaaactgaaagctcagaggaagttagacactaggctagggttatagattgcagatggtaatgctgggatttgaatctagggatcgcttggattattttccattttgccaggatgcttcccacttggccaaacaggccagaggcaagttctatggagcccctggcaaagccagcctgctctgatgacgtatttcctgcctaggtggacacagttgatgtcccatagtactttggtttatttctctcccatgagaatgcagccactgtttattattttacagaacccaatgctgggcagatacaagaaggaattggagaagctgtgaacaatattgtgaaacattttcataaacctgaaaaagaggtatttatgggctataaaacttagtatagtgggacttttaaagatgcttttatatgtgatacacgaggcaatatggggtgcttgaattttcatttgtaagctttctggtagctgtaaaaacatgcttcatatagctaccttcagcacttgcttctctagtgttttttttagacatagatgcaggagatttttctttggcactgtgtgttatgccccacagagaggaagcctcaccgtgttgctgtgtggagaaaatggcctggttgcagcccttgagcaagttttccaccatgggttcaaatctgcccgcatctttcacaagaatgtcttcatctgggacttcataggtaaataaagtagatgtgtattacattaaggtcactgaagcctttcttaggaactcaaagacccaggaatctgagtgaataagggttagtgataaggatatatatattttttttctttttttttttttgagacggaatcttactctgttgcccaagctggagtgcagtggtgcggtcttggctcactgt

SEQ ID NO: 8313 - DNA, 1126 bp, Homo sapiens
gcaccaggaagcctgagaatgaatcctgagggctctagcccaggctttgtcccaggctttctggtgtgtgccctcctggtaacagtgaaattgaagctacttactcatagtggttgtttctctggtcttgagtgactgtgtccacagttcatttttttccggtaggaataactccttttctacatccacactccatagagtctctccttttcagatatcctgggatgaaagaatttggctttttttttttttttttttttgacatctgttttcactcttaggcttttaaacaatagttattgctcttatccctctcagattctaataactgagagtgatggggctatattgaatctctgtatgcactgagaactgagctatgaagaggatcttattaaactgctggtctgactttatggattgacactgttcctttcttttattgtgaaaaaaaaaaaaaaccctgaaagtcttgggaaccccctaaagtcttttgggaatcctcaaaaagcatgggaagttaagtatttagctacataaatgttgtaagatcatatcttatgtatagaagtaataagaccatttggaattactggactaattgaatagttaaggtttctattcgggacaataaaatgtattttgaaagtgctgctaactattgatgctgacagtgtttcactcctatgagtgacccaaacatattataaatatgtggtaaagggaatggagcctgtggggttgagcagaatgttgtactagctgtgcctggactgagtatagcagctttatgattatgagaaaacaaattctttatttttttttctgttccaaagattcatcctatggggtggccataaagtctagaattagatactaatattttgtcattcattataacatatcaataaaccatttgttaaaagatttgcctggtttccagacttggtggccaccttgaataattcttgctgtcttctgggaaggatgatgaaatttattcctgctgccttaaaaatatgtatcccttcttcacccatcatgactgtccccagtgagtgtcctttactattcttgggagtgactcctgtctaacttttcatactggcgagaagaaaagaggcct

SEQ ID NO: 8314 - DNA, 1277 bp, Homo sapiens
tattgaatactcagctttcatcagaaaatgttaccaaagttgagcaaaattcaccagcagtttgtgaaacaatttctgttcccaagtccatgtccactgaggaatataaatcaaaaattcaaaatgaaaatatgctacttctcgctttgctttcacaggcacgtaagactcagaagacagtattaaaagatgctaatcaaactattcaggattctaaaccagacagttgtgaaatgaatccaaatacccaaatgactggtaaccaactgaatttgaagaacatggaaactccaagtacttctaatgtaagtggcagggttttggacaactccttttgcagtggacaagaatcctcaacaaaaggaatgcctgctaaaagtgacagtagctgttccatggaagtgctagcaacctgtctttccctgtggaaaaagcaaccttcagatactgcaaaagaaaaggagtgtgataaactcagaacaaacacaacagcagttggaatttcaaagcctgctaacatccacgttaagagtccttgttcagttgtgggaaattcaaattctcagaataaaataagtaatccctcacagcagacagctttgtcgatggtaatgcacaattatgagtcttcaggtataaatataacaaagggaacagaacttcagatagctgtagtgtcaccgttagttctgtcagaggtcaaaacattgtctgtcaaaggaataacacctgcagtgttacctgaaacagtgtatcccgttattaaagaaggcagtgtttgtagtttacaaaatcaattggcagaaaatgcaaaggcaactgctgctttgaaagttgatgttagtggaccagtagcaagtacagcaacatcaaccaagatttttccactaactcagaaggaaaagcagaatgagtcaactaatggtaattcagaagtcacacctaatgtcaatcaaggaaagcataacaaattagagtcagctatccattctcctatgaacgatcagcaaatctcacaggagtcaaggaatagtactgttgtgagtagtgatacattacagattgacaatatttgttctctggttgaaggtgatacctcttacaattcccaaatagcaaagatattcagctctcttcccttgaaaatggttgagccacagaaaccttctctacccaatcagcaagggattggcagcagagaaccagaaaaacaattagataataccactgaaaataaagactttggttttcaaaaagataaacctgtacagtgcaca

SEQ ID NO: 8315 - DNA, 1177 bp, Homo sapiens
ggagaatggcgtgaacccgggaggcggaatttgcagtgggccgagatcgcgccactgcactccagcctgggcgacagagtgagactccgtctcaaaaaaaaaaaaaaaataaataaataaaaaataaataaaaggaagtgacactggataattaagagacacaccattgcgcctttaacacatattcacacccagcactgtcacatccatcgtgccttgaggacaggcataaatttacggccttcctcctgcgctcccggcctgctcctagcctttgactagagcctgcgcagcatcccagtcccaggctagggcccaccggtgccgcgcagcctcctggaagctgtggggagtagcgttcctccgctccagaactacaactcccagcaggccttgctcctctccacctccctcgcagcgcatggcctgccgggagggggcaggtagccggcgggcccggtccaatgggtgccggcttccgaggagagggcggaggagaggaggaaggaggcgaactgtgggccccggccccattcattgccgtggccggcgggcactggggccccgtgttttcagagtcatggaggcgctaattcctgtcataaacaagctccaggacgtcttcaacacggtgggcgccgacatcatccagctgcctcaaatcgtcgtagtgggaacgcaggtgagagcagcaggcggcgttcgctcgggccagaccccggccgcaggcctggtcggtgctgcggcagtgcccactcccgcgccagcgcccactcccgcgccagcctttggggcctgtgggaggagggccttgctgggggccccagggctctccgggctctgccgcacccgccctcccggggcagcgttgcatcaaggcggagaatccggggcccggccaggggcggagccggcgcggcgggcctggctagcccggcgggtcccggggacaggagagggaaggatggggccggcgggcggaactggagtccgctgggaccgggcgcggcctcgtccgcgtgccgctgcctccaagggcacctgggggacgcgcggggcactcgggtctcgctgggctcggtgggctggctgttcccatcactgttggctttcgtgagacgggtgttttatttccctccttgccttgcccagggactgcggagttagttttggaatc

SEQ ID NO: 8316 - DNA, 9559 bp, Homo sapiens
aagactccatgaactgtgtccttttgagtttttatggaagcttcattggccattggtgatcagctcaatgtttggcctctctcctctcttctgaggctgttctggtgaccagctcccatcctgaagctatctagggacccccagccaccagtcatctcattagcatgcagagacactctaaacacccttaatgctcttggagagtccaaggattttaggagctgactgccaggaaatgaagacaaagaccaaatatatatttcacagtatcacatttgccaggacaaattatttgataggttttccccattgtaaaaatttgacttgtttagggctttagaatacacaattttacttttaaatccttcctttctaaccttttttaggttactgatgcatcacatcagagattgtttaccagagttgaaaacaagaataaatgttctagctgctcagtatcagtctcttctaaatagctacggtgaacccgtggatgataaaagtgctactttactccaacttattaccaaatttgccacagaatattgtaacactattgaaggaactgcaaaatatattgaaacttcggagctgtaagtaagaaatttttctgtagatttggttacctagattgctaggtcacttttccttttgtgaagatgacttcagctcagattatctgattaagatttattttctataaaacaaaaatataactttgtagagataataggatgatgtctggttgtgtgaaaatatgctttgtaaatgatataaagcaaagtaaaattgtcacatatttttaaatattttaatattttataagtatttacttatttttataagtatttaataagtattaaatattttaataagtatttaaaaataatttagcttttaaagtgtttgtttctttagtacacacagtataattgctcacaaaaattagaaaatgcagataagtaaaaataaaacataaaaacaaaattacatgttggtgtgcacctgtagtcccagctactcagaaggctgaggtaggagaattccttgagctcaggagttcaagtccagcctgggcaacatattgaaattccatccttttttttttttaattgaatccaaattttattaaggatttcaagttacatacttcagatttctagaatggaatggaataattttggaactggaaaaatggcataaacactgatatcccttgaaacttcaattttataaagaaaattcttctgcaaaccacatccccattatataacaagaccaggtattatcgacaccttcactttggcaataactatttcctaaaagaatgaaaaagattattttgctacctcagttcgttaaaaatgggattctggccaggcacagtggctcatgcctgtaatcccagcactttgggaggctgaggcgggtgaatcacctgacatcagttcaagaccagcctggctaacatggtgaaaccccatctctactaaaaatacaaaaactagccgggcgtggtggtgggcagctgtaatcccagctacttgggaggctgaggcaggagaattgcttgaacccgtgaggcggaggttgtggtgagccgagatggtgccactgcactccagcctgggcaacagagcaagactctgtctcaaaaaaaaaaaaaaaaaaaaacagggattctatctttaaagttcagaaaaagctgcatttagatgaactacggctaccaaaacaaacaaaaaaacagagtgtctaatcaaagcaaaggaaatgattttgaaaatagaacaaagctattataattggttaaggatttccagtagtaagttaaaatctcaggagaggaatggatagcattacaaacaatgtgttcacattccaagacctgaacactaacttctcaaaaaggaagttttcatcacctctaaaaatgaattcaatgtaattttgttaagagcaggaaatctagaccttcctctaatgacaatccaatagtccaccctcgccatcgtcaaaagaaagttgcctcaaaattaacagtaattagcctgaggtattgtaaatgtggcactacagtctgaaatttaatggcatcttttgtcaaaaatagtcttatctctactttaatctcatgactacaatactatgtgctatccctgtagtatttactactatgcagtcatacagaaaaaaattgttggaccttgtgaaatagtgcatccatctacttctataaaaataggagccacattggccaggcgcagtggctcacgcctgtaatcccagcactttgggaggctgaggcaggcagattacgaggtcgagagatcaagaccatcctggccaatatggtgaaaccccatctctactaaaaatacaaaaattagctgggcgtggtggcacgtgcctgtaatcccagctacttaggaggctgaggcaggagaatcgcttgaacccaggtggtggaggttgcagtgagctgagatcgcaccactgcactccagcctgggcaacagagagagactctatctccaaaaaaaaaaaaaaaaaatatatatatatatatatatatatataaattatattaattaaatataaattaaatatttaatatatatataaaaaataataatatatataataatatatatagaagccacacaaagatcactaactgatagtttagtttgataactgttttccagtttagttgtcaaagcatggtgtgaacaaaatgctgagtgtcaacactggcattacaaataggcccaaaatgtgagcttttaatgagaatgagaaacattttatgagatttaactgaatatgccttaacacatccatgaggtagttaagtaaacagtactacacattttaatacatagtaaacagaagcatgggtaagtgacatactcatacttcaagcaataagaattagaagaaaccacacagaagcttggggcattctctctagctctaccccaaagaaaatgaactttaatttttttttttaaagcatcgtatcactgaagattttcttcttcttcttctttttttttacacttgcttattagtatagtatctctttccaaagctggtacccttttcaataatgtggtaaaaactgagtataacccttaattcaagctaggcctctccttctacctgaattggtacaaaattaagacatcttgtaagaactaaaattgtatttgaaatttttattttaggctacaaaaacaagcaaacaaacaacaaataacttgaaaacaggtcttgtcaaatgatgtaagttcatcctttccagggaagcagaaggtagaccctaccacaaagaaaagatgcttagttaatggaggttaaatttaaaagtacagtgaaattcaggctaacttctgaaaaatcctgttttattcacctcactgtggtaccagtaactatactgagtcaggttactttacagttaactatgtcacctataacacaataatccattaacaatctaatacagttattgggtgtggtcatactggaagttcttaaattcttaaccatatagttgtcttgccaatttttttttctttcagatgagtcttgctcagccacccaggttggagtgcagtggcacgatctcagctcactgcaaccaccgtctcccgggttcaagtgattctcccatctcagcctcctgagtagctgggattacaggcacccgccatcatgcctggctaatttttgtgttttagtagagacggggtttcaccatgttggtcaggctggtgttgaactcctgacctcaggtgatctgcctgcctcagcctcccaaagtgctaggattgcaggcgtgagccaccgcgactggcatgccggttttttttttttttttaaacgatggattgtcttagtacaagtccctgcatttctgtaacaaagtaatgaaaggcacagctaatccaagcagacttaaccctattcaacaaacagctgaaaaaatactttggttcttcaaggaaaaaattacgaaaaaaaaaagtgtttcctttaacagttgttaattttcatagctgtactccaagagctatataaatattccagaagaaccaaattatgtagcagcgaatgaacatgtgtgacagaatttgtgcattcaacatacctggcagaaaaactagtgaaaatgctaggtagaacagattggtctttaaaatatcagtttcctgtcctttaaaacaaaaattacccagtctaccaagaaaatacaaaaacataaggcagtaagtaagaattgtgtttaggctaggacagtgcaggttatcctcaaggccacatatatcctgcttcactgctgcttgcactctgctgggttttgatccttcttcgggtcatagtctggatcattttcctcatctcctttgtcctcttcctcatctgcttcttcaccttcttcatcatactcatcatcatcatcttcagtagcttctccagtaaactataacactgatcttgggattgtatgctcacgtaaaaagtgaccaattttgaagtctgcagcaaggatagcttcagcatcatcatccagatctccactctcaggaacttcaggaggggcaagaaaattaaagaaagagtcattggaaactgttttagtcacaatacgaattgtcccatgtccctagtgtttctgctgctgcttaatggttttcaaaatgacattctttccttttttccaatctatctggccccctgtacaacccataatttcttgtccatcaaaggaaaagtgatcagaatcatctggttctggttctaacctcatcctatatgtctttgtcagcacttcatttgtaaaatatttactgggttcaaattgaaattctaagacaaaactcataggcaggccagcatctgagaacttcactttggtatctttcacatgcttcagaataggttcatcatgtttctgaagcatatcactgagcaagtcaacattcttaaaaacaggtaaccaaaattcaggaattcctttggggtcttctttttcttcatcgtttttctcatcttcagtcttggccttttctttcaactcctctgaaatctcatcttcttcatctggtttccattcacattcttcctctgtaggttcataaattgtattagtaatctcagattgcttatcaaatagaggctgatagagaacagcatacttcctttcaagatcgtgaacttcctcatagaatttggcttctatctgtgcacctttaacttgcaggtttttgagagcattcactcctcttttaactaccctagctaggcaggttgtcaatgtctgccatgttgtaagaactccaaatatcagtggctactatgagaagccaggcggctggagctgtgcaggcagtgactcagggcagcagtggtggtggggaggagcaagaggcagcactgcaagcagatggcgctaaaaaaagagaccctatctctgaaaatggaaaaaaaaaccactcttaatttcaccaacctgagataattcctaaaatttggcattgacctaggcatttttgtatgcatctacaacacatagatgcctatactacatgtctttaaaaatcagatgctatacctatcttggaatcatttctcaaatcatgtaacaaataactttctgtctcatacattatcagtctgaagatttgcatagtattttactttttagatataccctcatttgttaggccagtctcctactactggatagtttgttttctgttatatacacatataagctgtgatggactacctgcatctgtctttggggctttgtgtccaagtaaacactgaggataaatttgtagaagtaagtttattagattaaaggatataacatccttagaatctttcattacatattgcatattgttagcatattgtactgttttactaccagcaagaacatccatttctctacaccctcattagaacacctttttattttgaaataattatagactcacaggaagttgcagggtgatgtacagggaggtcccatgcaccctccactgtgtaccctttcccccatctcccccactgttggacatcttgcataactatagtacaataacaaagtgagaaaattggacatgggtacaatccacagagcttgttcagatttatacgtgaatttgtgtgtgtgtgtatgtgtagttctgtatactttagtgtgcccaagatggtcttcatatgagtcaactccgtaaagagagtatttatcagactaattattggttatatgtacggcatattgagaaaaatagattaccacaaatgggcctttgaagagtttagtgggtaaagtaggtcaaggtaatactgggcttgattaggctgcaaaagtataacttttatttaaatacttcttattgttagatataattcatattcagaaaagtacatacagtgtatatgcacactttataaacagttaataaaccaattatctgtgtccacctaatcaagcgtttcagacactgaagagagaccatttacatttatttcagggtttgggagaactccacatttaagaaggcatttgaattgggctctgaatagaatttgagaaggcagtaatgagagggcattttaggcttggcaacagcaaagaataatgcaagaataatgtttttggagaacagcaagtatagtgatgggacataataggagataaggcaggaagggtgtctaggaacaagactgtagatacgaagttttttctgtcttgctctgtcgcccaggctggagtgcagttgcgcgatctcggctcactgcaacctctgcctcccaagttcaagtgattctcctgcctcagcctcccgagtagctgggactacaggcgtgtgccaccacgcccggctaattattttttattttttatttttattagagatgaggtttcactgtgttagccaggatggtctcgatctcatgaacacgtgatccacctgccctggcttcccaaagtgctgggattacaggcatgagccactgtgcccagtccccctttttttgagacagtctcactctattgcccaaactggagtgtagtggcgtgatctcggctcactgcaaactccacctcctgggttcaagtgattctcccgcttcagcctcccgagtagctgggattacaggcgcgcactactatgcccggctaattttttgtatttttagtagagatggagtttcaccatgctggccaggctggtctcaaactcccgaccttgtgatccgcctgcctcggcctcccaaagtgctgggattacaggcatgagccaccgcgcccagccgaaattcttatctattaagcaattactcattcccctctcctccctccagccctggtaacctctaatttaattaattaattactttattactttgagacagagcctcactttattgccgaggctggaatgcagtggcacagtttgggccagtctctgcctcccaggttcaagcaatcatcctgcctcagcctcctgagtagctgggactacaggtgcccaccaccacacctggctaatttttgtatttgtttgcatttttagtagagactgggtttcaccatgttggccaggctagtcttgaactcctgacctcaggtgatctgcccacctcagccttccaaagtgttgggattacaggtgtgagccactgtgcctggccgaatttactttctgtctctgaatttgcctattgtagatatttcatataaattgaatcattcagtatttgtccttttgtgcttggcttacttctgttagcataatattagactagtactttttgcctgagctagtataaaaaagtactcaatagtgattgtaaaaatagagaggaagggatgatttggggaggcattataaaggtatttgtagaattcagatggacttgaatttaaaaaaagataataccagggtttctagttattaaacaagataggaaacataaggtgctcagtaactatatcaagagatttaatttgtctaaggctgggcgtggtggctcatgcctgtaatctcagcactttgggaggccgaggtgggcagatcacgaggtcaagagatcaagaccatcctggccaacgtggtgaaaccccgtctctactaaaaatacaaaaattaggtgggcatggtggcacatgcctgtagtcccagctacttgggaggctgaggcaggagaatcgcttgaacccaggaggcggaggttgcagtaagccaagagcgcaccactgcactccagcctgggcgacacagcgagactccgtctcaaaaagaaacaaaacaacaaaaaaagagagatttaatttgtctaaagcaagagtagggctgggcacgggtggctcacgcctgtgatcccagcactttgggaggtcaaggcgggcggatcacttgaggtcaggagtttgagacaagcctggctaacaagctatacttatttatttacatattgtctatggctgcttatgtgcttaatggtagagttgagtagttgcagcagagactgtatggcctgaaaagcctaaaatactatgtgaccctttatggaaaaagtttgccaacctctacttcagattgtgaatcaatggaaataaatataaggcactgtttcctgtcctcaaggaaaactagggcagagaaaaggtgcttagcaattcttagttaactgttgatttatgtcagaacatttattatatttacatatatataatttaatgattccttttcccctttaaaaaaattagagaaactagttcataatgagctgagttagaacacatggtaatgggaatgaatgaaattgtttatctgaggctttctcagaaaataagatgagcttaaagcttctagaaagacttctaacttgtatcttctttccctttttgcaatgccagaaaccatatacttcattgcctttcagatgcggtggtgctagaatttgttatattttccatgagacttttgggcgaaccttagaatctgttgatccacttggtggccttaacactattgacattttgactgccattagaaatgctactgtgagtatgtttagctttttagactgtaaaaaaaaatgaggttaaagtttttcttacccatatactgtgtctttttaaatttaattatacagtttattttgctctcatatttgaaattaaaaagcatttttcatgaaaagtaccaaaaatgtgactttcttaacccttgggaagaactgaaattacatatataataagagttctaagttttattttctcagggtcctcgtcctgctttatttgtgcctgaggtttcatttgagttactggtgaagcggcaaatcaaacgtctagaagagcccagcctccgctgtgtggaactggttcatgaggaaatgcaaaggatcattcagcactgtagcaattacagtacacaggtaacggagagaaatgtaacaggtttcacatgaactagaaaaggacatgaagtggtggtttcactgggtggaaggaaatgtataagat

SEQ ID NO: 8317 - DNA, 1264 bp, Homo sapiens
ttattttcctcttaggattttgaactacatataatattttaactaggtgctttatagttaaggctaatcagtcactacctcaggtccttagatgtatcctttacccaaataagttaacatctttaacttatgccttgttacgaacttattttcttattgttgaaaatgaactaaaaaagtgacagggaatagtggatgatctgaagttttaatagcaaagttgcataaagtgttggaatttagatttgcattaggtagatgactatttttccctaagagtaaaatacttgtagttactttaatgttatttttccctcttagaaatgcagttttagatgctgaaatgtaaataattttaaagctagagtaaattattgtttggcataagatttatcagttggaatataattatcaagtaatttaggcataagtttcctgtactttttcggtattgtctgtttcataagttttatatataaatttctcaaagtaaaatatggttgatgtatttttgtatatcgcctaacttactttttttctaggtccataacttagtggcaattgaactggcttatatcaacacaaaacatccagactttgctgatgcttgtgggctaatgaacaataatatagaggtaaatataattcttaaatgctttttcacaggtagaaaaatctgttgtaactcagttatatcaaacttatttagcatggagtaactataaaatagacatgtgccacattagtgcctgctgcatgtcaggaaatatgctgaggggattacattgttttcttaattctcaaaaccacctgcaggcattattactttctgcttatgaaattgaaattcagaaagaatctgaaaattcattgatttggtgtgactggctctattttggtaacttatagtttatacaggggaagtgtgtacaacaaagtatttaaaattcttttcatttggctttgaaagctgtgaaggaaacactcaagaattaaccaacttagcataaatttggaaaagcagagtgcttttttcaccactactggggtggctgcatttcatggatcttttctttccttttgattttaatgtaacaaattgaataagatctcagatggagccaaggctggtggacagagcaatttatccagaagccattttttttctctgccgcttttctccaaaaatagtacatttttctgctactccctaattcagtaagacctgagtcccctgctataccaaatttcctcttctgcatat

SEQ ID NO: 8318 - DNA, 1388 bp, Homo sapiens
gccattgcactccagccttggcaacaagagcgaaactccgtctcaaaaaaaaaaaataaaacaacacccagatagatacacatactccttcagacttacagacctaagctgcatttatggggtagtgatgaggtttagaacatatacatattttgttaaaattccccagatgattcttggtatgaacgactatattataaattttaagatgtacttagaaatccttaagacatctagccccgtctctaatagacaacacatttatattgcagatattacttttttttcagtttatgaccaggtatttatgaaggactattggcagggaaaatatgaatatgttaactttagcttatggcatcaatttactaaggaacaacaggctcaccaactgatgtcaaacataaaaacccccacatcagtctgatacgatatggtactactttgaatctgttactagtaccatcttgacagaggatacatgctcccaaaacgtttgttaccacacttaaaaatcactgccatcattaagcatcagtttcaaaattatagccattcatgatttactttttccagatgactatcattattctagtcctttgaatttgtaaggggaaaaaaaacaaaaacaaaaacttacgatgcacttttctccagcacatcagatttcaaattgaaaattaaagacatgctatggtaatgcacttgctagtactacacactttgtacaacaaaaaacagaggcaagaaacaacggaaagagaaaagccttcctttgttggcccttaaactgagtcaagatctgaaatgtagagatgatctctgacgatacctgtatgttcttattgtgtaaataaaattgctggtatgaaatgacactaaagtttgtcaaaaaatgaattcttaacttttctcccagagaaagggagacaaaaggagctttttaatacctaatctactttggaacataaccgtatagagtacgaaaaattttacgacttttttcctaccagattctgacagttcaccaaggtattataacatctccatttttgcgtatgaagacagtgacttgctccaagtaatccaggtagtaaatggctagaatttgaacactaaagccatgctctgctgcctgtaaggttttcaaaagaaatctgattaatcatttcgtatgtgattcacttgatcctcaaggcaacagggatgccattgccttgatttttcagatatggaaatagttctggagaattaatttgcctcatgtttgaagagctgaactcagtcttgattccaaatcctttaagtttgacctgaaaactttccttacctggatactttttgatattctcatatgattgcatatttggtataattggctttatttt

SEQ ID NO: 8319 - DNA, 1345 bp, Homo sapiens
tccaacaaagcaagtaaagctgcttccgtccttctgtattctctgtgggcacacacggaactgcatcatgcctacaagaaggtaagaacatgaacaaggaatgtgtcatagttaacagagccaggtaataatggcccacttgacttgaccctgggaagaaatcgctaaaaaactgcattttcttgtgtgccagttttgttacctttcacgtttctgtttgcttattccaaaggctcagtttaagaagacagattttgtcaacagccggactgccaaagcctaccactcccttaaagactgaggaaaatgacaaagtattctcggctgcaaaaatccccaaaggaaaacacctatttttctactacccagcccaagaaacctcaaaagcatgccttgtttctatccttctctatttccgtggtcccctgaatccagaaaacaaatagaacataattttatgagtcttccagaagacctttgcaagtttgccaccagtagataccggccacaggctcgacaaatagtggtctttgttattagggcttatggtacatggcttcctggaatcaaaatgtgaattcatgtggaagggacattaatccaataaataaggaaagaagctgttgcattactgggattttaaaagtttgatttacatttatattccttttctggttcccatgttttgtcactcatgtgcacattgcttcgccattgggcctccagtgtattgttctgcagtgttgaaacagaatggaaatgacaagaaatatctgcagttatccaggagaaagtataatggcaaaattattggtttctttctttactttgtgcttgtttttatccccttgggttgtttttctctgatttttaaataaacttaagaaatttagattacagagtatgcatgactgtaagaaaaagaaattgagaggaagtgatcatagcaaattaaagaagtcttttcctcccagaacttaaagtaaaataaaaaataaataaataaataaaatcttttccacagagaaaggcaactgtgatgataaaatttaacgttcccccaaacactgagtcaatgagatttttctcaggagatactttacctataacaacgccgttaaatccaaatctcttctaaacgatggcattctatgtaatgcctttcctggacttttttggccactgccctggactagtgaaagaatggactctatctttatctgcaagaggaactaaggccttctctcagactgcctggccagcctggggcactgaaaatacggctcatgttaatgagttacattatcagccagcccagccttgcccaccatttaagaaatatcac

SEQ ID NO: 8320 - DNA, 1946 bp, Homo sapiens
tatatatttgctggttggagtatagctgactcattgaaatcaaagccaattttttggaatttaatgtttttcatatgcttgttcattgttatagttcctcagaaactgctggaatttcgttacttcattttaccttatgtcatttataggcttaacataactctgcctcccacatccagacttgtttgtgaactgagttgctatgcaattgttaatttcataactttttacatctttctgaacaagacttttcagtggccaaatagtcaggacattcaaaggtttatgtggtaatatcagtgatattttgaactgtaaaaatggacttaataattagaccatttctacaaagaacaactgaataggtggaaaacatggaatttcttttaggtgcagtggtggtcctcaaattacattagtttttttaatatatattttaaacatatgtaagaaattaagtggcaaagaactgggaaagcttaagacctgcttcaaaagcctgaataatgggaaaataaaattgttttcagatatctcatatcgctctcgtaatgttggcccctcacaaagcttgggaatgttttgtatgtataagtttattaaaactgggtatgcttcatattactagaactaatttattctcttcagagagaactattaggttagtgcaaaagtaattgtggtttttgccattgaaagtaatggcaaaaccacaattacttttgtaccaacctaataacaatgtgttagcaaatatttacaaatggtcaggtgatattcttgactgaaaagttccttaacatttcagtaaatataattttaattctaagtcaaaatagaaatgcatagatagtaaatgataaagtagagactcatatatgtctgtctaggcatcaaattgttggttattgtttacaatccagaaatgatgaagctctttcactaattcctaatatgaaatgtatgatggccaaagacaaattgtgttgattataatcctttaaaagggggatttcctttatgaaatacatattgtattagcttcccagggctgccataacaaatgaccacaaacttgggtgcttacaacaattttcctcacagtctggaggccagaagtctaaaatcaaagtgtcagcagagttggttccttctggaggctctaaggaagaatccattctatgtctgtttcctaatatcttgtggctgtctgcaattcttggagttctttggcttatgggcatatcttgtctaagtattgcagacagcaatcttcactccagtctctgcctctgcgttcacacggcctttccctctgtcttttcattaccttttaaggacagtgtctttgaatgtagggcccaccctgatctagggtgattgtgtctggagacccttaattatgtttacaaagacccatgttccaagtaagtttgtattcacatgttctgagtagacattgtctcttcatgggatacttttcagtccatgacagttactaaaggacattttaggataatcctcatatgattgttaggagactacctttaaaaattttttattatatatcaaattatagttgtatatacttatgaggtacgaagtggcattatgatttttgaatataatgtgggatgattaaataaagctaatctatccatcacctcaaatatttgacatattttgtgatgaaaacatttgaaatgtactctcaacagtattgaaatgtacatacagtgcttaattattagctgtattcaccatgttgtgtaatagatctaaaaaaagtcaaacatattccttctatctaattgaggctttgtatcttttgattgtcatctccctattcccacatccccggcctctagcaaccatcattcttctctctacttctgtgagtttaattgttttagattacacaaataagtgagatcatgtggtatttg

SEQ ID NO: 8321 - DNA, 1290 bp, Homo sapiens
ccatttgctggtgaattttccaaaatagataacagataaaatgattatgtaagaacttggcacaacagatcattttgcctttagtcgttcaagaaatgatactaaactcaaagtcattcacttgaaacaactgagaagaccattcttaggtgtttagatccttgcttttagaaacattcttagttatatttgtgttttcaaaagttattgagtagatagatattttttcatgaatttttaaacattagacttagctgaattgattaaaattaggtgattatgaaaaaaatattgccctgctcgagggcatctggagccctacagttaccattactaaagtctgtgagtatgtctattttgaaaagtgtcataaaaatatctagtccataaatcattataggttcagtaatacatcattttgaactgattctatcttctgtgaaattctagagatatgttatctttaggtagcatgagtaagattcaggtatgctgtgaattttgttaacgtttatgttttccattaatggatagtcaggaatcttttgaactgcgtctatgtatttaaatgatttggaaagatagcatctctcagtttaaacttagcatctcattttggcaagataaattattttagctgtctggccttttctttgtcttcttagagttatttctgaaatgtgcatagccagtcataaaataacttgtgtaaatagcctaatgtaatttatttctaataaatacgtagcttaatgaaatgtatttctagtttgaacttaattgccacttggcttgatattattttccttagaattgttggaagagaggagagaggaagggatctaccatttttatttataccacctaaatagtggactgttattttggactcacttttaaataaaatatttattcacatgaagaaataaattttgtgtttattaggttagcaagcgtttattatctttgaagtaattggaatttcattaaaaagtgaagcaagtaagaattgtgatataaatttgaaaatttttaaatggaaattgaaatatgacttaggaactgtgggcttgtagaaaaaaacatttaacatgggagttaagatttttatatttggttgtggctctgggatcaataaggcaagtggtttagtctttagtcctcatttcaaatgagaatagtatttgtcctaactctagtcagtgtctgattggtatgtgtataaccttattttaaaaaggattcattcctgccatatactcataatatttataagtatgtcatatgata

SEQ ID NO: 8322 - DNA, 1097 bp, Homo sapiens
gtggagatattgtgctacatttccaagtgttgtagttaaacttttattagtctgaattaaactcttttatagtgttttattgttttaaaccacaaagatttataatcatttatatctatttatctaatgttattcaaatgttttctgcgttgtatgaagctaagataaatgtaaaaaaaacaaacaaaaaaaacctcactttgtgttttgtaatcattagacgatttaacctaatatatcttcccatatgatatgatctttgcatatggcatacttcattcatatgacatagttagaatcttttcccacaaacaatgagtgatgatatctcatttgaaaactcgtgtaacattgtatcagccactgttataaagtgatttacccatgttagtctcataacaactctatgagatcagtaccgtacacatggggaaacttagtatagagaggtgaagtattttttccaagattacaaaataactgtctgagctgggattcgtaaccaggcagcctgactccaaaatcaatattcttaactctattgttatgatggagaaaggcatgaagtctaccttcaaattcatggcattttagaaggaaaaattgtcgcaagtaatgtgattatacttcctagttttataggtcagaaaaatgaggtccacactaattttgcctcttccacagggagatagattctcatctaccattgtgtcttttgtttctgtttttgtcatgatacctcaaattgatatatgttgtaattatgaatttaaggaagtaaaaaaataactcagggctggagccttcagccatattaacatacattgacataaagacctttgttttaatatgaatgattccagttaacaaatggagaaatagttgtttgaaaattaatatttagcttctcaaaagagactcctgtttggaagcaaattgttggtttaacaggacatactttagatatttgaaaaattctctgtggaatcacaatctcttatttttaagaatgtaggaatatgtgttctatatgcttttaagttatgtattacatactattctctaaaatagaaatgtttatttggcttctaaaagtc

SEQ ID NO: 8323 - DNA, 2116 bp, Homo sapiens
ttcttcatctggtttatttagacctgacctaattgatcattttaccataaattgaattatagtgaaaactgtcttttgggtactgtttctacctaaaattaaaggtatcacaaaatatgtataataatttttaaatgaattttctgaatttatctttagacaaggtaattcttttgaattctaaagaaatgcagttcttggagttgatgagaggttaaattatagatggacaacttagagaacgtattccatcttcatataaatggtctttcataaaacatagtgtatctatgcagtttatataaactacatgatttattatttgagtctatgtattctgacctcagaactatctctgggctacagtattaccaaagtgggatgcctttaaaatgcagtcaaacttcatttgtatgaagtagaaaagaacttgggaaacctttaaaaatatatattgtgatttatgctttaagaaaatgcatacttttttctaatgaagagtagttcataatatataagggttttaaggccctgaaataacattagtgcttactcattgctctctcatcttgcctccagtcagatgttattggtatagtgaaaagaagaccagattttgaactagatctggattctctttttagtaactcaggcatgttatttacccttctctgtgccttaggtttttaagtacaatcagtgtacccttcaaacctcacaagatgaaactcagaagagataatggatttggaagcattttgcgtggcttatattatgccacgccagtgttactgttgaagttctgttttgttcgttgttttctgtacagagcgttcagtttactcaggctgaatgttttctgacatatatctccagtatgaatttgtttatgtaaggaagagtttttcaggaagagaaagtagagaagaaaagaatgatgtaactaaatcaaaaaagaaggaaaagagaggaagtgagaaaaggggtgaggaaagagaaaggagtaagaatggggatggcaaagggcagagtaagagaaaagatggaatgagtgtatggaaaattgagaagtagagatggagagaaatggtgtggaaacatttactttttgagttgtagccctcacactacatcagtttgcttgcctgggctctctggggtcaggaaaggtgctgacttccatggaatggggcagcagggcctgctgtatttggtttgttagtactagagttgtttcccaatcaccctactcactgatcatttagtgccaattcaacattttatgtcttttttttttagtggatcccagtttgtgagctaggacctgtggaaatacaagtatcttcctttttaactttattgttttagccatcccaagtgttagactgcaagactaactacatattccccagtggaggttggaagtggaggggactgcttcattaggtctgaagggggccaaggaatgtgttgcagcagttttcgcagatgatactgacgagaggccaggtttgggaatcactgccctgccttggatggcaaattaagcaataaattacacctatttattcctcagttgggatactttcagttgaaccattctgagtagatttaagagaacaaaagacagcagaaataccttaaaagatattattggctgtcttatttttcagatatttgtatttaataaataccttagtagtagtcagaacctctttgagatgtttttagaaagaccactgatttgttttttaaaataatttttttggttccttagagtagagaagaaaagtaggggtgcaatatgtcaggtgtggggccagttatccatttattaaatgcaatttcaagtgtcttaaaaacaataattgccttattgcattttaatatttaataaagtagattaaataaagatttgtattataacagttattcttttatccattgccaaagcaacccttttttgcctattaaaatctggctaaactgttctgatgttgtttcttaattcattaaacatgaaactaggttttacaaactaaattatataaagacagaagtctaaaaatggtaccagaaaatttttttttaaaaaattaatgtgttattcaaatat

SEQ ID NO: 8324 - DNA, 1220 bp, Homo sapiens
atttaggtcaactgcctccagagccctgaggctttcgctccccctctctcggcggtcgagacccacagggctcccattcacctgcgcgtcggcctgcgctagctatagccctcaggcgcgccgcgttccgcgcactcacaccaccctctgcgcgccagccctgcgtccctcccacgcgaactgcgccggcgcgtccagccctcccgcccgggggaggggcggggttgcgtcgctgccgctgacccttgagcgcgcggcggcagaggcggtgtccaggcttccgggcgggtagtccttcggctccggagccgcgactgcgctcgcctaggtggtgggcggggagggaaggaagggagcgggcgcaaggcggcggcggcggctgcgggtgaggaacttgttgcgcccgcggctgcgcggtgcccctccctccgctccagttcgtcggggcgggcgcggcggcggcggcgaaggaggagcgcggccggggcgatgcggcgctacctgcgcgtcgtggtgctgtgtgtggcctgcggcttctgctcgctcctttacgctttcagccagctcgccgtgtccctggaagaaggaacgggcggcggtggcgggaagccgcaggccgcggtggcttcctggctcgcgggcggcggacgcggcgccgtgagaggcgccggcgtcgcgggccccgcagcgcatcccggcgtgtcggacaggtacgggcagttcccggtgtgggggacgcggcgggcgcggggcgctgggcgcgggctcggcctagcccgggctgctcgccggtgggtgccgcgtctcccgcgtctttcctcctgtctctgacccctcactcatttccctccttcccctccggccggggctaaacctgcgctgctcccgcctgagagtgtcctacactttctgtgtttatcttttgacccagtcatgcgccctttaaagcagttagaaattaattttcaactttttaaaaagagggttctttgaaaataagaggtgtccacaaaagccttactgctgcctggctagtgagaatttcctcttgtttcagtggagttcaagttgagatatttaaacatgaggctggcgccctagttcagtgtttaaggattgtgtgtgtgtgtgtgagtgtatatgtgtgtgtattttgtccctcatgctgattttcctgtgttaacgcttacacttctaagtattagccatggttagttaaa

SEQ ID NO: 8325 - DNA, 1132 bp, Homo sapiens
caacacctctcacttccatttggactttttctcctcagtatttcgtaaactgatcacttaaggaatagtcaagggacaataattttttatctgtatcttaatataatgtgaaataatattttggaatcgaataggcctagaggctttgtcttacctaaaatttaaaaagtaacagcctcacttgcttcggcagcacatgcactaaaaattggaatgaaacagaagattagcgtggcccctgcacaaggatggcacgcaaattcatgaagtgttccatattaaaaaaaaaaaagtagcagtcatttcttctttaatccatttcacatatgctcattatgcatagtgaaatggagagagttttcttttcttaaaacatgttaaatctagcacttaatataatttgccagttagtgcctatacacaaccatctgaactgctctatgttttttaagaaaataattaaagatttctaattccttttcaaggcgggatccacagcaccattgtttactgaccagccagaggaacctgagtcaaacacaacacatgggatagaattatttgaagatagtcagctaaccactcgctctaaagcaatagcatcaaaaaccaaagagattgaacaggtgagagtctagttgtcttcatgtacataatttttgtttgtgttgctttgcacatgtaaacatttattgaataaatatgcttcatttctttttccacctgtaactctaaaactacaacttaaaaaattataaaaattgtttgagttgacttcacagtcagtttgatcagtatggtcccccacctggattgtttatttttaaataaaaaacagacttcttttttacagaatattaatattctagttagtatgaagcaattaaaaattattaaagttaatagggatgggatggaagaaatgttcaatgtagcaaaatgttagcaaatgttatttttgaatattgggattacagatgtttcttatgttttttcattatactttaaggtagtttccaaatattaaaggaaaaataaaggatactatttaagtctagttttttagtgaagtcattctgaaaagcaggactttgtttttaatgtgcaactattatggggttattttcatttt

SEQ ID NO: 8326 - DNA, 1301 bp, Homo sapiens
aaatatgtattgtgccattccgcaaatttaaaagctaattgaggacaatttttttttaatttcctaaatgagaccaccttggatttttatttttgccatttagatgtttatacttatttagcttttataaaacataagccaagctaaatcccacataacaactctggtattcttccctcatatgagcagtgattttatttgttacccaccttagatagactaagaaagttctagtcttgtttctccttctccccgcttccctggggtttttccttaccataagtattctggtccgagggttcagttcctttagtcaagatgtcacaagtttaaaaacaaaacttgagaaactaccaaaggctcaggagttgtccactttgttgaaatccattaaattagagaagtctcactaacagatgtatttaaatataggtacaacaaataatttctttttctccccttccccaaattacagtcagcatttaaagctgtttatggcttgccatcagcattattctggtaggcttgttagtgttaaaatctatttgattttttttttttttttttgcctcttaaagtctaattttaggatggatgaattcagatgtttaccagagtgtgtattttacataatgttcttgattaaaaagacttgtttgtaaattatccgttgtttttgcatatgcccagttgatgtgataaaattttcattgtcttgccatataaagccttggttatcaacaggtggaatgtagatattgtaaagctttttgtgaattaaaagtgcaaaataaagcaaccacatttaagtagattgtcttttctcttattttaacagggttaacgtattttgctaaaatgtgagctttattactctgtactgcaagattacttcttagtcttcagttcacctactcagcagcaggatagaggaagtgtgagaattgaaaaactacagcagtgccccctcatctgtggttttgcttcccatgtataagtaaaccatggctaccattgtccaaaaatattagatggaaaatttcagaacaactcgtaagttttcaactgtgtgccgttctgaatgaaatcttgcagcaccgtgctttgtcccacgtgaatcatccatttctctagtgtatccacactgtatacactacccacctgttagtcatctgtaccatttactcctgacatccagccattgactatgtcatggttccatgatccaggatcacccaaagcagatgatcctccttctgatgtatcgtcagaaggtcatagtagtgctcatgcctgtaatc

SEQ ID NO: 8327 - DNA, 1140 bp, Homo sapiens
tacttccatctcttaatctctgctatatcaacttgtttatttccttcatatctccaagcagagtcagttattttaaaagtacttatatttagtttttattgtggaatataagcttcctaaaaagggacattttctgttttatcttctgcatctagcacgtgcctggcatatagtaggtgccagaacagtgattcttacgtttatatgtgttcatgccatgagctccccgccttttttaattgggggagaaatgaaaagtttttattttagtcaaagttttacataattagttagaatgtttacataactcaaaaattaaataatgttgcaggttttgttatgaaaaccagctgcatcaccttttctgttcgctgttccccagaggccaggatttttaactgtagctgattcttttagtaattacctctatatctctggttaacataattaaattataatttatctatttttcagttttaggcattatctattgatgcagaagtatttagctctttttcacctactccagcccccttcccttctctcacaaactttcccaaccccattccctcaattgtaattgtgttataattttggtaagatcagtatgcagtgtttactttattataactatgtaatactttccacagatgagctatataatatagtttgattacttttcctctggagactgtacagcagatactgatattattagtttttcatatagttatgaataattcaacctcacacttttacccaattgtaaatctcctctcagtgtaatcagccatgcatggaatcctgtcaaattcatcctttgggggagattcctcccacagccttctgatctcctccacgctgcccaggttggtctttagacctcagccgagtgagggattccttttcaccaccatcctgagaacttgtattggagccctacatttatgtcttattttttgttggtttactattttattttgatggagcatatttctcagtgtcttatgtagaaagggttaaaggcaggtaatttttttttaaacttgcgggtctgacaatgcttgtatttttctctggctttcagttgacagcttgactaagtatataattcaaaggtggaaattatctgctctcaga

SEQ ID NO: 8328 - DNA, 1240 bp, Homo sapiens
ccctattcctcaagcattctagattgattgtattaggtaccttttcccagcatccatgccatggctctactccatgagcacagatggaggattggctgtttccaaggcgactcagtgtgtgtatgtgtacagacattcactctggctaattggtgctattggttcttatccaataatggctttttcttatcacttaacctaggaaaactgcttattagatttgtgacattgattaaactatgggcaatccctttttccatattaggatttgttatacttccaagatggcagttatacatccacatacatagacatctatgtttatatgtgtgcttgtgcaagcattaaatgtgtgtcttattccctcaaacacccagtgtgtatctcacaacctactgtctacaaaaagagaataaccaccaggatgagagtgggcatcaagcaggaatttggtataaaatcattcattttaaagctgctggttcaataaataagctgaattgacattgttgtatcatgccagagcatctgttattgaagaccaattttaatttatttttatataaatggaaaactgtgtgcagaacagcatgggaaatgaaacacactgcatttatttgtgctcttgcagcatgtctctcagagcagctcaattcaggaagaaaagtatcttgtcagaagacaatagaattatcttccttgttggaattttttgtagcttctgatgcacatctgccagtgattctataaaaagatatagttgagttaaatgataatagcaaaatttaatctattgaaatctgagggaaaaaaggtaaaatattcgtgtggctccccagtactgacaggcagaaacacactcatatgtatatgtacatttttcacatcagaggaaatgacaaagctggttctagtgagggaaattttgtaatagaaaagccccctaattgttttttcttgctttgcctgagatttggtttgtggtctcactatgcctaaaccatatgttcagatgaatactattaaaaatcatgttaagccaaaaacatgtctacttttctgcttcatcaatgacaatcatttagctgttttattcacatagaatttggtttaaagtaaaaatcctttctccttccttccaaccagttttacacactggagagtttaaagcccaaattaaagaattttagagaaaattcatataattcagaatagctttacctcctaatagatgtctctc

SEQ ID NO: 8329 - DNA, 1125 bp, Homo sapiens
cttaaaaaccaccccttctaaagtagaatggattcttttttttctgtttgattattttcatttctgtctattctcaggcgcatgatctcctttatttttaagccatgtttcatttcttcacttggctagatctgttccagggtcatcttttccttacagtaccatcattatagatttaatttaatagctttcatgtgattaaaaatagctaactagactcaaggattcacaatatttaggtgtattttcaatacctccagaaaggaaacctcagttaatcagaggaaatagtttcagtcttcatttgagcatgtctttccatctcaaaaaaatactcttagtaggttggagtgaagatagcaaggttttgaagcatatttgtcctaatccacagtgacactttttatcttccaggagcactcctaggaggttccgtgcctaatcaatgttgactgctttgcagatctcaagggaataaaatgacaaaagcagggaaagttacagattcaaacagcattttaactcatgttgatctggataattaatcttttctaaagatgtgtagtttcttggaaaacagtgatatcacatgattaaaattacatttttatcaacataattgtctggaaaagataagcccctcaattttctaccagttgacttttattcattagatacagaaggtgcagtattacacatcaccagctgcctttgtgaatggctcactacacagccattggggtacaactgtgtgcatgggcagaaacagcaagtgccctcattgtggtcattgggtggggagtgccttttgtcaaggagtctgcaggaattggcttatttctgtatgccaaagtgatcaacacaccaaagtctctgccataaagaatgtggcttccttgcatcctccatcctgttactctgggcccagtaatttgatgtaactgtctgattgtactagagacaggagtatacccagcttattcataatcaagtaaagagactcagattagatttgattttttagcctcctctagagccaatcaggcagttaagagtaataaaggaaaagggtttggtcacaaaccctaccattatctggagattacttcctgctgcactcctgtc

SEQ ID NO: 8330 - DNA, 1181 bp, Homo sapiens
aagcagtattgtaggcttttgaattgtcccagtggatccgggaccccatttcactgtctctcttgatcgtgttaatgatgcaatcagagttcaagacaggccccatgaagtctgactgcactgggatggagaaatgaatttcttcccactgaaggaaactctttctcattcgcagccaagacgggagtgccactgttcctctcttcactcctgagatactgcttctggaagcgggtgtcacttcctctctagtacctcttctcttctctgaagtgtgtgactatctcctagtgtttaaatttggcagttactcgccatgtatgtcagcatagaaaaggaaatgtttttaccttatctcctgtatgtatgatagaacttaaaagaaatgtgcatttgttttcatagccccagcagagaaaatcctcttcatagattaaatgtgctgctgtggacaggaggggaaaaaaaaccctctacatattgaaaggcaccaaatgtaatatctgacactgttaagatgcccaaaagagcaaagttgtagtggagatgcagggtcatttccccatgccatccacagtgtttgttagtgagtccacggctgacttgcagtgataaagaaaagcatggagctgtgtctgcagacaatggtggctgcatctgtaagtggcttcagaggcagcagccctggggaaattgatgggtgtggcagtggacctgtgaagagggagaatctagccttcagcctgtccagtgttaaccactagagaaactgagctttatatccttttttaatgcctgtgaattttagcatattgaaacattagagcaaatactcaggggatttttcattaaacatccctcagataatttagctatatatcattagaaagggaaagctatcatttttattttaaaactaaacaaggccatcttataaactgtcaccaaagtcttcccttttttattgcatgtgtgccttgaatttcataaaacattaattcacaatgggggtcagaatgtactcttgttgaaacacttcttgtaccattttatgttcatattatgtttgagagggtaaaaatgtatgagcagcttaactgaagtagaactattcatgatgcttttcacacattgtggcataagatgtaaagtttgtaattaatgttaatttctgtgcattt

SEQ ID NO: 8331 - DNA, 1236 bp, Homo sapiens
gcgttattaagaagaagcttacgaaaacagatggtttgacttttcaaaagtcataaagttgttgataaagcaactttatcgagaaacacaagcgtgatgtaggcctcagaattttccttaaaggagatttatgggaattgtgggaattatttccatggagtgccttgctctctatgttttttgaagtgtgaattatgcaagtatttctgaaattaatatgaagattttaaatgataacctggaaatttaatagcaataacctcagtttgcttttttaagatttttcttctgtataaatgaaagccagtgtggagtaactcttaagtactcttcacttctttattatctgtataattattatgaaaaagagtctatattattaatttgtaggaacacaaattttctttaaatctaaaaacaatgtatttcaaaagaaattatcatgactatcatttactataaaataatttttagtacacaagatatattaagatgtagttttgttgtttttccaagcctattattaaataattaattgaaagaatttattgcattttattgaatgtactatttatttatttgttttttagctttaggatccttttccactgtatttggagaagaatggaaagagaagactgatagagacttcgttaaggtaaatcattttaattaaaatgttgattcattgagttacatgcagctaagccaacaatagatcagtggttgcttatttaatatacataatactacctatacttttatctttacctaatacatatgccatacacaacgattttaaagttgtgattgagttgagtgaaaaatcttttagaatacccacgaacagacataaaattttcattgatttctgtgaatagtaacaacaatagcagtaaacaattgaatgaccctcttctcaactgggattctgagaatgggtttcaggaagttttcgtttttatgtgtgttctgaaactatgcaattcagaaaggaatgaagggccagacctgccatcaaatcctcaaaaagaataggtgtaaaagattagtaagtgtccatctagaggaaaatttctgggaatatatttctgaaacaaaatatagttgtgaatttcaagtgagaaactacaaaaagacttgaacaaattgttttctcacttaacacttgtctaactttgctggctttcaaggaaatataggatgcttcttttatttactctccaagggtacatt

SEQ ID NO: 8332 - DNA, 2391 bp, Homo sapiens
aagattgcgccattacactccagcctggcaatagagtgagactccttctcaaaaaaaaaaaaaaaaaaaaaaaaaggtactatgcagaaaaggcaaacagtaatagtcagcctcagtttatccttctagttgtttcccagatgcttccctctcttcctgcaatactatattaacatttacggggtgtggagctatgtattgtttctattttagtttttaaacttgcaaaattcatgataaagagtcatcgctgtgaccttggagactgacaatcttctatatgtttttttgcagattgttaaagagacatgaaaataacttatcagtgctagccattagtaacatggaagcttcctccacccttgccaaatgcctttatgaacttaattttacagttcagagtaaggaacaagaaaaagactcagaaatgctgcagtgaaaaataattccacttacacagtgggggactcaaagtcagccacatttcacatactgttactgaagaaagcaccaagtcttaatggaacaaagaccatagaatgaattattttatctcctcccatgatgctgagaggaagcttcgtattctgatctctgagtgaatccctttgttctctgtttaaaaaaatctaaaaagaaaaaggaaaaaaaaaaaagaactgctgtgggattgtcaaccagcttatctgcaggatgtttcagatctgataaatcctgatggaaactggtatgatcagaattcagtaccatccacattggaatatacatggaatattgtaaaacctacatgagcagatgaaatagaagcattaaatatttttatctatatccaaaaaggagcacatttttatatttacaaaaccgtttaagctggtttgaataatttaaaaaagtttcagcacacctatacccccgatctcagagggggccaccaatatctagctatggatcgtgtgttttgtttagaaatcagtagcttggttttcttacttgagccaatatattttcacttatttattatcataaaaatttaccagtctgaatagatcttgtaaatatttgtgaatagaatgaatacctttcatgccactgcagccactggaaatacattctgtggtgtcctagaagcattattggtaggttctaaagttttctagactttcctgtcaattgtaagtaattgtgatatattctatgcagtggatgaatgttctttaaatttgtgtaaatacttctgcaaaggtactgatgctgtaaagtcaaaacagttttgtggaactgtgatttttttttcttttttctttttttttttctttttttttttgtattatacaccttgtagaactcattttgctggctgaaagagtatggaataatatatctcatgtcattttttagaagaaaaactatttgaaggtattttttggttttccttaacatgtatccactgtaaacgtttgtcgtgtacaagctcagagcttggacagaattttttgtatttgtaaattggtttaaatacatggaattttatacaggttttctcctgtgttatatatgcattatgtgcaggtatgatattttcttcactactttttctatcttaatatagtgtggaattttattgtattattcttccattcttaatactgtaccacattcctgctcagaaactgctcacttccttaaattgtcttttttcccccagcgtgaaatgtatccatttataactgcctattgcctgttctattagcatccaaaaatgtggaaggcctcccaaccaccatttctgctgtgtccttaggatgtgcagtaaaaaatatagacctaacagtttatgttatagaatggctttatttactttggtgactgtttatagtttttaaataaaagactgaacattttcttgagtccttcatttctgagtatgcttaagacatcttaaaaatatagagagaattctaaattcagctgaaggcaaggtataacggtcacctacctatttgattatatgttgattgataacatattaaatagagaacaaataagagaggtcctttacatgacaaatttgcatgaaataagcagattaaccaagtatttatttttcatcttgttataatgcagagcaaatgtagagaacagcaaatgattgatgcagttaaagctcaatatgcctttttttactggatactgtacatttggctaaaagcttttattgtttgatgttgtgtttcttgactgtttattcagaatcacagtgtatccaaatcttcagcttgaatttggaggcagattcttagagtgaaaaagcctcagtttccatattaaaaatgttttaaatattttgattgaattagtaccaatgtaaaatctagtttcttcctgaaggag

SEQ ID NO: 8333 - DNA, 1098 bp, Homo sapiens
tgacctttttactagctaaactatttagccagagcaatactctgtagaactgtgcttttctaaagtaaagattatctgtttctcaattttatgtgcataatacttttcctggtgctagctttgataggcaaaatattttgaaatgttggtcccataatgattgtgctagttcataagctttgttgttatgagtgtaatcataaaaatatttccaagcagtttttgacctttattctacatttctgggcatttgtaatatggtattctactggtatatatttttaaagtttgcgtttagattatggtaaagaaatttcaagcatatttcttctaataaagtattaagacagtgtttcagaatatcaaggcacacctccttagttgttttagattagaactctagaaacaattttgtgaacattgaaagtattttgagttaagcctaagctgattaatcacacaatacatacttttcctgcattttctttcagtgacatttgagaattgggtgacattttaaaatgtgttttataccatttagcttttgcaaacaagttctaaagttttggagaaaaagtgatgtggtcaagagttgaagtctcatatatctttagtagcactcccatgaattatttccgtgacagtaacaagtgtgtgttccatgtctgatttggggcactggttagactgcattaatagctacttgattagaattcgaacttttaaaattttgaaatgtttaagaatgtattagaaaatgcatgctttatgttgaaaaaatacattgctttaatattcctcattcttgagttaagaaatttatgttaattttgcatgggcacaaacttaatcagaaacattttgtggagttacatttcctcttattatttatcaaggttcagtattgatctttgaaaccttggtcccgttaacttactagtcacattgaccaatgttttatagaaatgcctagaattttgagactaatagtagttatccattaacattccaaaagttttgtgctttttaaaatttgttttggtaattatcacatttttttctcttaccttcctttaaatggccacagtgtgtactgct

SEQ ID NO: 8334 - DNA, 1113 bp, Homo sapiens
atgaaacatgaaaataagtctggttatctctttggggttgtttttcacaaagctttctattttggctttaatccctttaagcatgaaaaaagtttaccccccaccccttttttcttaggtttgtcatagtaagagtggagaagtaaattctactaaagtggcaaatctggttaaagcctatgtagacaaatacaaatattcacggaaggggagccaaaagaaaactctggaagaacctgtgtctactgaaaaaaacataggctgaaatggggaacgctgtcaaggacattatcaggatatctgcaaagtgcaatttcaacatgtaccattaactgaaaatcatacataactgtgattgaaatttggttttgataaaattatttttttaacataggatatgatgttttgttctaaataaatataggtctgcactgcaacttctgtatccttccttcccctccaccctcccccacaaaattcaagggaaagtaaagggtttaaaggaatgtgcatctttactaggactgtgttatagtgtggatactggaaaatgtatagctttttgattagggcaatggagtgcataaattagaaacttctaagtgcactggttttcaaagagatatatataatgcatttattctgtcaggttaaaatgtaaagtatgatctttatgattttttccctctaattatagaaagttaaataatgtattaccatgaaaaatgtttctaatattaaatagaacatatcagttgcaaagttcctaatgtgtatttttaaagcacatatctgaataaattgcctagatagaaaaaaaattatcacgagtaaaatttagtgttcaaaacattgagacactcttcacctattgtatgaccaaataaaggttatgctgcttgtttttcttttgtgcctttgtttacccctaattgagataagcagtttgacttactagattacaactttggcagttcaaagtctttgttgaagactttgaggaaaaagatttggaaaaattgttgactttcggccgggcatgatggctcacgcctgtaatcccagcactttgggaggccgaggtggcggatcacctgaggtcaggagttcgag

SEQ ID NO: 8335 - DNA, 1031 bp, Homo sapiens
gccaatgagtctcccttttacttcccattagtcctccctcaccagatgattcctaggactcatggtgcaacatacaggagccaggctttagggaggggaggaaaggagcctggcggcaggggtctctgcaatggcaagaaagtgagtgaatccagcgctgccacctggttatccccttctcgttgaaaatagcagcgcaggtgcaaattcctaaacacaggctgcctgcactcggtgttacctcgggctgaggcatgataatattttattttttaaagctgtgaggaaatgaaagtgaggctttggttggggcgaggcagttgtgaaagaaattaaaataaaagaccctttgtaaatgcagacttagaagaaatactgaatttgtgtcagaagttctccagtgtttgtgttaatcgtgtggtgataatcctgtcctccttttaaagcgaattctctactgaaaggtctgctctgcttaaggagctacaaactgctctcaaaagaatgaaatactgagttccaattcagtgaggcacagtgttggactatggcacatttagttggagtcggggggaggtcaggaatatgatcagataatggattttataccttagagcaaaatctattagtctctctcagtttatcaatttaaatggctttaggcttatagggggtgtaaactttaagaatataattctcccattcaagtttacagcaaacatctagccaccttcaaaacaaagaatatacagaccatcatttagcaatactaatacatgattttccttggggatggcaggtttgagaatcctttagcaacaggacatacttcccctaaattacagtgaattatttataacgagataaagctttcaggtacaagctgaaggtggggtgtctaacaactaaaaactatcactaaatctcaaagagaaagttcttgcaaaatatgtaaagttcacaaggtgcagacattttccttctttaggcttttatctaaggaagggctatgaaactgggcccatctgtat

SEQ ID NO: 8336 - DNA, 1602 bp, Homo sapiens
catagcttttaatataatgctacagaatcatatccacattaggttagagttcagatatttggatatgaatacctaacctagccatatccatggccatctctgttcttttcagcaatgttttccatattatattagcaatgacagaaacagaacaagccaagatccagtcagttcttgggagcttgtctagagcaccaagtaatgaaatagccaggtagtgggatgactgtacctttaaaaatacataatttagtttgcaagctatattatgctactttctattttccttgttactttatagcaattcattttaccctcacaaagtcaatttagaaccttatcattaactgggatgtgtagtgatatttttgggcctctgggtttcatgtgtcaatacaaggaatatttatttaaaatagatttatttagaggaggcacagtgttgttgatctgtgtgacaccacccatatttttaaaaacctttgtatgtttctctaaatttgttgttgactgaatataatagaccctaccataattcgtcaaatatcactgattagttacatcctttgtgtgagattagctgtaaagtatactgctcttattcttattcagaatagttaattggtagccaaaaatacatgtatcacagatgttaggtcgaatttaaacagcacagtcaagtgctatggaagtttttctgctaaattagtagattaaagaatactataccctaggcatggggagcagcacgttttcctttggtaggtaggatctctatactagtgaacagtgccagttccacactttggacttagaactgttctctagttattgtaacacagaatactgtcaatccctaatttacttaatgttacttattggaagtggggctgatgaaatacgcacaggagggaaatctactgtgtttaggcacaggcagccccagtgtataaggagatcatattccaaaaggttgtcagttggttgtttgcaacctggaatgtattttcctttagagaccaggttatccatggtggttaggcccctagagcagctggaaaagatgatcaaaccaataggttagctgacatcgaataatgtaataggtttgctaaagaatctaaccatcaaatataatattgtttccagggagggtgtttgttcagagttgcctgttagtagaatctggactgtccatcccagccacatcccacctactggacagtaggggtagagatgccaccagactacaggtgaccagattggcctgaaacatggtgtccagtaaaaacggggaggaataagtccatgactgctggagagcttggtggtaggaggagggtgaaggagggtgagggggcctctcatgggtcagaaacctccagggacatccctcagctggtaactctgctgttgtccggagggttcaggcttggtgtgccttcttctgtttgtctgacttttggctcctatggttcatctcctgccctgcccaccacagaaaaggatgctgctgcatagcttctccaatgtaccagtcattgaggccagcgcgcagcacttttaatgtttttagtgctagtaactgtgttttaactctcc

SEQ ID NO: 8337 - DNA, 1180 bp, Homo sapiens
gggaaagggctggaatgattatcccagcaggcatgtgttcactcagttcccaattttcattagagtatgcctcttgcccacaaattgtgcctagtctctcacctagaaacatatattgtatactttccagagaacatatattcagattgttgccaggataggggaggaccaaccagtcagctttatggagtaggacctggtctggggaatctagctatttcttgaaaaaagttcaacagatcctcactattttagctcaccccttccattatccccaactttcagtcatgccagcagtgccttttagagattctctgaggtaaactgagttggtcttggctttttccactgccgatttatggttcaggtctgtctgctttccagctttcaaaatttcattattgtctactattatattttatcctagcagctttacgccttaaaaaaaatctttttactgggatatcaagggagagggagtaagtccttgtattcaatctactattcctagaattcaattgatttttaactatactggctgagggataattgacctcctatctcatgacactttagtgtctgattaaagcggggaagtggaaaaatttacttttgtagttgaaggaagatttttcctggatgaaactattatagatcatttagttatttgtaagattcatggataacaagcgcaacacaccaagtcttcagctaaatctcatgaaggtagttgtacaaaggctcaaactttaagtttctcactaaacttaggactctcctacctcaggacaaggattcactctgtgactcttgtaaaaccagctgctcctacaactgctcaaagccaagaagcagttggcaggatcaagatatttcatctggtacagggctccattccagactcacattggccaacacaggaaaggagtccaagactgtccaggcttctttggaccagcagctgggaaggctccttagtgtctccctgaggctgggtgtggagccttctctgcagtcatctggaaacttgttggtgcgatttctttttcttggatgagtttgcagctcatttttttttaacctatccataatggctgtcatccctgtttaacacactctaattcagttagattcagtgagtcctgtcctgttgtaagaatggtgctggattttgcatttt

SEQ ID NO: 8338 - DNA, 2773 bp, Homo sapiens
ctgcagataacatactgatcacttaggagtttatatttagcaagttaaatattctttctatagattatatagtggatagattttagtaattaaagcacatttcaaaaaatagaagaaatgtttagcatatatgttttattacttgctgatcaattttctctatgctctttgcaggctttgttcttcctgttaagtggtgtactggtgatgaccggaagcatggccttgattgttttggattgggtacacaatgcacctggaggtggccattaattggcaccactcaaactcaaactcagtccatctgatgccagtgttgagtaaactcaactactatgaaatttcacctaatgttttcagtttcacttccttttgaagtgcagattcctcgctggttcttctgagtgcagaataagtgaacttttttgttttgttttgtttttttaagaaacttatctgtatgttagaaatggatatgaacaacaaaaccacgagtctcgggttaagggaagtgacaattttattccattccagagaatggacaaactcttaacttttatcaagccacatgcttggctgtgtcattgtttaacttggatattttatgattttacttgaatgtgcctaatggaaccatttgatgtgagaaacaattctttttaatttacagcaaaatattgaataaccattgacaaaaacactattattttttgtaccaaaaatacttaaagacctcagaagcactcttttacttttaagaaattgcttttttgaactttattcagaagcagttatcaataaattccataaaataatgtcattggtatttaaaaatgaatattaatataatgaaatggtttgcctttttgtaggcataataagccaaatacttttttacccaaaataatttttagagaaaatgatgtaatgaaaaattgtaccatgaattaggagcatagttttttccatttaaacgtcaccattacttaaaagatgattgattattgctataccaaatcagatgaactctgttcatcacttttcttctctgtccccaaacaatttggttcattcagactgaaatgtttgtgtcttcaacttattagaatggaagataatgcagatatttctgtgggaaataaaataactaattttgaggtaccaaatagtgcaattgggtaaaacagggtttattcagttgcatctgtctccagtgttgtattgacagctctgggtctttttttgggccagcccttttttgacattgcttccagcagtggaaaatgggcatttgatggcaataggccaaaattattgtgtccagagagtacactttttcaaaatgctcacctactggaagtgtgaattacttgacaatgtatggcttagttgtgttcatgttttgtctacagtagaggtctaatccacaggttacacctatgtttgatatgatataagttctctttgcgtaggccactgggtttctcatgcagtaagctttataaaaactcatttgcactggactgtcatctcattcttgtacaacgtagaattacttgtttacatccaacaaatggttagctagggaaaacagtgcaaactgagtgttagtagtcattttggtccaactgcatgtcaacccttccatttcaatcccagttagaaatgaaaataattactttgaaacttggctttaagagcacatttatcgtacgtcacagtgtatggtgaatatattattaaataatgtggtacttcgctcatcaggcataatgtctaaaatctaatatacataattccattaagtggttgaaggaagcaaataatggaattgtcaattggtcatctggctgtaaggtttgcccttgaactaaaaatgttgtttggggcaagggccagaaatgtggagacatggtttttgttacgcattcttgtattatatgtgactaaatttacaaacaagatacatgtgtaattaaagacccttatggaactggaagacgtcttgtagtgctacattgggtgaaaccgttggtccatttttgtctgtttctatgaagataaaataattgggggccatctagaaatagaaaggcagtgggaagacagattctacggcactgctttcatttaattgggctttaggcactccattcgaatgcagaacctcacctctagttgagaccaagaattggcaaatttgcatgagctcctggaaagagttgctgactttgtatctaagacctgccagggaataccaagagttgtttctacagacttttttttttttttttgtatgggagaagatactgtggcaaccaggaaggaatggaaaaaaaattcttttctctacagcaaattaatgtgaggaagctcctccaatcctctggctatttaaggttcaaaatcaagtgcctagggaaaattccaatggatgattttctgggagctatcttgtctaccttgaggttcctgaacaatgaattcccattaatgagcagtcttcagtattaaaaccactgtcttgtcacctcattttgcattactgtcttccgtggatgtttcagttacaactgtaatgttatttatagaacaacattaatccattaaagctaacctatttttcaatatttatgataatctatgtacatatattgtctgtccatatgtatttgtaaataggttgtatataatgtcaggtttgggtcttgggttcaagtgtatatattcctgtaagtttcttaactgcattttgatgaattcacattatgta

SEQ ID NO: 8339 - DNA, 1145 bp, Homo sapiens
tgtgtttgttttcatggtattcctatgaaatgagtcctgttagaagatgtgtatatttttcagaggatatttgtgactgttttgaccttgtttctgttttctttagattgtggtatctgaacgggaactatttggttctgttggtgtcattggtggtcattcttcctttgtcgctgtttagaaatttaggtgagcaaactcatctctaaagagaattgaaatgagcctctcaccagttagttgggctttctctgaatagaaattaatcagaatgaaaaagccctagaaagtagaaaggtatatctttgggacttacagcatgcaaaatttaggagccaaaatatttaattgacactatatgttgtgctttgtaagaaataatgcaaatgatagtttttattagcttgggttatgacaagtatatttaaataaatctataatttagtatcataagaattagaaatttagtgctatacacatactttagtgcctaaagtcttcccagcagaattgagttattcagtgggaaaaagatatttgccttaaatctgtttcattaaactaatactgattcctgccacccctccttataggatatttgggatataccagtggcctttccttgttgtgtatggtgttctttctgattgtggtgggtatgattttttttttagaaaaaattttttataagccctgccatgtcacttagtttaacacatgcaaaataatatatttttaggtcatttgcaagaaatttcaggttccgtgtcctgtggaagctgctttgataattaacgaaacaataaacaccaccttaacacagccaacagctcttgtacctgctttgtcacataacgtgactgaaaatgactcttgcagacctcactattttattttcaactcacaggtaactaaatatgcttattttctcaaaagaagagtttagggaagaaaagagggaagctattcactcccagggtaaagggaggaggataataggtgctttatagaaaacatgtgattagctaattattgaggactgtgaagaaagttttggtttacatctgaaaatagattgagaattgagataatcatatggtgctaataattgacacattcagaagtgaggatattgatcatacttc

SEQ ID NO: 8340 - DNA, 1116 bp, Homo sapiens
cagggtaggtataaattttgttttggcaaatcagaagctgaaaatcctaataagctccaaatcattttggtaaatcgacacagttcttaaggacctgtggccccttacgtgaataaggaaaagaaaatttctctaaacatacaaggtgtggtggtatttacccagcctggaacatgtttgttttaagacgaggaggtcataattttctggaccctgaaaagcaatccatacatgtttttttaatgtttgcttttgtcagacctgttcgattgccacatgttgtggcaaaaaatgaatactttagtaagtacttatttttaaatggttccccccacagttgcacagttagacttaattacttctgtgctttccagcataaatacgtggatagactcttggaggtacagaagacttcagagcagtggttcttagccatttttgcgtcactgactcttggagaatatgatagaaaaatgtggatcttatttccagggaaaaagcacaaaacaaaaatacatgcaatcttaagcatgtatttttcagtgatgtttgtgtcatagcccttaagtttaagtacccgtggacccctggctaaggcaatttctgtggaggattgtgtaacttaataccttcattgtacagataaggaaaccatatgtatatagcatggaattgtccctttgtgacagatgtgttttacttagctgattggtgccttctactcaagttattttctccagcacgatagaatgttcatgaaaagaaaagcagacctttgcaaatctctgctttgtgaaattccacactgaggttaagcctggctttgagtactagatgctaggattcactctggcttgcttcaattaggatgaggctttttgagagaactcttactaaggtgaaggaccagcgatttacgtagaatcctagaatctcaggagttcttagtggagaacctgaatggcatcactgtcgaatatttgaaatccttgttagcacttggtataaaaactggaggcagttttagagtgcagccagtgtagttaaagtaagaattgaaatgatactaaatggcacctctgtttcataagtgaaggtcaaattctgatgtaaccc

SEQ ID NO: 8341 - DNA, 1485 bp, Homo sapiens
gaattacaggctttaattttccttgtggttggaatattcttcatgattggaagcatggcactcattataattgactggatttatgatcctccaaattccaagcatcactaacacaaggaaaaatactttctttttctattggaaatggttacaagttatactccaaaagatatttgaattatcttgattggaatgttattcataggaaataacaggaagattccaaagacgtttaccagtaatatcaccaggcacctgcagaagaggaaaatcactgtttttgtcaaggatggttgtgtatgtgtttaaaataaaacctgtggtgcacatttctacccaggttttgctagagcagtgtgagatgatgaaggtgtatttttgctgctttacgagcagaataagggtaactgcatgtaacaatcatcagatagtactctttcccctgccgtctcctcatcctgcaccccctaaaaaagtaccaaacatttgcattctcagaacatcaaacaaaaatgccctggtggcaaagctatcaccatttaatgtcttctctcagtcttgcaccaaagtctctggtctgtttactaacagaggcaaaaggcatgtcttaggaactgtttctgtttctgtaaggtacatgaatggtcaaacaccagtctagagcatcttattgtcaacagcaaaataatattttgcccaccctgtttgtgacattgagttgtgacttctatattcaatagatttttgtaaatgttaaaacatctatatttaaatgttaaaacactaaatatagagaggggctttatttcaatcatagagcaacaacaaaaataatgcttatagctaaactgcctgttctagaaagcatctgctttttcatgttattcctaaatcctcttgtcatacttttgtcattgaacaatgctctccctctcgtcttccatcctcattcagaatttttagaagaccacaatcgtggagatacactacccagtattgtttgatacatttttatttgataaacattcagtgcaggaaactgtgatttgctatatgtttatgtatataatcttattctgtagtcatcagaatgttaatgtaaggtacatttgatttttattttttacatgtgtagttttctttcttcacagtcaaagcatttatattattgggggtgggggcagggaattaagttggtgggctcgaaaatccattcatatgtatctgtctacaaatgtctggggataatttaaatttgaaacctaagttatatatagtttggcaatgctcttcttcaatatttacaataataggatgatctacaagaaaataagtttctttttgcaaatttttatcatactaaagttgttcttttaatttagcatatctaaaataggatttagttcagtttagctcacacaggtgtttgctgacattcattggccatttaatacagtgttgagtggttctctgtaaaagtataag

SEQ ID NO: 8342 - DNA, 1235 bp, Homo sapiens
cacatttaggtcagtctgatcagtgcaaagtacctgagacatttactttggggaatcaggagagttggttatgtgaaaagaatgtgcaacaaacatcaactctggcagtgtgatgtatccatcactataataagaatatgctggccagggagcctgggtaaatccacttcttgttgcatgacttggacacacacaattcaagtttgcttgcaatcttaatgtgactttaaatatctctctttactccaaattatgctggacttacgtcatagcttaactctcaaagagcattctcactttccttatttctaggttttaaggaccatccctgtctcacctccatggactgtctacaatatgcatggtcaaaaagtagacccgttctgcaaccggacagcagagaaatgtgtctgtgatacccacacagtcaagaggcacacttaaaatagcatcagaccctaaaaaaagataggaaatgaccacagaccagtgggccagacagcacatgtatcctctgtccaggacccatggccactgttggcaggcctaccactgaggcaaatcctactaggaggtggaagtcatgaaaagagtttttccacattcctttctgtgatctacagtaaaaacctcagggagatattgaatcatctgctgttttttacaaccccaattaaacaaaattttctgcacctccttctccttccgcattcttccccccacccagtttccttcttcccccttttcgtcaatggagtggtgtggaggagggtaactgaagctaggttggggatttgttcccagaccacaggaattagaaacaatttaaacaaatgtttaaattatcaggatcctctttgtttctagcttaactaagaattgcaaacggtatctatgaaatttctctttttcacttcccatgtgctgtttccaatgcagtttcatgaagacacatacacaaaatcttctaaaatccttgtcttttcacatcacaccaaacagtaatactgttgattacacaggtaaaacttgcctcaaaagatgttttgtagtcgatatacattaaaccaaagcagagtattttggggacccttaacacctaatttttttttttttgttaatcaacactttcatgttttcttgaagctaatatcagtttaggtgcttatcactgtgcaaggcaatatgattctaatcaagccagcaaacgtaactaagaaggcctgctgcctgtt

SEQ ID NO: 8343 - DNA, 1099 bp, Homo sapiens
ccccttccccatggtctccctacccccaacctgcactgggcgctccgcccagaggtgagtccctcccagcccttctctccttctgtcctagccatccgcagagccatcctgtgcaaaggaaggagctaggctgtgcgccctgggcgtcatgatccttctgcgggcctccgaagtgcggcagctgcttcacaataagttcgtggtcatcctgggggactctgtgcatagggcagtatacaaggacctggtgcttctgctgcagaaggaccgcctgctcactcccgggcagcttagagcaaggggggagctgaacttcgaacaagatgagctggtggacggaggccagcggggccacatgcacaacggccttaactaccgtgaggtccgcgagttccgctccgaccaccatctggtacgtttttacttcctcacccgcgtgtactccgattacctccagaccatcttgaaagagctgcagtcgggcgagcacgcccccgacctggtcatcatgaattcctgcctctgggacatctccaggtatggtccgaactcctggagaagctacctggagaacctggagaacctgttccagtgcctgggccaggtgctgcccgagtcttgcctcctggtgtggaacacggccatgcctgtgggcgaggaagtcaccgggggttttcttccgcccaagctccggcggcagaaggccaccttcctgaaaaacgaagtggtcaaagccaacttccacagcgccaccgaggcacgtaaacataacttcgatgtactggacttgcatttccacttccgccacgcgagggagaacctgcactgggacggggtgcactggaatggacgtgtgcaccgctgcctctcccagctgctgctggcccacgtggccgacgcctggggtgtggagctgccccaccgccaccccgtgggcgagtggatcaagaagaaaaaacctggcccgagagtcgaagggccgccccaggccaacagaaatcacccggccttacctctgtccccacccttaccttcccccacataccgccccctgcttgggttcccaccccagcgcttgccgctgctcccgctcctgtcc

SEQ ID NO: 8344 - DNA, 2391 bp, Homo sapiens
gagtgcagtagtgcgatctcagctcactgcaacctccgcctcccaggttcaagcaattctcctgccttggcctctcaagtagctgggattacaggcatctgccaccatgcccggcaaatttttgtgtttttagtagagacagggttttgccatgttggccaggctggtctcgaactcctgatctcaggtgattcacccgcctcagccttccaaagtgctgggattataggtgtgagccaccgtgcccggcctggatctgttttcttagcacgcagtgaggaatctttgtacttaaggccagggcaacaaagtcaagaggtcaaggtgtagggccatgaggcctggacctatgctgcaggcaagggtttccatccccgctgccctaggcactctcttcccaaggccaggttgggcacctggggaggtcagttcagaaatatctagcagagacctcttaaacccccatcccagcaccccatcctgttgttcccagagctggtctcccatgagtgtgctagagccagatagccgtggccccccacccatctcactcacacacacaggcatccatacaccccagaagacttcccaaatgaggccagactcagggtcacggggaatgtgcttctgcccctgtaagggctttggggaagggggcaacatagtagaggctggaaagagcccccaaacctgtacccatgcccctccagccctgcgtttccattctgccttctcagagtgcccttgctgcacccagaccaccggccaggagagaccttctctcccactccagcccctctcactgcccttcaactagagctttcacctttttacatttcccttctgaaggacacaaatctgcttttctgcccatacactggcccaagggctcacctaacttgggagggaaggggctgttggtacaaggatgattttctgttagactgccattttgcacggtctcccccttcccatctgatgtgtcctgcccctcagctctttgccttatctgtgtcactgtcactttagcaaaaatacagcggccatttgtatcagcctctggtggttgcttgtgaggtgggactcttgcgggaacaggtggactttgggaggagtgggcagggagggagtggtagtggcagttctcgagctatctgattaagccattccgctagttcagttgtgccctggagggcaggggacagagtcagtatctctggggctgcaggccctcttgccttggccctcctggcatggggtaaccaccagctcagctctcctcctccagctttcctctctctagcacaccccagccagggcaaggatgcccacgggcatagctacagcaacccctgcgggatttggtgtccacacccgagaggccaggccagatgggaaagggattagcgcctcttccctcacactctgccaggctgccaggagcttgggccaggtctaaggtaatgaggtgctcctcttcctgctggaaaaaccggacagactcagaaccacaaaggcaggtgctgccagcctggcgccttcctctctgcttaggctgggtgagcttgtccaggcctgtgcctcaccccttctctcttctaggctcagtgtatgcttaatcaggcatggtgcatcagagcgggaaggagccatcaacagtgtatacttctggagccttctactgataaacagaggccccagaagacgatttgacttacctgagctcccagctgggacttaaacccaggtgtgtctgagtcacaactcttcggggatgccgtggtgagctggggctgagctcctgtattcccactcccccaccccacccccactcctgccatatcagggctggtctctgtggactcagcccagggctgcctcctctttgtcaccccaaagtggggcagccagggacagccagggtgtgttcagaatgggttcttcctgcagggcaggaagggcagattgttaaaggggctgcggcccagaccaccctggtccctcctccggcagtgactcagacccacactgtgccgtgcagctgtgtgccctgcacacccgcttgacggcgcactgctcacttctggggggccctttcagaggcacttttaaagcaaataaaacatttattgttcagatttttttccattttcttcctttttacaaaaacatgcatacatacacagggtatggtgggtcctaggaaagacacacacacacgcctcactcacacacacgctcacacacacgcctcactcacacacatgctcacacacattttccttcttgaccccaggcctggacccccaaaagccttgaagactttgccagagcagcctcccctcctccatgtctgtatcttctctcccaccccttccccctcagtcaggc

SEQ ID NO: 8345 - DNA, 1131 bp, Homo sapiens
agagtgtgaggggaagggcccctgctgggggtctgctcacagtccgtatgtggctgaagccactggtcttgggtccaggtcgctggccttggttcccccaagcccctcttgcataatcaggggagtcaccccgggaagccaggacacagaacatggaaggactgaaacctttcctggggcaggagtgttttggtattcgaaacccagactcaacccgaatgagaatccggatttcttgggaggcaatgtgaacaaggggtggggcatcaaagccatacattttctactgcgggcggcatctgggtgcacagccatcactgtccctccaggcctcttgatattcgggggacatggcgggcacctccttgctgggctcctgtcttgtgtccatgtcacagtcagggaatgttagagtgaatgccctttaatgacagcctactgcaaacccctctttgcttagtgagaaagccccttgaggggaggtgaattcctgaaagttggtgggaaactggagtacctgccttggtaggaccagaacccatgctagctctgcccctagcagggtgactttggacagggcccttcacctccgagcctcggtttccttatttaggataacaagatagtaatgactaccccccggggccagtggcttgatgtagctgctcatgcacaagtgctgtagatgtaaagattgtggttaggagtggccagcttgggcctggaggctatgatttctgactcctggactggtactttgccacaggcctttccagccctcctcagccccaatccctgaggacagtctgtggctgccccactgggagatgcccagcgttggaattgctgaaggaggcctctccaggaaggcttctccacttgtgtgccctcccatggggccggcctgctcctaccccacccacttccccttctccaggataagcccgctgcaacagctccgtctcccagtgtctcagcctctctggctgctcagcccagcctggtccagctggctatgctggcatggaccctagtctggtggccagttataaatagcccctgcacccacagccttggcagggtgctcctagtgtgggtgcagaggacacttgagaagaggcagccgtgcct

SEQ ID NO: 8346 - DNA, 1109 bp, Homo sapiens
agagtggctaggaggctttgagctgggacctcgaggaaatgttattgtgagctgtctctttggcctgtcagggagatggtagggataattccaattatgtgaatggttggaccacgtgtccaggggtcttatcaaactctaagattctggaatggtattaagtgccacaatgttgctgggaagaggaagtcaaggcagagattcaaagttaaatttttaaggccactggcttagcactggcttggttttagagttaaggcgacaagaccttagctgcagaattttctccattccaatctaaggagtagccatcaattccttacttctggagattgccttatcctttgcagaacacaagtgctaggaaaggaaaaagtgtgggagagtggcacacaagaagtccagagtccagtccactggagacccctcattcaatttacttttattcttttcacaaatacctactgagtaatcgtacgcaaatcctatctctttgatgccttccctgatcacatgatcttaatatctctcatctggacatctgcagcccttataatcagaaaataatataagtccacatggtatttgtattgtaattcaccttttgcatcatgaatggactgagacatgtagccaccaagggcaggtaaatgatttggtgcttttttttcaaaccaggaataaaagctgtttctttctggcctgccagtgatgaggtagaggtaattattcaacatttatttagaaagacaacattgtgggccaggcatagtggctcacacctgtaatcccagcacattgggaggctgaggtgggaggatcccttgagcccaagagttcgagatcagcctgggcaacacaaaaatttaaaaaaaatatattgtgaagaaaggaggactgctcatggcagcctgcaacctcctttgtggtcccaaatcgttcatctctggcctcaaacctaacgctccactctacccttaacaaaaacaccttcctcagcatttagcatgctctttggggtgggtgggggttctcagtctctaccaggggccttgtggaagtattttctctacacagctttctgttaaatagtttcctccatccttttt

SEQ ID NO: 8347 - DNA, 1877 bp, Homo sapiens
ctatccggaggcacagcacatgagccctggacaggtcccaaagttccaagcagtcctttccgtgaaagcaggggtttgcatgtgctaccaacacatgatacggggaagacccacccagggagcggtttcagtggcgcaacaaagcaccacttttactgttgcctacttctgaccaagaagaaaaaggaccttagtatttagcataaaattccagcgctggatgaatgcagatctagtttggtctgtggctagtttaaatatgtttctaaccacagagaatttcatatatatatacatatatatatacacatacatatatatatatatatatgtatgtataaaatttcacagggatatgcttttttttttaaagactgaatgtgttcaccatttagcctgtagatttatttccattttccaaattccagcacacagagatcccagcccctatgagtagggtgtttgtggactacctaatggaatatttttgaggcctggatgaactttgccatatgggtagaggttacagagggaggtgatattttcagctaaaaaaaaaaacgggtggagtttggactgatcaacttgagatttaaaaactgctattccttttgttctttctagcatctctccccaccctctgagagctcctcaggcttagatagtgaagtgatcaaatgccagtgtcattttgtacttaagttccaaagtaggaacattttatacttttttctgtattgtaataggtagttttgtatgaaatcttttctcctctcccgttgtaccgcattctttccagcattgtgctttttccctgggcttatttgaaaattttactgttttatacaagctcgtttagtacatttttctatgttttaccacaagttacaatttgaaaagaaaactattttttttaaatattccattgttaactgaatgttactgtttccactccagcaactacatgtcctcccttcaactgcctgccttttggggaaagaccaccttttgtgtgtttgttttttctctctctttctttccctttctctttctatctctctttatttttctttctttttctttgtttttgagttttctataggaaataaatagctttctatatatgagttgctggggaccttcacattctcttttagaaagctgtggcatgcagtctcattgcaggactcctggaatattgtctggttcttggtatttactgtatgtaagcaacaacttgaaaggtggcaatatggtgtcgatttggactatgaatcaaaagacctttttcaggttctttcactattgtctgggggactcagaacaagattgttctctgtatttattgtttgtccatttaggtaacatctgtcttaccttcctcacagactttgtacagaccaaagcaacaaatatttattgccatgtatagcagaaaatgaaacatgcaacaaaagcactttgaaaaatatataaggaattgttgagcctgtctgaatttgggccccctttctgactaatgcagttttgcacaaggtagaagttagtgaccctgagaccatcttaccaccctggacctggtccaaatacagacttacacagtggaccattctttcctgagctagccaacaagagcaggagtagtatctggaaactttcccctttgtttaggggtaggctttgatgaccaggaaaaaaaaaaaggtatttctgcattttatggcccaaaggcatgttattaatatcttatgtaatttactttaaactaaataagacttttttctcctgtgttcccctttctcctgtgtccactgctcatattcacctgccttccctaaaaaaggaatatttgagggatgataagcactagatgccag

SEQ ID NO: 8348 - DNA, 1311 bp, Homo sapiens
gctgggaccacaggcatgtgccactacagccagttggtttttttttttaagttttcttttgtagagttggggtctcactatgttgactgggctggttttgaacttctagcctcaaatgatcctccccgcttgtcctcccaaagtgctggaattacaggcatgagccactgtgttaggcccataattcttaattatcttaaggattctgcctgagctttggcagagctaggattctgtttacatgctagtttgagaaatacttgccttattggatgtgtttaaactgttttttttttttgttttcttatagacagttcaagaagaagaaagagagatttacagacagctgctacagatggtcacagggaaacagtttactatagccaaacccaccacacattttcctttacacctgtgagtcacagaagcatatttcagatgaatttaattctacaatttattacttgatattgaaacaatattcttctcttgctaggtctcgatgtcttagttccagtaaaaatactttgaaagactcactgtttaaaaatggaaactcttgtgcatctcagatcattggctctgatacttcatcatctggatctgccagcattttaactaaccaggaacagctgtcccacagtgtatattccctatcttcttataccccagatgttgcatttggatccaaagattctggtactcttcatcatccccatcatcaccactctgttccacatcagccagataacttagcagcttcaaatacacaatctgaaggtaaacatggtatcatataactacatttttagtcctaatagccaattaactgttcattagctcattacaggcaacattgtaatatacatataaataaatgagcataccgaatctgaaaatatgaagtccgaaatgttccaaaatctgaaactttttgaataccaacatgatactcaggaaatgctcagtggagcatttgggattttggatgtttggatttgggatgctcaaattgtataatgcaaatattcaaaagtccaaaaaatccaaaatttgaaactcctggtcccaaccattttggataagggatactgaacttgtaagacatgtacttacatactttaaatacatatgattcagttaaccatgctgtgagtaaactaaatccacaaataggatattctttttttcttacctcaagatgcaaatgatttgatacattttatttaaacaacttcctaagtacaggctagagtcaaagtatatatactcagcccaattgcttcagcactttctctgtttctatgactt

SEQ ID NO: 8349 - DNA, 1216 bp, Homo sapiens
ttgagatggagttttgctcttgttgcccaggctggagtgcagtggcacgatcttggcccactgcaacctctgcctcccagggtcaagcaattctcctgcctcagcctcccgagtagctgggattacaggtacccgccaccatgcctggctaatttttgtatttctggtagagacagggtttcaccatgttggccaggctggtcttgaactcctgaccccgtgatccacccgcctcaacctcccaaagtgctgggattacaggtgtgagccaccacacctgacctgctggctaatttttaaatttttttgtagagacagggtcttactatgttgcctagatagatcttgaacttttggcctcaaaaaaatcctcctgcctcagcctctcagagtgctgggattacaggcatgagacaccatgcctgggtgggaattgtttttattaggtgaaaagattggttcataggaaaaacgttattgaagaattatgtgacttgaactaatccagactgtctccccagatgatattgctgataggatgaggatggatgctggagaagtgactttagtgaaccacaactccgtattcaaaacccacctcctgccacaaacaggttttccagaggaccagctttcgctttctgaccagcaggttaggagcaattttcttcctttaattaattaattatttgggctcatcataagttttcatcttatgtagtttaaatgccacactcaaaaatacaagcatagctataaactttttagaatcagtaattttagtgtttggaattctgctctatatattaaaattaagacaaggacgttaagacaaaataggctatgtatgagttctttgagaacagtacgttttagaaaactcattgttcctctgaattttaaaattacttatatgcagatcagtgttcttttaaactagcacctaaaattgctgagcattaaatgggggagaaatgtgaaaatatacagcagctctaagatgtctgtgctataatgcctgatttctcaaggtctagttcgggaccagcagcatcaacattacttgggagcttgatagaaatgcagactctcaggctttacctcatatcactgaatcagaatttatattttaaaaacatcctcatttgatttatatgcacatgaaagtgtggggagcactattaagcagtctttttcaataggaaagccattagta

SEQ ID NO: 8350 - DNA, 1070 bp, Homo sapiens
ctccgtttctactttgtgtttctgtgaattttcctagaattttttttttttttgagacagggtctggctctgccacccaggttagagtgcagaggtgcagtctcggctcactgcagcctctgcgtcccaagcttgagggatcctcccacctcaacctccagagtagctgggactacaggtgtgtgccaccgcgcctggcttatttttgcagtttttgtagagacggggtttcaccatgttgcccaggctggtcttgaactcctgggctcaagtgatatgcctaccttggcctcccaaagtgctgggattagaggtgtggtggccagaattttgttttttaatctactgtattggtctatgttttacacttggcagcaaaagctctcagtgcttttggatcttgtttcatttgttggacgctcttgtaaaattttttttttattaaaggtaggctagggttgagggagacagcagagtattgctttaaagtttgctgaaaaacatgccaactttattactgtttcccttggtattgctgatgggcttttctcttttttctaggacttggatgttgtgggtgatggtatgcagtgtcctccttcacctttgctttttgatccttcactaacccttgaagatcatttagtcaaagaaattgctgaagacccagtggatattttggcaagtgaagaacagtcccacctgtttccctcatgtagtgacctggccaggcagagggttccctgctagatagcatgtgctcctggaggggagtggggtgtcatcactagtataaagatgctccacatgtctctcacttattgaataccatataagcaaagcacttttaaaaatgccctactctgctcctgtgtacccttgttgctgtagttctccagatgggctcttagaacacctaatggcccgtgatcctcatatcccagagtaggacatacatttatttaaataaaagcttgagacaaggaatctagggaaatcataccttctgagggagagttcatcactgaaattgttctcattgtagaaggaccagtaaagtaatgtgattt

SEQ ID NO: 8351 - DNA, 1210 bp, Homo sapiens
aatacaaattttattcttttggtcttgggagaatttaagcagtctatgcaactcatcaaatggtgagaaatagccctccgaggttccagtaagctttcagtgactttgatacctccccaagtttcttgagttgctgcttgttaacacccagcttttaactgagtgtttgctcctgatggtttaggagattttcatgttgtatcacactgtcaagttttattttgtctttttatccctccgtggatgtgagtttgaaacaagcacggtacagtaatcctgcctgatagagtagtctggaatgagaattactttttgggtgagagagttctccattttaatgtttctaaagtttttcatatgaacttggcattggaaaagggaggtaaagaaaaaggacgtttactaaaagcagtgtctactcttcccctttgtgagtgtttattcatggctaatgaaaaaaagagaaggactcttgggttttgtgttgccatgttaagcatggagagggatgcttgacagcatgctaattgaagccagagcaagtatgtccttcatcaggtaatcaggaactcttcagttgaagctgaggaactaactgattagttgttgatcataatataattggttacaaagtggaagtgccagctggcttaagtacccaaagaaaagaatgcagcagcctaacttagtgttaccatatgttactgaatttgaaactgaccttttttcccaccctacttcacacacctaaaactcttttcttgtcagaccaaagagcgaaaagaaaaaaaaaagtaaaacactttaccaatctgtcactcaggtacaattttgtggtgagatttttgtctgttctctttgtattgctcttaagagtcctttctcagcatattattctgccattgcctctgtcttccttggggcacctcagctctggatgctacccctgggatatctactgctgttatgtgaatgataggaggtaagtgaccattatagtaagggctctttgtaaaaaaattcaaaaaatttaaaaaggatgtatacattttatagtctggctatcagtttgatatcttgctgtcaagtatgtttctcaatctgtatttatccatcccatcaataaatgttaatggtaaaacactcatttgattgttgtttatgtgtactgtcctcaaattagtccttagtctttttttttttttttttg

SEQ ID NO: 8352 - DNA, 1189 bp, Homo sapiens
caaagcctagccaatggatactattgtgtttagattgttcatctttggtagctttaggttcttgatcgaggttcttaagatttctaagtcctttataaaaataggtcaagagtcctgttgttatggaggcttgattatcccagatattaggagtgaacatttttaataaatctttcagaaaatcttggctagaaagaattctaagttagttgtctaaccactgaaaactacctagccagagatcatttaatgagatattctttgatcttcattgcattttttttgctctggaaaaggtggttcaatttgagtttgttttcatgatttgattgcagcttacttcatgccaaggattttttagggagaggtcgaattatttttcatttggaagtcatagggagacaggagttgtacttatgctgctacttgccaggaacaggttgggaagaaaattgtggctgttggaattgatgatgtactggcctaatatagaaaggaatttgtaggcaggagtaaacgttaactgacggtgggttagtgccctgcatcttgcatatttgaactgtctagagttcctgccattgctgggtataaaacgaggagctctctgttgacctgtaaatcattaatacttcttgacttagagtgtcacttcactttatagatgacattttcctctttccccttgatattttctatgttgtgttagataattggtagatatatagttgtggtttagtacatttagggcttctatttatttagattttgtttgttggagtctgtttccaaaagggaatgtgccatttagtctgcatctgtatctttgtggacttgatgatcactggtttgattttgaaaaatgtcttttccagcttttagttactctcatcaaatgtcacatattttctaatcacatgcactcctttaccacagaggcacataatcatttggcctcatagcagttatccatggccgtactgtagtaaagttccttagaactttgccaggagtgaactagaaaaaagtgcttactagggcctaagagttgctttgtgccgtgtagtccggcctttgcactagtagatcattgctgacataggtcagtttagagacctttctgtgttaatgcctcctggtactgtcttaagatacgtacagtgtctgtttttagatctatgcatatgtc

SEQ ID NO: 8353 - DNA, 1983 bp, Homo sapiens
gccagggctggggcagtgccagactctgatctgaggaccccgtcggggtccagatcaggtcactctgccccagtgctctcttgctgtctgctgacaagggggcatggagcatctcttcctcttctgttgccaaatagaaaagggtcagggcatggagaaaggtgaccctgatcccaaacctgccctcccaagtctctggtgttggggagggcccgtgtgtttgtgtaactgtgtgtgcatgttggtctttgtgtgcatatctgttttccaggtctatgtgagtccttgtgctcctgctcctcagctctccaccccaggttgcctctctcctgtgggcctctgtcttctgggaataaagcagggtttcctacttcaggggatgtagagagatgcccaggttgcacaggagtgggatggggtgtggtagcaaaaggagggagaggagtcctttttgtgccaaatccctaagtgccgttcgggggccatgtgtgcagcatgactctccctgtctgtggcagggacccaagcgcttgcttaagccccagtgctccatgccagcacttgaactgtctggggtttgatggacagaggctgaggaatttcctggcttccccagatagtgtcctgggacatggtatgctttggggctggggtagcatggaatccctctgaggacctggatactggtactacggggtggggaagaggaaccttaaacttggctttccccagccttcagcctgagtctagcatgtttctagctccccagtcccttgtgaagccttgagggctggcagaagggttaggaggttgaactctagattcccttcctgtctttgccttccttttacccctttccctgcaacctccttgactctggcctgaatttgttggtgcctcagtttctctgtctgtacctatttaagccaaaggcactagcctgaattttgcttgaagatcactttgtcttggaaatgactagagaggcagaggagaagggtttccagagttgctaggtttgggagtggaaggggcaggcagtgcacttgcccctcctcatgccccttctgacaccagctccctgtggaggcctggtttctgggtaatgcctcccttgggcatcttcatgcatcaaccaaatgggccatcaggtacttcattagtcatggcagaaggaggggaaaagacttgttttccagacagaaaatctactcccctgtccccagccatatccctggataggaagggataggaagagactacttggtgccatggggtaggggtgagggtataagtagatcagagtgggaagacctcagccttgggtggcttgtctctgcttcttgccaggtgggagggcctgtccacaccctggatccccgtaccacagtgccagccatgcccttcccctgggctaccattgtccctttcctcacccagttggtagaggagtcaggaggtgggaggccgtgggctttggttttataatgtaaccactgtgggggtgggggaggatggtgaaccatgtatttcagtgaaatatttaatatatttaaatatcaataaaatcaaactctttgtaaaattctctgttctctgtagctgttctgggccctgggtgggtcagaagtgacagagcctggtgtaggaggcgacctcctgccccagggctccgtgggcctcttgtctgtggtcagaggacttcctgtggctttctccctgctaaggagaagctgcagtatcttcagagtgtgactactcaaggcctttcagcatcatgagctccagtgtgtgccttcccagatttgtgtgtgacccctgccatgcatgaagccggcggttctttccagtgccttggcccctcacagacctctcactccaaggtctggcttattcaggaatctcccacacagcagctctcacaacaatctggacactggaatcactcccatcctgaccccacagctccccccgtgcacacaa

SEQ ID NO: 8354 - DNA, 1671 bp, Homo sapiens
tccaagatgtgtctatggttgtcaactatgatatggccaaaaatattgaaggtaagttccagggaaagcagcttcaatccagggtgaagtcagattccttatggtgtcccactggaagtcagggtgctgtccatggaaggctgttactgcctccctcagttccaagtctgggattgcttgctcccatgagaagcactcctgtcctttatcttacctgggtttgttgtcccagcagctgggatgacacttgtgtcctcaggagtgtgaagaatgaagctaggcagctgtgggtcttagtgtggtagggaccacagtcagtaggaggacaggggagatgggcacctggagagggcactgtgggcgcctcaggttcaggcagcatgtgctgtattcctgcctttggagatggggtgggaaggatgcctctagaagtggaggcatcagacacggctccccagggcatctgggctatgctgagtgacgttcttcccattccccagattacatccaccgcattggccgcacgggacgagcaggcaagagtggggtggccatcaccttcctcacaaaagaggactctgctgtgttctacgagctgaagcaagctatcctggaaagcccagtgtcttcctgtccccccgaactagccaaccacccagatgcccagcataagccaggcaccatcctcaccaagaagcgccgggaagagaccatctttgcctgacacagcactcttcctgtgggctgagggcatctccaaagctgcctgatgcctgtttttcagaaccctcacatccctctttccaggtcctcactcttgggatatgggggcttaggaaaacaatccaactccctagcccagaccctcaggtcaggaggcctgcgtgtggggctgcaaaaggagaggacgacgctgtcggaggcagggagagcaaattaccacagcttcttggcccagttctgcccttctttgctttgggattgcactgggccatcagctcatgccaggctatgggggcagccagttggcattgctccccagactgaacagaaacctggccgccggatgggacctcctttggcacagacttgactgtgtaactgcataaactgcagtagcatcattgccctagatgccccaggagacctggcaccatgaggattacagacagtggaatcttactgtcatctggacagctgttttcctgtttggatggtaaaggaagttgagagtctttagacctgtgcacagccccgcaccaaggggtgctgtatgctctaggcatcccctcccccaggggattttctaagtagatggggggacacggtgaactggctgtgtccatctttgtcactgagtgaaatctctgttttctattctctgagaagataagtttgtatgttctgagaataaatacatgaatattaagactgttagatctagttctagttaaacttcccagcttctccctggcaggagggacaccactgggtgcggggtgggttggcttggaaaatgagagacagccacattaagagaagagtagaggggtctctgctgatagtcttgagtctgtaggtggacttgagaggagatgcagaagccacgcaggactgtaatgcatcttccgcccctgctctagcctcgcgtaatgtgtggccctggcctgg

SEQ ID NO: 8355 - DNA, 1180 bp, Homo sapiens
attctacttactcctcacaccctgctccagggcaagactccgcaaacttcgtaagaaggaagccaagcagcgctgggatgatcgtcattggtctcagaaaaagttagatgagatgacggacagggactggcggatcttccgtgaggactacagcatcaccaccaaaggtggcaagatccccaatcccatccgatcctggaaagactcttctctgcccccacacatcttggaggtcattgataagtgtggctacaaggtaaggagggatagattggcccaagagatctgacatgttcctacactagtttgggaatagagaactttgttccttgactatttggagccatcgctgctagtgggcaccaatgtgaccttttctgtcactttctggtagaagtgttggcttttagtgattaggtttcttcttggggtccctatttctgtgaactgtacttggcatccttccattgtgctagcagatgtgcttactactatcagtggttgcccaggtggtataactctccctgtacctattactctttcttggggtcactgcaggaaccaacacctatacagcgtcaggcaattcccattgggctacagaatcgtgacatcattggtgtggctgagactggcagtggcaagacagcagccttcctcatccctctgctggtctggatcaccacacttcccaaaattgacaggtgaggtcagctagcaccagctggagtgggtttgtctgggtaggaaaggtgaaagtggcaaatgaatgtttgatttttgttttacgtctataatcagaagctttcttctttattctttgttggatattagggaataattggatcatgatatcgaagaagtatatgttgctggcaaagacctggagaactttgctatcctggagtctctgatttattttatttatttttttgaggcagagtctcactctgtcacccaggctggagtgcagtggcacgatctcagctcactacaacttttgcctcccaggttcaggtgattctcctgcttcatcctcctgagtagctggggattacaggcgtgtgccaccacttctagctaatttttggttttttgttttgttttgttttttgagacggagtttcgctcttgttgcccaggctggagtgcaatggcgcaatctcggctcactgcaacc

SEQ ID NO: 8356 - DNA, 1221 bp, Homo sapiens
tttggagacacgcttcacatacactacacggtgaggggtctggggggccggggcggggcctgggagggggcggcgccctgctgaaacacgtcagctttggcttggacacgtggcaagcggttcgggagaagaaactcggggctctggggtcgtcgagcacgtggcgaggggagagacgttgctcttccgtgcctcttttccctccttgcttttctgccagttcctacctggcacggagaagtgcagggtggagagatctccgagaagcgccagccttctggggcttcctgttccttacagcggtaaggggaacgctaggctgccgcactaagggggctgccgccgcccagcggtccaggtgtgtgttgcgcgcctgctgggagggagagggtgctagatgtatgctcttgatgctctctccccccagggaagcttggtagatggacgtattattgacacctccctgaccagagaccctctggttatagaacttggccaaaagcaggtgattccaggtatgtgacctgtgcctcccattccacctcttcccaacctaagccctttcttagcctcttcggctccaaagctgccctggaaatcccccctgaaatgagtaagaccctagggctctacgagttacctcctgaggttcaaacctcacttctagtactccacttgtcccatatcctattggaagccagagatttaagaagtgagggaaaggtcaattgaggatggaggaggaagactttgatcttcatgtcatgggatttggggaaggtggatagcttccagttcagttgtgtcttcttcttcaaggtctggagcagagtcttctcgacatgtgtgtggggtgagtatctcggcaggggtgggcctgggtaccccctttgcatgggtagaggctttctcggccatcctcactccttaagcaggagaatgtggaataaaggaccctgcttcccactggacaggtccaggtcagtgggacctctgagggcattcaaagcctctgtgcctcttgcgctgttgcttttgtcgggggagttgaggcacatggggagatggacacctttgctggccagcctgtttggtgttcaggtggaaaaattcgtgttttgggtgtgaagattcagggggttttgctgaaggagcttcagctggactgaggctgctggcctacctctcctgcctctggctgtgactgacattccttccctc

SEQ ID NO: 8357 - DNA, 4701 bp, Homo sapiens
cgtctcttgcttccccaccatcctcgtatttggtttccaattcttcagtacagtgacctctagtgctttggatcttgagttctaggtgactaaatccaaagtagctccttaggatcttgttctgggtttcctaaaataaaggaggaggggaaggtgctggtacacatttctttggtagatgggtgttctagaagcctttaaaaaatcctgaggcttctttttatgtgtctcccacgtgctccaggatctgcctaatgctatgaacgctgctgagatcacagacaagctgggcctgcattcccttcgtcaccgtaactggtacattcaggccacctgtgccaccagcggggacgggctgtacgaaggcctggactggctggccaatcagctcaaaaacaagaagtgaaagccagacagccctaacaaagcaccccacccacccctgacatacctactgtcaccctgccccagtcctaccccttcctctccatgcaagtgtggccagggccctgggtatcatgtccacatgcccagcaagagccttgcctcccctgcctcccctcctttttcctgtccacctatatgaccaatccctaattgctgtcctgatgatgagtcattccaatttactggatttaaaacaaaaagttgttacggtttcatggggtggcccctctctctctcaccctctgggtttcgggaggtcgagtggggtattctctttgtttggcagtggttgctgtcctcttggcatctgagtcctttccctgtccccacaagcccttctactccctgtttgcctttcctttgccaccctctccctgttttacatggaaattgcacgggcctctctgtgtttgcgtgcatgtgtgcgcctgtatatacatgtatagagagatatatttgtgggggccggggggagcggggagggggtggagtgaagctcagggcttgcagccaggacactgcccactggagcctgtcatctgccccttccgtgttggtgagattaagggaagaaggtgggagggcattagtcaagccggactgccccagtctttgactggttaccctcctctctgcaggtaggtttttctggatgataggacagatgatggattcttcaccaccattttccttgtactcttctctccacccttcttagggctggaggatggcatttatctctagatgactgttcccaaggagatgccactctgctctgccttactgttgggaaggagagaggaacccactcactcttatcagcttagagtgttcaactgatccttccccaccatcttcagatctgttcctctggagcttgactggggggtggggatggcaagtccatggtgtgtgttagggacccagggcattgggggaagggaggcgaaggcctgaggttttccatcttcattctcttttgttattaggagaaggtgaggcatgggccaatcccattcctgccttccagtgccccaccacccttctgatcttaggggttggatgggtcatctgtccttggtcagaattttctcaccctagtactcctactggcctgaccagggctgactgggtattctaatgaggagctgggaagtggggtgacatagctgaccttagtatcaacccccctcttctccaactcttgttttctagtccaggatatgctaaaggacgaagattttctattgtttccaggccctcagaccatccttgctgtcccttcaccctccatgcccctgccatcctcactcacttctcataaatggatctgggggttagagtggaggaaataaaatcctgaagtggttgtcagtgcttgtgggatgcagtggtcttcaggattctccccgcattattatgtagttgttcagaagctgttgctactgcgtctctctgtctgcagggggcacttgttcctgaggtcctcgcctgggtcctgacttctgtagtttctgtgaagacgtggctgtcctgtgggctcctgtgtgtgctggctgcgccctgagctccgagacagctgcccataacctgctaaggtcagggcccagggccccccacagcatggctgagggaccccttcccagtagggctgtcccaagccccactccatggggccaggtttcctggccacttttgttgatagcagatggatcaatattagtaaccccatccaagattgaactgtgaaagagaggttccaggggtatctccctcagtgccagttacttagtgatgtgttacccaggatgcagcaggtgtgtgcaggtatcttgctctctaggcctgtgtgtgtgtgtgagtgtgtgtgtatatgggtgtgggtgtgtttgtgtgtggtggttgtggggggggtgttggaggttctatttcatttaaaaatgtattcatttccctggccccacagatgcttccctccatactttttatttgctctgtttcctcagatttattttgtcttgccccattgcctctccttccttgaactctttccttttcaatctcaactcattcactgctgttgctcatttgcccttttccatgtattttttcctacttaggattttccactctatctttgtggttcatgaggactttgcctcttctcctgcctcattccctgactttctctagttagatgtcagtcctaaataggttttcctcacttcaggcctcacccctcaccttgtttttttgggggctccagggaccaatctggggctggaaatgttaggaggttgccttggtgctgccccagatctgtccagcagggggcagtaagtgatcttggtagtatccctggctgctaagcccttggcaggggtggtcctttctacattcccattcacttaacagctcttttgggattgggtgtttcattccatttctgcccactccctctcctctcctctctggtaggtttaattttatgctttccctgattccagctttctgcttcctgaggactcccgctccccccaccccaaagtttgtctgtggtgttatagtggtaactgcagttcctcctctggaatgtagactgtatatgtttaataactcaccttctctatccttgctcaaaatgtgggataacgcgatgactgtgaccctggttggaaattaaacttgttttatgcagctttggagccgaccttcatctttgctgtgcagcagccgtgggacagtagtttcatggtgaggggagtcctgtttctggtccctctctccatagtgctccttctttcagcaaaggggtaaaaggcacacttgattgatagagagtaaggttatggaggaacttagtgccactccacactggttatttcttcccatcataccccgcggcgggggagcccaaatgaattgggcatcagagtgtgagggcttcgtgactttcctcctctagttctaaagggtttaaacctgaaatcagctgtatttctcacctgttggtagactgtatggacttcactggctgaagggccctgaacttggagggccccatgtgcctctactctcagatctcctcagccttgcacatgaggtgcttctagtttgaacagagaccccctcactagtctagttctggactttggcagtgaataaacatgaaggataaacgtctgggcagtgtaatgaccttaatccttcttacaactgatggccctgcatcagctctacttcaggcgtgtggtttttcattgtcaggatgccaagcctcatccagagatcccacaaatgtcttgaggaatagaccttttccataaagcctccatcctcccatcgcactcccaccactattctgttcctcccctgctaccagtgtctggctccaggcaaagaaagggatggtgctacctttagggtgggtgaggtctgggtgagccaggcaagccttccccaatcttaatattttcttaagctttgaggacagaggtcttcccagcctgcttttgtgggaaagggataggatttaggcatataataagtttgagagccccaagtaccagtgtgaagcatataatttatattcagttacttccctgctgcctcccctgccaattttccttttcagcacttctattattaataggccatcaccctcaaggaccagtgcttccacccatatataactctcaaactactccaaccagacatgtcttatcaatcccaatgactttgaacattacccacctactcctcaagatcagatgacactttcctccttccaggcttctccaaagttctgcttggtgacagggtgctgataagagtatctttcccaagtgttttctttcttcttcttctttttttttttttttttttttgagacggaatttggtcttgttgcccaggctggagggcaatggcacgatatcggctcaccacagcctctcctcctgggctcccgggttcaagcaattctcctgcttcagcctcctgaggagctgggattacaggcatgcgccaccacacccggctaattttgtatttttagtagagatgggtttctccatgttagtgagactggtcttgaactcctgacctcaggtgatctgcccacctcagcctcccaaagtgctaggattacaggcgtgagccaccacgcccggccaggtgttttatttctatattagcaaatagatatctttcagagctacaacctctcataatgataagggagaggactttagc

SEQ ID NO: 8358 - DNA, 2590 bp, Homo sapiens
gacagaagcagccattgggcatctcaggtttgagggggatatgggccgggaactacccagaagcatctgggaggcagcagggtgggggaagaggatgtgtggccgggcctcacagccctgctgctcccactgacctctccggcccaactcacggctgcaaagagacttgactaagcttgacaatcccaaaggccgggtcccacacctggccctgcctgccgggtcctgcccccaccctcacccccatccccctccctcttgatctgtctctgtttccctcttttcctctgtgtttctgtctctctatgggttgtgtttccttgttttccactctgacaaatgcaacatgaacgggaaagaggcgcccagctgcctaggagggcaagctgggcaagccgggcaaggagaccccgcacccacacctacctcatttaagtgttggattttttgctgttttgaaatgtgagaccctctccaagccccctactgccccaaccctctcccccacctcactgccctcttctgagtgggtggaaggggggtaggaggaggaagaaaaacaacaacaaaaaatccatctttgtttttaattatgggcatgggatggtggttgaggcaaatgatgatgaagattggggatgactggcccctagttgctctaggacttccttctccatctggacatgggggcaggagggagctaaacctaggaccaggatatctccctcctgttttcccaacctcatcatgagcctgtttgccctccagcccctggacgggttgggtggggggtagggtgagggctatccctgagtggcatgcccatacctagtgaggcagggtgtggcccggagctcccactttccctcagtcaccaaactgctgctggtctggtgggaaggggtggtgatgtgggggtgggggagcttagtgtcagcgcggggagggtggggggtatttatctatttatacatgggattgtacatagtcttgtggggcatgggggagccggctggaggtgagaaccctcccctctccccccaccccccggggagagcaaatgtaaaactactaatttttgtgctttatatattctatataaatatatctattttctttttacaaaaccagtttataaatggtaggggggtgtggggcggacacatggagctccccttgtgggggggccccctccattacccgacctaccgcccttttcctcaccccccaccccactccccaccccctggctgtgactgctgtaagatgggggtatagaggctgggcaattcccaccccctgttgtatagttggactatgttataacgcacaaaagagagctgaccccagggggagccagagggtgatgggttccttgcctccctttccttcccctttctgcccaagcttgtgctgcagttgaacctcttcctgggggtgggagtaggtaaggggtgggtgaggccccaaacccctctctggtagggaaccgtggggatgaagatgaagcttatatgcagttctcttctaggggctgtgggcaaagggcattttgtaattaatattttcaagaatcagatgtctggagtgtaggggtgggcttggtggtggtggacgggcgggcctgctggagggggagcttggtcgctgttgtgattttaggtttgtttttgttttgttttgaatttggggggttgtggattgttgggggtagggagattttttttttttaaagctgcttcctcaactgtttcaagctgcaaatgtttaagagaataacagcccccactcccacaggaaccgctgtaattaaatcagacagtaggaagactgggctgctgccctcaaagccacagcccttggatgttccttttccgagagcagaaggtctaggctacagggagggggagattggctcccgtgagtcaggctgtgtttggggcttgggccctgggattgggaaaaggggatggggcagactttgtaagcatatgctaggtatccgatagtcctgtagaatttagtgaagaaaccttatacagtttttaatttttatataaactataactcagacccaagctacaaggttggaattttggttggttttttttttaagtaccctgcctgtataattgcatcagaatcccccaccccaccccccgcccccgtgtttgtattttgggttggtttacactcgcacatactcagttttcagttttcccctttacagtcttctcccctcacctccaggaccctccccctttttaaaaaataaatcgctgacaagtgtgaatcccgtgaagactttattttgtgttgtgtgtatcctgtacagcaaggttggtccttcgtaacaacggatgaaatggttcccttttttaaagcgccctctctccctccaccctcagcgcccctgtccttggcatgttttgtatcagcgatcattctgaactgtacatatttatgttgcgagaggcaaagggcaagttttggattttgcttcttccaagtttgtttttaaacgacaaataaaaaaagaacattttaaatacaagcggctccgtcccatgaccctcgccgtcagccggat

SEQ ID NO: 8359 - DNA, 1105 bp, Homo sapiens
tttggcaggagagtggtaggaagtgggagatgggagaacaggctcagtgtaggggaattggtgccccccatctccctccacaccccacccctcaccctgggctctctgtgccacccagggtgtcagaagggtccctgtagctagttgcttcctcaccagagctgagacccagttgcctctactcctttcccaaggctgcacttccagtgcttgccagcagcacacgcccctaactggtgtgttgcacatcccaggaggtggcagaggaggtgggtggtatgtacttggtctgagggagagctgtcttgtcatggattatatcacctcccaggccccataccctgaacagcaccagcatgtctaaggcatatcagagcaccttcacaggcgagaccaacaccccctacagcaagcagtttgtgcactccaagtcatctcagtaccggcggctgcgcaccgaatggaagaacaacgtgtacctggctcgctcccgtatccagggcctggggctctatgcagccaaggacctagaaaagcacacaatggttatcgagtacattggcaccatcattcggaacgaggtggccaaccggcgggagaaaatctacgaagagcaggtatgagctggcagaggggccattgtggtgcatagtctgcactcaaccaaggagcaagggcaggattggtcacaggagagcaggaggaaagctgtggtggggagaagggaaaggcaggagaaatgaagtacatgcaacaaaagcccccactgcctgagtctcctacctgatcccacagccaccactgccactctctgatactcttgtcccttcttctgcaacctctgcctttctagaatcgaggcatctacatgttccgaataaacaatgaacatgtgattgatgctacgttgaccggcggccctgccaggtgagagatgacgaggaaggagggatttagtggtccctgagagtggcactctgggggatagacgaacaaggaatcaaaattgtcccaagttagttgcctgacatccctgactctgtcccactgcccaggtacattaaccattcctgtgcccctaactgtgtggccgaagtcgtgacat

SEQ ID NO: 8360 - DNA, 1125 bp, Homo sapiens
atgtaactgtactgaatactgtaggcagttgtaacatacggtaagtatgtgcatctagacatagaaaagatacagtaaaaatacagtacagtattataatcttaccagaccactgttgtatatatgattcctcattgaatgaaatgttgttaagctgcacgtgactgtatttggctcaaggtctcatgaccagtactagaacctgaacccaagtctttccaactccaaagcatgcctgctctttcactagggaccttccatggcctatgctgggtctcctgggccctgggtttgtatctcaaggctctgtgatgaccccttggggttggaaacctcctgcttcttaagagagagtgagactaggaggccaagagaggatctggaagaccaacacaacttcatgatagggaggcttgaaggcctcagaaaactgcagttctggattggggttagggactggaggtcagtgagcagaagttgcctctgaggactgctctcttccctgcttcttagccgtgtggaatcgcatcattgagcctgtggctgccatgagaaaagaggctgacatgctgcgactcttccctgagtatctgaagggcgaggagctctttgggctgacggtgcatgccgtgcttcgcatagctgaatcagtaaggaaggggctgggagctggggggcttggcgggcactgagaactttggcctaaccccaaaaaaactcaggctaaggtgagtatgaactgtgcccacagctgcccggggtggagagctgtcaaaactatttattccgctatgggcgccacccccttatggagctgccactcatgatcaaccccactggctgtgcccgatcagagcctaaaatcctcacacactacaaacggtgagcttgtgatgctggagccaagggatgtgggtgtgggtgttgacagggatcctctggtcccattatgaggatttaggatacagatcagagttcccgtggagaaaatggggaatcactcttagacttcctaattagagggcatgcaggtattagtagggtatccttttcctcctctcccaacctgctcagatgcacttgggatataggacagaattatcttgggcaccctggggaggtaat

SEQ ID NO: 8361 - DNA, 2012 bp, Homo sapiens
tcaggtcttcccccacagaaaccctcagccccaccggcccctgaattgaacaacagtcttcatccaacaccccacaccaagggtcctaccctgccaactggtttggagctggtcaaccggcccccgtcgagcactgagcttggccgccccaatcctctggccctggaagctgggaagttgccctgtgaggatcccgagctggatgacgattttgatgcccacaaggccctagaggatgatgaagagcttgctcacctgggtctgggtgtggatgtggccaagggtgatgatgaacttggcaccttagaaaacctggagaccaatgacccccacttggatgacctgctcaatggagacgagtttgacctgctggcatatactgatcctgagctggacactggggacaagaaggatatcttcaatgagcacctgaggctggtagaatcggctaatgagaaggctgaacgggaggccctgctgcggggggtggagccaggacccttgggccctgaggagcgccctccccctgctgctgatgcctctgaaccccgcctggcatctgtgctccctgaggtgaagcccaaggtggaggagggtggacgccacccttctccttgccaattcaccattgctacccccaaggtagagcccgcacctgctgccaattcccttggcctggggctaaagccaggacagagcatgatgggcagccgggatacccggatgggcacagggccattttctagcagtgggcacacagctgagaaggcctcctttggggccacgggaggaccaccagctcacctgctgacccccagcccactgagtggcccaggaggatcctccctgctggaaaagtttgagctcgagagtggggctttgaccttgcctggtggacctgcagcatctggggatgagctagacaagatggagagctcactggtagccagcgagttacccctgctcattgaggacctgttggagcatgagaagaaggagctgcagaagaagcagcagctttcagcacagttgcagcctgcccagcagcagcagcaacagcagcagcagcattccctactgtctgcaccaggccctgcccaggccatgtctttgccacatgagggctcttctcccagtttggctgggtcccaacagcagctttccctgggtcttgcaggtgcccgacagccaggtttgccccagccactgatgcccacccagccaccagctcatgccctccagcaacgcctggctccatccatggctatggtgtccaatcaagggcatatgctaagtgggcagcatggagggcaggcaggcttggtaccccagcagagctcacagccagtgctatcacagaagcccatgggcaccatgccaccttccatgtgcatgaagccgcagcaattggcaatgcagcagcagctggcaaacagcttcttcccagatacaggtaacctcagctggtaacatagccaagttactcagggtgattattgttatccctaaatgggcactgaggctagagacctcagataatccctacttaagatgggacacaaagaactttggctaaatatcatactagtggtagaggcagaaacactgtagcttttaagaagagagagaacagttcctggcatatagtaggcatgtagcagatgtttgaataaatggaatgaatgtatgaatgaagcctaattagcagagcctttgtagctgtagtgaagttgaaagcttaagacttgaagagaagtggtgcaaaaaaaagcagttgaggccaggcacaatggctcatgcctgtaatcccagcactttgggagaccaaggcaggtggatcacttaagatcaggagttcaagaccagcctggccaagatgatgaaaccccatctctactaaacatacaaaaattagctgggtgtgagccgggcgcggtggtgcatccctgtaatcccagctactcgggaggctgaggcaggagagttgattgaacccatgaggcagaggttgt

SEQ ID NO: 8362 - DNA, 1669 bp, Homo sapiens
gacaaagccccctacctggtgaggcagaaaggagcatggattagcgtgggaactgagagggagggagggatctttgggtaatttacctcagttctttccgctccccactcctaaagcagctgggccagaagggatctgcttctgggtagggagtgtgaaaacactacagtatgggggcggggcatgagaccaagcactaggccctaaggctgtgtcccatatccctcagcaaaaggccaaagataaccgggcagctcaccgcatcaacaaggtgcagaaggtgagtggggctgggctggggtgtagcagtcctctagtgggtggcctctcttgagggtggagggccatggggcctgcctgcagcagcctgactgccctatgcctggtctccccctgtagcaggctgagagccagatcaacaagcagaccaaggtgggcgacatagcccgtaagactgaccgaccggccctacatctccgcattcccccgcagccaggggcactgggcagcccgccccccgctgctgcccccaccattttcattggcagccccactacccccgccggcttgtctacctctgcggacgggttcctgaagccgccggcgggctcggtgcctggccctgactcgcctggtgagctcttcctcaagctcccaccccaggtgcccgcccaagtgccttcgcaggacccctttggactggcccctgcctatcccctggagccccgcttccccacggcaccgcccacctatcccccctatcctagtcctacgggggcccctgcgcagcccccgatgctgggcgcctcatctcgtcctggggctggccagccaggggaattccacactaccccacctggcacccccagacaccagccctccacacctgacccattcctcaaaccccgctgcccctcgctggataacttggctgtgcctgagagccctggggtagggggaggcaaagcttccgagcccctgctctcgcccccaccttttggggagtcccggaaggccctagaggtgaagaaggaagagcttggggcatcctctcctagctatgggcccccaaacctgggctttgttgactcaccctcctcaggcacccacctgggtggcctggagttaaagacacctgatgtcttcaaagcccccctgacccctcgggcatctcaggtagagccccagagcccgggcttgggcctaaggccccaggagccaccccctgcccaggctttggcaccttctcctccaagtcacccagacatctttcgccctggctcctacactgacccatatgctcagcccccattgactcctcggccccaacctccgccccctgagagctgctgtgctctgccccctcgctcactgccctccgaccctttctcccgagtgcctgccagtcctcagtcccagtccagctcccagtctccactgacaccccggcctctgtctgctgaagctttttgcccatcacccgttacccctcgcttccagtcccctgacccttattctcgcccaccctcacgccctcagtcccgtgacccatttgccccattgcataagccaccccgaccccagccccctgaagttgcctttaaggctgggtctctagcccacacttcgctgggggctggggggttcccagcagccctgcccgcggggc

SEQ ID NO: 8363 - DNA, 1230 bp, Homo sapiens
taaggccctttttgcagttggggtgggccggccaagctttggactagggaccccaaaagccaagggagatggaggctcagaaaggaaggaactccccacatcgcagaaaggttagttatgtgggagtgagtggtgtgagagaatccaactttcttctggcttaggagctggcaagttatttgatgggaaatggactggcctccaggagtcaagggtggggtcaagggtcctggcctgtagggctgtgggactggagacctgttctgggcatcagatgtaggacatctctgattggaggggggactcttgctcataggagatgatggtccagatattgcagatgaagaatcccgtggcctcgagggcaaagccgatacaccaggtgagggctgccggggttactgtgtcctgtcttggccttgcttgcctctgtccctctgctgtgcccctgagcattgtcagtgttggaggctggaaactgtcccatggccctctgtggttcagagtggccatgacccatcctggccttgacccatgggtttctcctggcatttacaggacctgaggatgggggcgtgaaggcatccccagtgcccagtgaccctgagaagccaggcaccccaggtgaagggatgcttagctctgacttagacaggatttccacagaaggtgaggctgtgacccgtacctctttgtgtataagggttttctatgggagaaggaggaggtcctatctttgggactgtgatctgtacagcttctctggtggggagtcctggactgttcctggccatgatcatttgtagacctgtggtgtcacctgaacttcccagtcttcctcaacagtgtccttcattcccccacagaactgcccaagatggaatccaaggacctgcagcagctcttcaaggatgttctgggctctgaacgagaacagcatctgggttgtggaacccctggcctagaaggcagccgtacgccactgcagaggccctttcttcaaggtaatacaggtgggagtggtctgaagactgacataaccaagcttgcctccaggatgggccagttgctcttttctctgatcctgtccgtcttgtaggtggactccctttgggcaatctgccctccagcagcccaatggactcctacccaggcctctgccagtccccgttcctggattctaggttggtgtctctgcgtaacctttgtgggcagtcctcgttgtccttt

SEQ ID NO: 8364 - DNA, 1042 bp, Homo sapiens
gagcctaagtttagagtcactgttttggggacaagggtgctctgcctaagtctctgtgtgctcaaatggaggcctagtctctgcattgggctgcctccagcctcacccttagaagttccacctcctaggctgggcacggtggcgcacacctgtaatcccagcactttacttcgggagggtgaggcgggtggatcacctaaggtcaggagttggtgaccagcctgactaacatggtgaaactctgactctactaaatacaaaaaaattagccaggtgtggtggcaggtgcctgtaatctcagctacttgggaggctgagacaagagaatcacttgtacctgagaggcagaggttgcagtgagccgagatcgcgccattgcactccagcctggggaacaagagcaaaactccatctccaaaaaaaaataaaaagaagttctacctcttttccacctcacaccctgagaagttcccatcttctgccccagatcaccaaggtgatgctgctcaagggctggcgttgtgtggagtgtattgtgtgtgaggtgtgtggccaggcctccgacccctcacgcctgctgctctgtgatgactgtgatattagctaccacacatactgcctggaccccccactgctcaccgtccccaagggcggctggaagtgcaagtggtaaggagactgggatcttcagtggagccctggggccttgagatgttaaagtggatatgatgttgagtatgtgacagaggctgggtttaggaggccaggctggtggcttgggtttccggtgaggggacttctgggtacttcgggtaggttgggtgctaaagctctgttttcctgctcctatcaggtgtgtgtcctgtatgcagtgtggggctgcttcccctggcttccactgtgaatggcagaatagttacacacactgtgggccctgtgccagcctggtgacctgccctatctgtcatgctccttacgtagaagaggacctactaatccagtgccgccactgtgaacggtgagaacatccctttctcctcac

SEQ ID NO: 8365 - DNA, 1207 bp, Homo sapiens
cagttattaaggagaaaatactaatacgtagaagggacaagtaacttgcccagattcatggttactcagtaatagaattgggaccagaaacttggttctttcaagccattgttttttctccttgcccatctcaaccactcttgggaggggaagaatgggtttgggctagagctatgcgcttgttgatatctgggagtttggccttttcccttgccctgagtgggactcctgggcttattacctgtcttactctgtccgtttgtcacttcttctgttcaagtgtgtaaacccaacacactagcccttgacatgctcctgtcattgtccccttctttcactcagggtcgcagcagcagtttcccaggaagacgccggcctcgtggaggagcccatggaggacgtggtagaggacgggcccggctaaagtcaactgcttcttccattgagactctggtagtaaggagatgcctcctattcctcccatcccccaaccatgctttagcaccctctgagtcctgccagtcccttgcatgcttgcctacctgcctgctcgtctagggcctgtctggctatgtctgaattcctgtccacttggcccgcaggtttttctgaaatctctgctatcagactgaggctcaatttgggagctggggtgttctgtctgttattcctggcttttggccttcatcttaaccaagggttcacactttcttcccccaacaccaaagaggaaagtagcttggtgggggcagatttatctgcctcactttccataactctctgcccatcaggttgctgacattgatagctctcccagtaaggaggaggaggaagaagatgatgacaccatgcagaataccgtggttctcttctccaacacagacaaatttgtcctaatgcaggtaccatacagtgagacctggcacactgaacattgtgtatgtgtgtgtttggtgagaggatagatgggaaaactggacctactttggggatacccagctaatgagaaaacagaccatgaattctaatcatgttattcattggtttgtccatccatcacatttctcttgagtatctcttctgagcttggcactaagctaggagctagagaaatagcagtgaaaaagtctttgccttattgaactttatagcttagggaacttacatgtgtcctcacttgaataatcttgaagctgatagaattttg

SEQ ID NO: 8366 - DNA, 1184 bp, Homo sapiens
agtcacccatgtcccctccacctgaagagtcacccatgtctccaccaccggaggcatctcgtctgttcccaccatttgaagagtctcctctgtcccctccacctgaggagtctcccctttccccaccacctgaggcatcacgcctgtccccaccacctgaggactcgcctatgtccccaccacctgaagaatcacctatgtcccccccacctgaggtatcgcgcctatcccccctgcctgtggtgtcacgcctgtctccaccgcctgaggaatctcccttgtccccaccgcctgaggagtctcccacgtcccctccacctgaggcttcacgcctctccccaccacctgaggactcccccacatccccaccacctgaggactcacctgcttccccaccaccggaggactcgctcatgtccctgccgctggaggagtcacccctgttgccactacctgaggagccgcaactctgcccccggtccgaggggccgcacctgtcaccccggcctgaggagccgcacctgtccccccggcctgaggagccacacctatctccgcaggctgaggagccacacctgtccccccagcctgaggagccatgcctatgcgctgtgcctgaggagccacacttgtccccccaggctgagggaccacatctgtcccctcagcctgaggaattgcacctgtccccccagactgaggagccgcacctgtctcctgtgcctgaggagccatgcttgtccccccaacctgaggaatcacacctgtccccccagtctgaggagccatgcctgtccccccggcctgaggaatcgcatctgtcccctgagcttgagaagccacccctgtcccctcggcctgaaaagccccctgaggagccaggccaatgccctgcacctgaggagctgcccttgttccctccccctggggaaccatccttatctcccttgcttggagagccagccctgtctgagcctggggaaccacctctgtcccctctgcccgaggagctgccgttgtccccatctggggagccatccttgtcgcctcagctgatgccaccaggtaaggggatgttagtactctgttattctggaacagctgtaactcttcatggcacatctaatctaagagcccttcttttttctctttccttccagatccccttcctcctccactctcac

SEQ ID NO: 8367 - DNA, 1268 bp, Homo sapiens
gaggggccaggggagttgtgtgacctgttcttctgtaccagctgtgggcatcactatcacggggcctgcctggacactgctctgactgcccgcaaacgtgctggctggcagtgccctgaatgcaaagtgtgccaagcctgcaggtaggaatggaagggcaggaggaaagtcttaggcacaacacaggttagggttgaaaatgagggcagtcggagaaggcctgttaacatgaaaacaacaaaaaagaaaggaaatgagggcagagaggacactgtaatgttccatgtgcacctgcaggaaacctgggaatgactctaagatgttggtttgtgagacgtgtgacaaaggataccatactttctgcctaaaaccacccatggaggaactgcctgctcactcttggaagtgcaaggtgagtgtaccctgattctgccctattgtccctaactgtgtctgctacagcattctctgtcttgacaagttgtgtactttcgtttagtctttgctgtctgaccaatgcctgttttgcccactcccttcccttaggcgtgccgggtgtgccgggcctgtggggcgggctcagcagaactgaatcccaactcggagtggtttgagaactactctctctgtcaccgctgtcacaaagcccagggaggtcagactatccgctccgttgctgagcagcataccccggtgtgtagcaggtaagtggtggggactgactgagattgggctggcaggttggaagaactgacattggcaggggccttgttaaattgagtggactttgagaggagagccctaaggtgggcagtgccatccacagcattcgtgcctccccccagtgtgctctctaggatttgttagctggtgagagccacagtgcctgctcccctgtaccctctgcagattttcacccccagagcctggcgatacccccactgacgagcccgatgctctgtacgttgcatgccaagggcagccaaagggtgggcacgtgacctctatgcaacccaaggaaccagggcccctgcaatgtgaagccaaaccactaggtgagtagggtttgagggtccctgaaattcatccccttttattctatggcaagagacagtttgtgcattgccccagaccccacactttctgtggagtagatctgagctagataggagcatcgtgttgttgtgtctgcagggaaagcaggggtccaacttgagccccagttggaggcccccctaaacgaggagatgccactgctgcccccacct

SEQ ID NO: 8368 - DNA, 1102 bp, Homo sapiens
catctgctcgagagaatcaggtgctgggcctgaagactagaagggtggtgatggtagctgtgttttccttattgtactgcttggtggtgggaatgttgcgggaatggggctttcaccccagagctgggtggtattggcactgaactgacttttgccctgaatcctctcctcttatagctgactcaaggcatcttcaccaaagtcatccaggagattgcccgtgtggagaattcctatgggcaagagcgtcgctgccatctcatgtgagcccttgggtgtggggtaactgccttgcttctgcccccggcacttgccatgttccagtggggggcagatcctcaggacttcacgggtatggttgccagctgtgttcctggcccctggacacacagtgtggcatcctcatgtttgcacactttccccaggctccagtggcctggatgtcaatgtttacaaaggggcaaggacctctcatggacactggcctctagccctctgtttttgtttgatgaattctgttataacctatggggtcaggatatgagtcctgggcattatttatccaggacccatcctcttgggtgggttttgggtgttggctgggtaaggggagccggggacttctgaaatagagctggctccctggggtgacaatgtatatatgcaaataaattgagaaatcttttgttgttgacttctttttcgtgtgtgtgtgtgagacggagtttcactctgttgcccaggctggagtggtgcagtgctgcaatcttggctcgctgcaacctccgcctcccaggttcaagcagttctcctgcctcagtcttctgcaggcacccgccaccatgcctagctaacttttttatttttagtagagatgaggtttcacctaggccaggatggtctcgaactcctgaccttaagtgatccacccacctcagcctcccaaagtgctgggattacaggcgtgagccactgcccccggccttattttattgttgacttctatgtatctagtgagagctcagagccaagatctctttttccaaggagtgatggctgtggtctttggtgggatatctttcctcctaccttgttcctattc

SEQ ID NO: 8369 - DNA, 1139 bp, Homo sapiens
aacgcagcctttgcaggcctcaccacactctgtctggtgaagaccttcactgcagctgtgcgggcagagctgatccgggcctttggtgagagggagtgagggtgcaggctagtggggggtggtaatcatctaggacactctggaacatggatcaccccagcaggggagagggtgtgcttcctgctttgtgggtaacgtacctcatccacacattctgtggcttggctgcctggtccctaacggactggacctttgacttgcttttgactgcccatctcctcttctccagggctggacagactgccgctgcccgtctccggtttcccccaggcatctaggaagacccagcaccagtgacctccagctgggggtgggaaggaaaaaactggacactgccatctgctgcctaggcctggagggaagcccaaggctacttggacctcaggacctggaatctgagagggtgggtggcagaggggagcagagccatctgcactattgcataatctgagccagagtttgggaccaggacctcctgcttttccatacttaactgtggcctcagcatggggtagggctgggtgactgggtctagcccctgatcccaaatctgtttacacatcaatctgcctcactgctgttctgggccatccccatagccatgtttacatgatttgatgtgcaatagggtggggtaggggcagggaaaggactgggccagggcaggctcgggagatagattgtctcccttgcctctggcccagcagagcctaagcactgtgctatcctggaggggctttggaccacctgaaagaccaaggggatagggaggaggaggcttcagccatcagcaataaagttgatcccagggtttgctttgtttttttaaagcacctgtctctgtgtatatttgaacagccttgctcccaccagcccggcgtctgcccagtaagagaagcagaggggtcctgcccaccatccttttccttccccttcatctatattattaccatcctttggggacttggatctggtgttaggccatgcagttgggcagtgggaaactcctccatcctcagtcttgcttaaagctggcttgtcccctgactcctccttatattcatggccttgtttctgta

SEQ ID NO: 8370 - DNA, 1629 bp, Homo sapiens
tacaggctgaccagtgcaccggtcttcagggcttcttggttttccacagctttggtgggggaactggttctgggttcacctccctgctcatggaacgtctctcagttgattatggcaagaagtccaagctggagttctccatttacccagcaccccaggtttccacagctgtagttgagccctacaactccatcctcaccacccacaccaccctggagcactctgattgtgccttcatggtagacaatgaggccatctatgacatctgtcgtagaaacctcgatatcgagcgcccaacctacactaaccttaaccgccttattagccagattgtgtcctccatcactgcttccctgagatttgatggagccctgaatgttgacctgacagaattccagaccaacctggtgccctacccccgcatccacttccctctggccacatatgcccctgtcatctctgctgagaaagcctaccatgaacagctttctgtagcagagatcaccaatgcttgctttgagccagccaaccagatggtgaaatgtgaccctcgccatggtaaatacatggcttgctgcctgttgtaccgtggtgacgtggttcccaaagatgtcaatgctgccattgccaccatcaaaaccaagcgcagcatccagtttgtggattggtgccccactggcttcaaggttggcatcaactaccagcctcccactgtggtgcctggtggagacctggccaaggtacagagagctgtgtgcatgctgagcaacaccacagccattgctgaggcctgggctcgcctggaccacaagtttgacctgatgtatgccaagcgtgcctttgttcactggtacgtgggtgaggggatggaggaaggcgagttttcagaggcccgtgaagatatggctgcccttgagaaggattatgaggaggttggtgtggattctgttgaaggagagggtgaggaagaaggagaggaatactaattatccattccttttggccctgcagcatgtcatgctcccagaatttcagcttcagcttaactgacagacgttaaagctttctggttagattgttttcacttggtgatcatgtcttttccatgtgtacctgtaatatttttccatcatatctcaaagtaaagtcattaacatcaaaagctttgtttcctgcgtttttttctaaaagtgccttggtttttagattcatctatacttggagtatagagagtctggtgtcaaggatcccacttactgtgcaggcacctctagggaaaagggagctcaacagactagaaaggcaggagccctagattctcagactagtttaccacctcaacgcttgcatagggggtggggaaagtcattctgctaatctaaagctcatttagctcttcagagtaagactgggtagttactaatgagtaatgtataggaagtgtaagttttgaatatccactgagatgctgctgtttaaagtggcctgctaacttgttagtgtaattaagaaatttccaagtgatctttggctggtcatggtggctcacacctctgatcccaggcattcaagaccagcctgggagacatgatgaaactccatctacaaaaaaaaatttgggtgtggtgg

SEQ ID NO: 8371 - DNA, 1320 bp, Homo sapiens
aactagtctgagaatctagggctcctgcctttctagtctgttgagctcccttttccctagaggtgcctgcacagtaagtgggatccttgacaccagactctctatactccaagtatagatgaatctaaaaaccaaggcacttttagaaaaaaacgcaggaaacaaagcttttgatgttaatgactttactttgagatatgatggaaaaatattacaggtacacatggaaaagacatgatcaccaagtgaaaacaatctaaccagaaagctttaacgtctgtcagttaagctgaagctgaaattctgggagcatgacatgctgcagggccaaaaggaatggataattagtattcctctccttcttcctcaccctctccttcaacagaatccacaccaacctcctcataatccttctcaagggcagccatatcttcacgggcctctgaaaactcgccttcctccatcccctcacccacgtaccagtgaacaaaggcacgcttggcatacatcaggtcaaacttgtggtccaggcgagcccaggcctcagcaatggctgtggtgttgctcagcatgcacacagctctctgtaccttggccaggtctccaccaggcaccacagtgggaggctggtagttgatgccaaccttgaagccagtggggcaccaatccacaaactggatgctgcgcttggttttgatggtggcaatggcagcattgacatctttgggaaccacgtcaccacggtacaacaggcagcaagccatgtatttaccatggcgagggtcacatttcaccatctggttggctggctcaaagcaagcattggtgatctctgctacagaaagctgttcatggtaggctttctcagcagagatgacaggggcatatgtggccagagggaagtggatgcgggggtagggcaccaggttggtctggaattctgtcaggtcaacattcagggctccatcaaatctcagggaagcagtgatggaggacacaatctggctaataaggcggttaaggttagtgtaggttgggcgctcgatatcgaggtttctacgacagatgtcatagatggcctcattgtctaccatgaaggcacaatcagagtgctccagggtggtgtgggtggtgaggatggagttgtagggctcaactacagctgtggaaacctggggtgctgggtaaatggagaactccagcttggacttcttgccataatcaactgagagacgttccatgagcagggaggtgaacccagaaccagttcccccaccaaagctgtggaaaaccaagaagccctgaagaccggtgcactgg

SEQ ID NO: 8372 - DNA, 1212 bp, Homo sapiens
gatcaccaatgcttgctttgagccagccaaccagatggtgaaatgtgaccctcgccatggtaaatacatggcttgctgcctgttgtaccgtggtgacgtggttcccaaagatgtcaatgctgccattgccaccatcaagaccaagcgtaccatccagtttgtggattggtgccccactggcttcaaggttggcatcaactaccagcctcccactgtggtgcctggtggagacctggccaaggtacagagagctgtgtgcatgctgagcaacaccacagccattgctgaggcctgggctcgcctggaccacaagtttgacctgatgtatgccaaacgtgcctttgttcactggtacgttggggaggggatggaggaaggtgagttttcagaggcccgtgaggacatggctgcccttgagaaggattatgaggaggttggtgtggattctgttgaaggagagggtgaggaagaaggagaggaatactaaagttaaaacgtcacaaaggtgctgcttttacagggaagcttattctgttttaaacattgaaaagttgtggtctgatcagttaatttgtatgtagcagtgtatgctctcatatacaattactgacctatgctctaaaacatgaatgctttgttacagacccaagctgtccatttctgtgatgggttttgaataaagtattccctgtcttaaatgaattcagtcctgtgttttctatctgggtgtctgaagtttttcatgtatttagtgcattgagaataaaaaataagtgttgcctgtggtttatacatatcctaggaagtgacgtttgtatttaaagtatcttagtaatttaaaacttttatttatgaaacacaaaatgtatatctaaagattaccattacagagcatcatgtactttttttttttttttttttttttgtgagatggagtcttgttctgttgcccaggctggagtgcagtggtacgatctgggctcactgcaacctcaacctcctgggttcaagagcttctcctgcctcagcctcccaagtagctaggattacaggcatccaccaccacacctgactaatttttgtatttttagtggagactgggtttcaccatgatggtcaggctggtctcagactcctgacctccagtgatccgcttgcctcggcctccctaagtgctgggattacaggcgtgaaccactgtgcccggctcat

SEQ ID NO: 8373 - DNA, 1205 bp, Homo sapiens
ttgtgtcctccatcactgcttccctgagatttgatggagccctgaatgttgacctgacagaattccagaccaacctggtgccctacccccgcatccacttccctctggccacatatgcccctgtcatctctgctgagaaagcctaccacgaacagcttactgtagcagagatcaccaatgcttgctttgagccagccaaccagatggtgaaatgtgaccctcgccatggtaaatacatggcttgctgcctgttataccgtggtgacgtggttcccaaagatgtcaatgctgccattgccaccatcaaaaccaagcgtaccatccagtttgtggattggtgccccactggcttcaaggttggcattaattaccagcctcccactgtggtgcctggcggagacctggccaaggtacagagagctgtgtgcatgctgagcaataccacagctgttgccgaggcctgggctcgcctggaccacaagtttgacctgatgtatgccaagcgtgcctttgttcactggtacgtgggtgaggggatggaggaaggcgagttttcagaggcccgtgaggacatggctgcccttgagaaggattatgaggaggttggagcagatagtgctgacggagaggatgagggtgaagagtattaacctgtgtgctgtacttttacactcctttgtcttggaactgtcttatttttgttctgtaaatgtctattgccgtaaattgttaataaaattgaagtttccattttaaatgtcgagctgacttaaatacttgatccagttaaagttggatgtatgaggctggtagatgaaaccacctgagtcgagggtcttgctctgtcacccaggctggagtgcagtggcatgataatacatagctcattgcagcctcgagctcctggactcatgtgattctcctgcttcagcctcctaagtagctggggactgcaggtgcacaccaccatgcccagctatttttatttcttgtagagatggggccttgctatgctgcccagggtggtcttcaactggcttcaagtgatcctcctgcctcaacctctcaaagttttgattataggcatgagccactgcccagcttcttggtttatctgtttaatttgggcctgaattaagtggttatagaatcattttgtaagtgaggaaacgggttcagattgagccagtgcttctctaactaaa

SEQ ID NO: 8374 - DNA, 1141 bp, Homo sapiens
ctaacatagtttataatttaaattgtttgtataaattatctttattttacagttaaatgatacaaggtaaaatatgtttcaaaaaatcttacataaaaatctaagttgttattgttgctagttcatttacctttccacctttctttacagtatgctaaaaatgagggaatattgatgccacattaatacctgataccgaaattaaaccaccttttctttatatgaaatctagcatataacttctatttctagcaatgttctgcatttctaagttttgaaattaatttttcacatgctgttatcactcatctattaatcattcccagtgagatgcttgtatgtactgtcactgacactaaagagtgatacatattgttaaaaatgaaatatcactcttttcattattctctgtataggcctcagctgcctagtgacctactaatgttagaattaaatgaccctgtcatcttttccagataaatgcggtacgtgcaatagttcctaataagagcaacaatgaaattatcctggttttgcagcactttgataactgtgtggacaaaacagtacaagcattcatggaaggtaatcctgacttaattttaaaaataaatttatatttgctcaaatagaatttgcttcagacttttataacattcagcaatccagtgattcatagatgatagagcagaccccatgaaaacataacataccatgacatttgacgatacctctttcagctgaaataagctatgtggtgtctataataagagataagctgagaaaactccattgtttcacgctaaatgttctctaatggtatttaagaggaaatcatgtggccagtggtataagggacttgattggacttgggttgaataagaatttaagagactcttaataacaaagcagtgattcagtggctcaccaacagatggcaaattcaaggactcagtattgtcttccggattctaatatcgttagtttggctgtggcaagtgactcaaatgtgtgggtttgaatttccttatctaatacgtagaagaatggcaggcttagtcaacccttcagatttataacattgagaagtgttttatgaaccttccttccatgtaacctgttggagaaaaactatctgaag

SEQ ID NO: 8375 - DNA, 1591 bp, Homo sapiens
ccctcacagcgtggcaggaaatgctggagagcatatgatgtgatggaaggagaggttgagatttcgaatggagagagcaggatctaaatcctgcctccgtcccaaactagggtcacatagtttaacccctctcctgtgtctgtttcctcatctgtaaaatagagctaatggtagtgcctcccctgcttagttcaaggctgtgtaatcaaagccctttgcacaccaagaagcccatacaaaaggtcaattttaatttccttccctttctagaaccacctctaccctcaactaagcctaaagatgctttgtgccaaattagagcccagcctaatctggtatgggcacccttgctggtgctgggctctccacccagcgcagtctgcagctggtccacttggcttagtggtccgctcagcatcgggttcagcaagacccttggtgctcacgctttctctgtcctttgttcagtgcagccgctgcccaaaggggaccaagtgctgaacttctctgatgcagaggacctgattgatgacagtaagctcaagtgagtggctggagacacaggaaggggtggagagagccgagtcactcctgtcaggtagagcgccccaggctgcccagccccagcccttgggctcccgttggtgcttggccccccctggctgagccccctcccctcccactggggccttcttaggctccgctgctttacccttatccccagcccaaccccagagaaggaggctgggccaaggcctgatgtaccaccttccaggccacttggctaaaggggctcagggatgccctaatgagccaagtaacaggcaagctgaaggtggacctaaatcttccttctcttcttgcccctcagggacatgcgagatgaggtcctggaacatggtaagtatggcctcatggggtggtgaggggatggaagctcctgccagaatcaagaggaccagtacaaggtgctggtggcctcagagcatccctccttaccaccccacctcaccccagagctgatggtggctgaccggcgccagaagcgagagattcggcagctggaacaggaactgcataagtggcaggtgctagtggacagcatcacaggtgaggaggcctgggcaccagaaggctcactcttcagcatccttcgccccagcctgtgcccctgttgctgcctggctggggagaccctcgtttcccaggccccgacccccttcccttataaaccttgccctggttccctgccttgcattctggccctcaggggtaggctcttccaaactccctcttctcccaggcatgagctctccggacttcgacaaccagacactggcagtgctgcggggccgcatggtgcggtacctgatgcgctcgcgtgaggtgaggcaggcccatccccgcccttcttaggctgcttcctctgtcagtgcctttctctgcgtagtccttggtttcccatctttctctggcctgcatagacctactcccccaattcttcaggtcccagccctcacctgccccatttccccagatcaccctgggcagagcaaccaaggataaccagattgatgtggacctgtctctg

SEQ ID NO: 8376 - DNA, 2254 bp, Homo sapiens
gcctagagtggtcaggcagcccacctcggcactcctggggtgggggtggggacagctgcttaacctttattcttggtcggtctgtcggcaactttgggaaccaccagtaggatgtggttaagattcagttcttgctgagctaaggaagcatttctcatttctttttaattgtctggctcacttctagtccctaactaaatgctcactcaagagttttagcttgaatgtcaaatgtcaaaaaattaattgggtgatttttctccatttctaggataagaagaaagagaagaaatgaagtgaccatccagcctttcccaattagacttcctctccttccacccctcatttcctttttgcacacattacaggtggtgtgttctgtgataatgaaaagcatcagaaaagcttttgtactttgtggtttcctctattttgaattttttgatcaaaaaactgattagcagaatatagtttggagtttggcttcatcttcctggggttcccctcactcccttttttgtcaaccccatctgtagcctcttcctctactcaggcagtcgacccgccacgatgagaagtgggaccagcagagggcgccaacttcaggagtccgctttcccaccaggcttcattcacccagtggacctgaactgtttggtagagccacccggcccttccttcctcattgttgtttggtatgcgcacagttcctgtgggactgggccgtgagttttccattggaaagaagttcagtggtcccattgttaactcagcctcaaatctcaactgtcaggccctacaaagaaaatggagagcctcttctggtggatgctttgctccctctgagctgcccatgctggtctggcaaacacacctttctgctttgccttcacaaaagtaatgtgttccctttcccaccccttgcctgaccctcagggagtcagcctgcttccatccatgggtgggaagacttcagcacaaaggaaagactaattcttgtcaggcatttttgaaaaggctgattatgtgtatcaaggtacagcatcgtagggttcccctaaacttgccctgtttttgtttttttagtttgttatccccttactgagcggcctctactaggtggctgtgattaaatgtcccaagcaaggatagggaaggggaatggttgagcctctggagatcattgtaaccaatcctgccagacctgtttggggcagtggggagcaaacctagataaggacctgtttggggcagcagggagcaaaatctcctttaacaaccaagcagttcctcattcacatcaacagagcgaggctgtgataacttaggaggcagcaatcctaatagtccttcagtgcattttagtctgtctccaactggacaccagtaggtagtgtcaagccagagattcggggcagtagataaatgttcattttactgatgcactttagtttttggtctgttacctgttttccagaaatttgtggccttttaggcgggagttaggcgaccaaaccagtgagagccccaatccctgcagttttgtggcttcaagtgtgggtggacagtcctaatggggatctccagctccttcctgtgggctgccacagacagctacccccagaagggtcaatgttgggagtggttgtggctctgagctgctctacagagcttcagtgtgagaggatcgagccattgaaagctcattaccagtaggacataatttttggctctccctattcacaaccagtgcacagtttgacacagtggcctcaggttcacagtgcaccatgtcactgtgctatcctacgaaatcatttgtttctaagttgtgtttattcctggagtgacatgccaccccgaatggctcactttcactgaggatgctgtcctctgatttagctgctgcctccagcctctggcttgagaacttactaaaggcacttccttcctgttaaacccctgttaactctccataaatttggtgattctctgctaggcctaagattttgagttaacatctcttgaagccaaactccaccttctgtgctttttgcttgggataatggagtttttctttagaaacagtgccaagaatgacaagatattaaaaaaaaaaaagaaagaaaaaaaaaaaaacacctacttttaaagaaaatacctaacagatttttaatatagttatctctaccactttcttttctagtttcttgattttcagctcaggctgcattctaactcatactgtgaagac

SEQ ID NO: 8377 - DNA, 1853 bp, Homo sapiens
ggctataaggattccttctttaaaaaggttctgaaagtctttactatttcccctctctcgttgttggtgactaagaatacttaagcaactattgcaaaatagttgtctagggtttcctacttataatgggttatatcaagtaatattatagttgtttattcaaccattttttatagaatatttttccagttcattctctttttattgtagatttgggagcaaaagcaagtctgccactaacctaggacgacaaggcaacttttttgcttctccaatgctcaagtgaagtcacatctgcctgttacttcccagcattgactgactataagaaaggacacatctgtactctgctctgcagcctcctgtactcattactacttttagcattctccaggcttttactcaagtttaattgtgcatgagggttttattaaaactatatatatctccccttccttctcctcaagtcacataatatcagcactttgtgctggtcattgttgggagcttttagatgagacatctttccaggggtagaagggttagtatggaattggttgtgattctttttggggaagggggttattgttcctttggcttaaagccaaatgctgctcatagaatgatctttctctagtttcatttagaactgatttccgtgagacaatgacagaaaccctacctatctgataagattagcttgtctcagggtgggaagtgggagggcagggcaaagaaaggattagaccagaggatttaggatgcctccttctaagaaccagaagttctcattccccattatgaactgagctataatatggagctttcataaaaatgggatgcattgaggacagaactagtgatgggagtatgcgtagctttgatttggatgattaggtctttaatagtgttgagtggcacaaccttgtaaatgtgaaagtacaactcgtatttatctctgatgtgctgctggctgaactttgggttcatttggggtcaaagccagtttttcttttaaaattgaattcattctgatgcttggcccccatacccccaaccttgtccagtggagcccaacttctaaaggtcaatatatcatcctttggcatcccaactaacaataaagagtaggctataagggaagattgtcaatattttgtggtaagaaaagctacagtcattttttctttgcactttggatgctgaaatttttcccatggaacatagccacatctagatagatgtgagctttttcttctgttaaaattattcttaatgtctgtaaaaacgattttcttctgtagaatgtttgacttcgtattgacccttatctgtaaaacacctatttgggataatatttggaaaaaaagtaaatagctttttcaaaatgaacatgaggctggttttcttgtcttgcaaggtaattttcaatgccttttagaaaatcatttctggggctgggcttggtggcttatgcctctaatcccagcactttgggaggccaagataggtggatcacctgaggtcaagagtttgagatatggccaaactctgtctctacaaaaaatacaaaattaactgggcgtggtggtgcacacctgtggtcccagctacttgggaagctaatgtgggaaaattgagcctgggaggcagaggttgcagtgagctgagatcgtgccactgcactccagcctgggtgacagagtgtgagaccctgtcacaaaaaaaaaaaaagaaaaaattacttccttcaaagtgtcttgactctgttgttcatccccatttcccactctctggacccaccccaggcttaccaccaccgggagtttgtttcttcatttctcatccagtct

SEQ ID NO: 8378 - DNA, 1218 bp, Homo sapiens
ctgaggcaggagaatcgcttgaacccgggaggtggaggttgcagtgagccaacctctaccacgccattgcactccagcctgggcaacaagagcgaaactctgtctcaaaaaaagacaaaaaaaggccaggcccagtggctcacgcctgtaatcccagcactttgggaggtcgaggtgggtgaatcacaaggtcaggagttcgagaccagcctggccaacatggtgaaaccctgtctctactaaaaatacgaaaaattagctgggcgtagtggtgggcacctgtaatcccagttactcgggaggctgagacaggagaatcgcttgaacctgggaggcagaggttgcagtgagctgaaatcacaccactgcactccagcccaggcgagagagtgagattcggtctcaaaaaaaaaaaaaaaaaaaagttagttgattatgatgataattttctaattcatatcactctgttccttctgccctgttttatcccaggttattaaacctgaatcctgtgttccatgtggaaagcggataaaatttggcaaattatctctgaagtgtcgagactgtcgtgtggtctctcatccagaatgtcgggaccgctgtccccttccctgcattcctaccctgataggaacacctgtcaagattggagaggtatgacttatgcaagccgtcattgttttatggcctctttattcgcctttcaaaggcttagtgtcagtttttgttctaaaattaatcatctcaaatatatttctttccacaaataatgactagaattgtaagatacttacttgtagaagagtcctgtttgggtttgtctgtctaatacctttctaaaccaaacttctttccccgcccctttttccttcttgctcttccctgcttctccttgcctcttcttccttccttcctccccttcatcccattttggaaaatttcagacatatataaaactagagaaattagtataactaacccctggttcttatcacttaacttccatgattactaacttgtgtccattttttttttttttttttttttttttttttttttttttttagctctattgcctaggctggagtgcactggcaggatgtcagctcactgcaacctccgcccccctgggctcaagcgattttcttgcctcagcctcccaagtacctggaattacaggcatgtaccaccaccatgcccggctaattttttttg

SEQ ID NO: 8379 - DNA, 1119 bp, Homo sapiens
taacatctctctggtgcagcaatgcgtgactgtaaaggaaactgtttttgttttatagctgtaactgtcctggtgcatgacagctgccccaaaggtatccccctttgattgccttctgttcaggagctttcagtgttagtgttacatctggagccaggtgactaatgagttacatattccatagcagatgccactggctaagccaaaagtaagtggcctattgaataggaattgctacccacaaagttctcatcagagtgacaaacatatccaggatctgctcctagttattttcagctggatttgcccatagttcagctggttccttaattatgaatttcaaataaagctaaccgtaggactcatttattagagcagttatactctgtttggtgcttgaattattaaagattccccctttcctcagaatttatccagttggcgaaggactttgaggatttccgtaaaaagtggcagaggactgaccatgagctggggaaatacaaggatcttttgatgaaagcagagactgagcgaagtgctctggatgttaagctgaagcatgcacgtaatcaggtggatgtagagatcaaacggagacagagagctgaggctgactgcgaaaagctggtgtgtattgttttccgtgctagaacagtgatgatgcaggagggggaaggcattgtctgacagtttccacttgccaaatatacctagtttcttcttccacattaaagaactgaaagtgacctgttctttaacagcttgcccatgattagagctgaaattgcagactaggaatcttgttcttcataatttgaaatttaaatgtttttgtcacttagacttgaaacttacttaacagacagatttcaaatgagaacttaaagaattagaggaaaagggagggagggagatcctaacgtacttgatctgtcacaagttattggccatccttcattgtttattttaagtgctacccggaatatccatccttacatgagtagctggtactttgtcatacatacaggcaagacaactgtgactcttcttttcatcacccctctctaattcagggtaaaaggctagatgtattcaaccagttgagcaatgtgactg

SEQ ID NO: 8380 - DNA, 1106 bp, Homo sapiens
cggatgactatatctggggtctccccgggcctgggaagcttctctggggagcattctcttggcctgacctgaccccctgtgcctctgtatttggaggaaccctggatgtgtcccttggtcagccacctctgggcttgcaaagcagggaagtcttctgcccgaggagtggtgacctctggagatgaggattctggatgggcacatgtggaggggctccatgtgtactttcatcccaggacaatgatagactgtccctccctcctcccccaggatcccctcaacaaggatggaactgaaggccgaggaggaggaggtgggtggcgtccagccggtgagcatccaggccttcgccagcagctccacactgcacggcctggcccacatcttctcctacgagcggctgtctctgaagcgggcactgtgggccctgtgcttcctgggctccctggctgtgctgctgtgtgtgtgcacggagcgtgtgcagtactacttccactaccaccatgtcaccaagctcgacgaggtggctgcctctcagcttaccttccctgctgtcacgctgtgcaacctcaacgagttccgctttagccaagtctccaagaatgacctgtatcatgctggggagctgctggccctgctcaacaacaggtgggtggctcccaccctccctcagccctgctcctggagttgcttgagttccagtcaggatgtctgcctccctgacccaccatagagcccagccaaccctgccctttaacccacccccacccccaaacctgccactcacagcagaggagttagggtgctgctgagcacccagttaagggcacccagcctccgatcccagcatagtccagaacagctcgacccccacccagcctgaggtatgagacattgtcaccctctctggagtgagctttaccttcattctggccactctgtcttgaccttctcgtcagttgggggatggggacagaacatctttaaagggtagaaactacagtataaaagccacagcccctgccttgtctctctgcccaccttatccatgcttcctctcacccatgtgctgggatgggatgccctgcccctgggcagccactaca

SEQ ID NO: 8381 - DNA, 2006 bp, Homo sapiens
tgctgcctgcctcatagtatctgccttggtcttgcttggggcgttccaggggatgctgttggttcaaggacaacaccagaatgaagagggtctcacaagacacctgttatcctcttctttcaccctatctcttcccacccccagcttccctttgccccacaaagttcccatgtgcctgtaccctcccctggtctacataggacctctagatagtgttagagagagaacatgtagtggtaatgagtgcttggaatggattgggcctcaggccaggtggtcttcaaggggaccagctaactgatcctgcccttcagagacccaggagttgggagctttcgctccttctccaagactcaggcctgtgggcactctataagctagttgatcttggctctcctgataacagaatccaatttccttccttccctccacaggtttggaacaaactctcccttcacttgttgccctgtagcactacagaaaccctggttcttgggctccactgagccccaggtcagtccccagccctctgggttggcctgctgtcagtgcttctctcactccttagttggggtccacatcagtattggagttttgttctttattgctccctcccagacactccctgtggctgccctttgtgattccctcagatctgccctaatcccgggcatttgggtgggggaatcttgcctttccctttcagagccccagggatctcatctggggaactgtcattgccagcagaggctgttccttcctgctgtttggagatgtgactcattcattcactcactccaccctgcctctgcatcccttaatggagaaacgggcctaaaaccaaacgggtaaaaagccctgggccatccctgtcttcctgtcccttgtctgcccagttgacacctactggtgacttctagggcactgaggagtgaaagcgcctagggctggagaatagcgctgagttgggtttgtgactcttccctctccctgcctcacaggattgtgactccccagcccctgccctcaaagcttcagacccctcaggtagcagcaggaccttgtgatcttggccccttggatctgagatggtttttgcatctttccaggagagcctcacattcttcttccaggttgtatcacccccgagttagcatatcccaggctcgcagactcaacacagcaagggtgggagacagctgggcacaaagggggaattccgttcagcatgggctctaaacccacagaactgacaaagcccctgcttccccaccccctcctcaggctcctgcgagcacacccccacccccaaatccctccctgttctacactggggacagcagaattttctccccgtcttccccttcctgccattttccctcccttgaaaggttgacactggacaaccttggggcagctgagccctggccgcctcctggctggaaccatgagaaggaagctcagtacttcccacagtgtccctgttgataactgtttttattaactgaattgtttttttcatggaccaaacttttttttgtactgtccccttattgatgttacccagttttaataaaagaatcttctgaaggatgggtcctcctacctactgtgagagagctcttccctgagctcttcttccttcaataccattagccacgcttgtagtgtttgttcattttatttgacaagtatttattgagcacctgctatgtgctagttgtgatgctagacacgggagataaagtggaaaatgagatttctacttttgtggacctcagggtcttaccttaagagattgctgtctgccccagtggtccaagcagcctagttgctggttgggattattgggcttcaccactggatcttaagagccctttcccgacttgctaggcaggtactaacaggttggtggcagtcattttcccccttgtccatctgagctccccagagcacttgttggctggagtgagccatagatgcccgtgatcccttaggtttgacga

SEQ ID NO: 8382 - DNA, 1618 bp, Homo sapiens
actcctctaccaaagtagcttcaattccacagagaacagaattggagatgacaagggagaaaactagaaagcaggtaaagcatagtcacaacagtagccatagtccagacaatacttctttgagttagatgtcatcagaaagcagaccagactgggaacacagtgcccacacctgggtctctgagcttaggtgtcttacagttctttcctcacttttctgtctttggtctcatcccacccaggtatcgaaggatgatcgcagtgatgtggagagcagctcagaggaagaagatgtgaccacctgcacaaaaagtccctgtgacagtagctccagcaatggtgccaatcgggtgaatggtcacatgggaggcagctactgggctgaagagtaaggtggttgctatagggacttcagcacacatggacttgtagggccactggcaacatactcctcttggcccttcccatatctactcttctgtgattgggagactgcaaggcactgaggagtatcaaagaagcaaatattttcactttgaaagaaaactgccattttgtatttaatagcctccaggttctttcagtaatgttatttgctctgtgtgtttttgtgtgtttgttgatgtgcgtttgtgcatatgcgtgagtttcattgccggggttggggcacaattgtggactggggccatgaggccttccctggtccccactgaacccaccttagttccacatttggctgcatcttgaattatgccaactccagacttctccttcttttttgcccttggctcttgacactctaaacccctggaccatctgaatggagcagccaagttcagtcccacatttctgtactgttcctctttcacagctggaatatgtcacatgatgaagttgtatagaaacagaaccatggatggatggccaggattgccgtggtccctagctagatccccttcctatcaatcacctgatagcaacagggacagctgccaataccctgctctttactcaatggtacccagggagggagcatgggaagagggtgagctgagggctggaggagggcaacagccactgggtgagctgttcacggtcttatactattgtttgtttgtgattaaaagtgcttcaacccacctctactgtctcaacctcttcagtgactctatccgcagtttcctgaatccataagctaattaagagcttttccaggtctgattcagaaggccctggacaccaaatttttcctttctgtgcatggtaggaagagtcagccagggtgcttacattttagagctttatgttttttaagaaaaagaagaatcacttgaacctgggaggcagaggttgcagcgagccaagatcgtgccactgcactccagcctgggcgacagaccgagactctgtctaaaaaaaaaaaaaaaaaaaaaaattaggtcatacttttagttcctcaacttgctatattgaatagactaatattgttgtgaaatatgaatgaatatgcttttgaaagtcagatgagaaatgtattttgccttctgaaatttgaacaattgccttgttaatacaaactggattggttggtgtagctaatctgacaaaagatgcaatt

SEQ ID NO: 8383 - DNA, 1474 bp, Homo sapiens
cacaaaaaacacattctaaatactagagataactttacttaaattcttcattttagcagtgatgatatgcataagtgctgtaaggcttgtaactggggaaatattccacctgataatagcccagattctactgtattcccaaaaggcaatattaaggtagacagatgattagtagtatattgttacacactattttggaattagagaacatacagaaggaatttaggggcttaaacattacgactgaatgcactttagtataaagggcacagtttgtatatttttaaatgaataccaatttaattttttagtatttacctgttaagagattatttagtctttaaattttttaggttaattttcttgctgtgatatatatgaggaatttactactttatgtcctgctctctaaactacatcctgaactcgacgtcctgaggtataatacaacagagcactttttgaggcaattgaaaaaccaacctacactcttcggtgcttagagagatctgctgtctcccaaataagcttttgtatctgccagtgaatttactgtactccaaatgattgctttcttttctggtgatatctgtgcttctcataattactgaaagctgcaatattttagtaataccttcgggatcactgtcccccatcttccgtgttagagcaaagtgaagagtttaaaggaggaagaagaaagaactgtcttacaccacttgagctcagacctctaaaccctgtatttcccttatgatgtcccctttttgagacactaatttttaaatacttactagctctgaaatatattgatttttatcacagtattctcagggtgaaattaaaccaactataggcctttttcttgggatgattttctagtcttaaggtttggggacattataaacttgagtacatttgttgtacacagttgatattccaaattgtatggatgggagggagaggtgtcttaagctgtaggcttttctttgtactgcatttatagagatttagctttaatattttttagagatgtaaaacattctgctttcttagtcttacctagtctgaaacatttttattcaataaagattttaattaaaatttgaacttttcaatgtttctcttccattattttcttacgttattactgtctctcaggatctacttttgcagtttgggaagaaaaaaatggtaccacttttttaagttttagttgaatagaagcattatcaatacatctcaccactagatggtagtgttgggctgatcttggatttcaatcctccctgaaggaagacaaatttttctggaaaattgcaggcaacttggcaagagaattaatgtgtgcattcaaaatgaggtattttaccaattcgaaatctagtggtggtttttattgtttataacactcaacattgaataattcaccttacaattatgcctagcatgctgaatggatttccaaatgtct

SEQ ID NO: 8384 - DNA, 1121 bp, Homo sapiens
tgctcttcctattacaccacgctgcgcccccagctctctccctggcactgagtggccagtgctgcagagcttggggagagagggcagccaaaagaaacttgaatgtaggtagaaactaatttggacctggctctactgagatgctgactgtacctcccctgggatgtaattcagaagagggaaacatttcactccaaatgtgactttggaacagacttcagttcagggaaaggccaattgatgtttgcacagtggggtcagtcataaaatggaactggaagggaccttaaaggtcatctggtgtagcctccttttataagaaaccacaacccaaagatattggatcatttgaccaaggttacacagtttgggggagaacagtggaggagtgtggtctgcaagtttagggctctaccacaccactgccaatccttggatgttggagaatcctcttctgtgtctaatgttctgactttctttattgcataggtatttcagtgtctgtagacaagatggaatcatctccatttaatagacggcaatggacctcactatcattgagggtaacagccaaagaactttctcttgtcaacaagaacaagtcatcggctattgtggaaatattctccaagtaagtgctgatcctggtccaaaaggaccatctgtctggagcacacattgccacctgtcagggaaattggtgaaggaagtacataatgtaaaataattttattgggcgcctcgtggattttaaacactatatgaggtactgtggagaaggaggaggagggtaataatcagaagatacattctattctttgaatttttgtttagtttgtggaagaaacagttatagacacaaaaattattttaaaaaagataattatgaaataattataaagcaaaatatcagcaagtctaaaatgaataggagtgaggattaggtacagaataagagacagagcatcacagacaggagctcatcaggaaggctttctggttgagatgagtgttgaggcgagttttgatttggttgaatggtgcgttaagcactctctatacctgcactttccaatgtggtagccactatataggtggctatttcagtttaagttaattaa

SEQ ID NO: 8385 - DNA, 1134 bp, Homo sapiens
gtgtttttgggtccagcatgcaacccatctataataattatatttataaattagtttttatctaccatcattgactctgctatttactcactgttcgaccttgggcaaataacttaatttctctatgcttttttccctccatctgtaaaacagaagcaatcttaattacagcacaggattttctgataattaaatgaataaagtgcatggagtagtctgatacatggataatgctatatacgttttagcaattgttgatcattttagtttatctgtaattgtcaaaacttatctccctcggaatgataactcttgcttaaaaccatgcggacatatttcaaactggtagaaatccttaaaatctttttataggtgacatactgcccagagttcctgagaatagaatttaaataattcccatttactttcagtgtctgtctttaatacaggtaatgcagagctctcagaagatatatgtaaagaatatgaagtaatgtattcttcatcttgtgaaaccacaagaaatactacaggcattgaagaatcaactgatgggatgattttaggaccagaagatctgagttaccaaatatatgatgtttccggtaaactttatggttttattgttaaaatgagaattcagtacaggacaccccccacccatggtctctttatacttgttctgataaacctatggcattattttcttatttgaaaagaaggttacgttaatgaaatgttagttgattgttacattgttttcagataacatgacttttgtaatgttaagattgtttatgagggttctattaaaggaaagcgtgaaattaaagataacagaaaaaaaggcggggtggctcatgcctgtaatcccagcgctttaggaggcccaggcgggcagatcacttgaggtcaggagtttgagactagcctggccaacatggtgaaacactgtcctatactgaaaaaaaaaaattagctgggcatggtggcatgcacctataatcccaagatcatgccactgcactccaacctgggtgacagagtgaaactgtgtctgaaaaaaaaattttgtgtgtctatatataaacaactgcctactttgaacatagagttgaagtgatatggtaagca

SEQ ID NO: 8386 - DNA, 2223 bp, Homo sapiens
cttggtaaggattataaacttaattactgcacttaaaatgaaacattactttttttaaacaatgtgtcacaaatgtaggtctgtattacttgtatgcttgtgtgacttactgttagtccagctctaaaaatttaaaggttgtaattgaaatacaagaaaagagccttcttttagaagaaagcaagtatatttttgcttttacttcaaatgttatttaaagtagaaatttaatttgtagatataacctttaaaaattttctcattaagacaatgtttttaatttaatttgcctcattacatctaatagttcccatttgatggcatgtatagggaagagtgagagagtgtgtgtgtgtgtatgtgtgtgtaatatttatatatattcacagtatgtatttagcatttattttattacagcagatttaaagtttgtatctaaataatgcctatgagttgtgtgaagctcttggcttttttccaacgttactttgtaactaatgagggtggatgttcattgtagtttatttatttggttctttagatggaggaatttaaaaaatcaaatttttctcttcacctttatgacttgacatttccttgatctgttggaggctaaaagtaggtataaatgatattgaatgttgggtatagtgatactctgccatagttcttactgcatgaagagaacaagagtcacacaagttcaccactttgcacttcatagagaaggtacatagagacattgcaaaacctgtctccatttgctatcctgataattaaggttttcataatacctagggcctgtctctgagtaattttaattttgccaaatacactgacatttaaaatagtgatccatctaaatttttttcagctgggttttgaggaatataagagctttcaatgataaaggtttgttgtagttgtcttatgtgctgaatttgcagatgatcagatgctgtgcagaattctgatttatttttgtttcctaaaattaagatagcttgaatattatttcacattcctttttcttttttaaataaacaggtttgctttggaaaggcttaatgatggaatgttagcatcttcactagggtaaagaagaacaaaaagaatgttgctggaacgtaaaatagtatttaaaagttaatgaacacttctctagttttcttagttatggccttaataattagtctcttggcttaaatgtccactggttttactttgacacagttgaacaacactggggttaagtctctggtatttaggctggcaatatatatattaaccatattttaaaagtaccaattttgtttttacagaaaagataaaactcaaaagagaacagtgtattccttctgaggggcttttataaattattaactataatatatgatggattttttcctaattttttatatttccttacaattttggtggccattaatttaactttaggcttttgggcatatgctagtctgagcttccgaaaagatacatatatgtttcccttttcattagctgaatgaggatattttaagaagttgaaagagaatttattttcaagttgtgagtaaatcctcctttgaaattcacctgattattagataacttaaagtttatttttaaaagctgacaactttttatgaatcttcgagttgacagttcctaaaagcgtaactcagatattaatgggctgtgtattaaatggttttattttcagttttgcagcacagaacactgttgaaatatccatatcaacttgatttttttaacctaattcaggtgtcctttgcatctcttaaatgttgggggtgggggtcagagccagttatccggcttctgttttgtcgattgcttagatttgttcctgttgtcaaaactgttacccccaaaattggtgtgacacatgctcatgcataaaatgttaaaatgagtacatccttgtatttgtatttgttttcaacatcgccaaggtgctatgggaaattaacaaaattagaaaaaaaataaaattattaaaaagcaggactggtttccttttctctaggtggtgtatgtctaatgactacttctgtctacctttcagtattatatgttgccctcgctaattctattattattattgtctaagttgttttttggatgatgagggcagtgggaagtaatggtgtttcacttaaaacaagggcagagagacaagatacagctttatgatcctgg

SEQ ID NO: 8387 - DNA, 1289 bp, Homo sapiens
gcacagatgcatgttagactcagtattctgtccccacccacctccccacatctctgtcaactctttgtctggtgtgttaaggagtcacacatcattctggacttcattttcctcctccgtaaaattatccctggcttcttttatttttgtttttgatttttatttctaattggtcttaatcaaattataaataaaaatcatctgaacgtcccctttacctttttttttttttttaaacaattgaggcagtgatagttcagctcacagtggtaaacactttcaagagccggaagctaataaatgcaaatgtttgctttttcagatatccacacagaagcagttcaggctgcactggcaaagcataaagaacagaagatggctttgcccatgccaaccaaaaggcgatccacatttgttcagtctcctgcagatgcctgcacacctcctggtaggtttatcagagctttttctctctgacagttaataccttgatgttcctgaaataagttctgctttttcttttctgaggtaagaaccagaatcttctccccgccattagaggaatgtaagagaacactctgaggtggcagattttgcttgtcatctcgtaaacaacacacaaaaagatgtcttaagagtaaaactattcaaaactaaacaaaaaaactttccttctgaatttccagtcttttttttttttggctgtaatccccagacttatgtagtcataaatacaggccaaagcttaggccaaaatcctgctgtgttaaatagccactttcattgtcacccaatatactacttgtagtcatatatctaattcatttgtactcctaaaccaaatgcttcgtctctgcagcaggcatgagaattgttggacttgggacaaaagtttttgtgtcattaacaattatggaagagcaatcatgcaaagttgtgatggacctgcaaaacgtatataagtgtgtttatgtgtgtgtgtgttaatgtattttgtacacatttatttattttttaagaatctactttttataacggggtcatgagatcagtgagaactaggtatcttcatcccatccctgttcaccagacttcaatccttatgctccctaaggtaaatttaaagagttataacttcatatttgaggaataactagaaacaatctaagttgtcttgtctgttcagaatctctcccaaagtttttttaaaaccttaaaaaaaattttttttgaacttctctagtggaagctcgaaaaaaattttttttagatcgaatcccagacaagat

SEQ ID NO: 8388 - DNA, 1334 bp, Homo sapiens
tgcatgttgcatttttttcatctgttgtacatagttgtatttttatctaatgccattttagaattttctaagggaatttaatgaattcacatgaaaggggtagtctgagtgacacagttccccactccgtactgtattttgccattctgccgtagctagatgttctgtggggtttgttaacatggaactactcagctttctttcagtcaacccataagcaaatcagataacccactgactatgagaattactttatatagataattcttgactgtaaaacattttgaccagtgttttacaacatgtacataagaatacacataattcaactagagatttgaagaattggcttgtatagttataacaaccacagtagaaacatttctactttgagagaatttcaatattctcttaatgttgtgtaattgattaggtaactaaaaagcgcaaattgttggcaggttttgctgcacattgttctatgtctttgttggctggtgtattttataaactaaagctgcctatgtttctttttaaagctcgcattcccagaatcagcttaggcttctatgaattcagcctgtttctaaaagctgaaaatctcagtttaaaaatcaaaatgttaacacaaagctaagattcatcagagcccaccctattctaaggaaccacaataacttactctggccccagtgttaaaacgatctttcagatttagagtgactatgtaagaatttaggatttcctcttttccaggcacattgtaaactgtgtctacagtttatccatataacttctcttctgaaaactgaggagtgtcctctgttcttccagttcacgagggcagggggtttaaaacaagaatgataggccaggaaggcagtggggatccaccatcacatggaactgtaaggccatataactacacaaaactgaccaatctgggttgccaaagcagccaggcttatgctgaaaccggggaagtctgacatatgcaggaaactcttttgaaataactttggtgcccaggccaagtagaatgagatgagactgagtttggcctctggctcggtttcctttctttggtctgatacttcatgtatttgaatatagttaaatcgtattatttttttcttaacagaaatatttttaaaaatgaaaaagtactcaaaagtgagaagagttaacttgtcaaagcagaatggttctctttgacccactctggtctattgtgtaaatatttatttagactattttaataatacatattatttaccccactgtaacatcatgtaaactaagtatgtttttaaacaatttttaagacttgtaat

SEQ ID NO: 8389 - DNA, 1207 bp, Homo sapiens
ggaaggaccagcatgctaatcagtgtcagtgaatccacagtctttacttcctgcctcataaagggccaggtctccccagtaccaagtcctttcctcatgaagttgtgttgcctcaggctgtttagggaccattgcctgtcttggtcacatgagtctgtctccttactttagtccctgggcaatccttgcttaatgcttttgttgactcaacaagggcccgaggccttaggttttctattaaggtctctgccccaggcatggtgctctatatcttggccaaataaattactttccttgaatatccaggaatcttttagtctaaagcaatgaggagttatcacctcatcctcaaactccaacaagatctatgccttagtgttgtttttgttgtctgctttgatgtaaaagcaagagtatttggagcaagaagctgcaatgcgccaaatacacaataggccttttctttatcattcatacgacatttctggtttaggtgtatgtagttgggccatgttacttgtccagaggaagagactaaagatataagaataattttttagtcctaaatgctgttttgtttactttctgtcaagatatttacccgtgtcaaattcaaactacagtactgtgtaattatgtataaagtttttttatttatttgaagttagactagatatacgtttttaaatttaacatctggctggacagtgttctattaactcattgaatgtgtttcctttgtcttgtgttaataaatattgatgcctgattctgtttaatccttcacacattgggtggaggctagggaattgatagattttaaatttaactttagatggtaagacccagtgatagctggggtagtctaaggaaagtgaacacagagatccagagtcagtgctattaaaggatactaggtcagggaatcagggtgtcactttgaaaactaaggagcctgttgtcaggactcttcaaggtaataattatagtttagtcttcctcccactcatgtagcatttggtagttgtattttcttttttaattttttgagacagagtctcactctgtcacccaggctggagtgcagtggcacaatctcagctcactgcagcctccgcctcctgggttcaagcgattctcccaaagtaatccccagtagctgagattacaggcatgcgccaacatgcctagctaatttttatatttt

SEQ ID NO: 8390 - DNA, 1404 bp, Homo sapiens
atcccagcactttgggaggctgaggcgggtgaatcacctggggtcaggaatttgagaccagcctggccaacatggagaagctccgtctctactaaaaatataaaaatcagctgggcatggtggcgcacacctgtaatcccagctccttgggaggctgaggcacaagaatggcttgaacccaggaggcagaggttgcagccagccgagatcgtgccactgcactccagcctgggcggtagagcgagactccatctcaaaaaagaaaaaaaaaaaagaaatgctgttttattccttttacatgtagttcacctaaagtaaagtagtctgcagttaccaagtagaagtgcattcatacctgttttagtaaatagtgtttgtgggctttttgccactcctttgaattagtgtattatataaccttacaatagctattttctctttttgattaaagttgccattgccccaaatggagccttacagttggcaagtccaggcacagatggagtacagggacttcagacattaaccatgacaaattcaggcagtactcagcaaggtacaactattcttcagtatgcacagacctctgatggacagcagatacttgtgcccagcaatcaggtggtcgtacaaagtaagtatgctttctgtctacagaaagtctcctaacactgtcagagacacttactaactaactcattcactcttgtttaccatctagctgcatcaggagatatgcaaacatatcagatccgaactacaccttcagctacttctctgccacaaactgtggtgatgacatctcctgtgactctcacctctcagacaactaagacagatgacccccaattgaaaagagaaataaggttaatgaaaaacaggtaggtagtaaaatcgtagtaccagaatgggtaatgtttttacaaatctcacaacataaccagatgttaactggaactgtatacagtcatgggctgcatgacaatgtttaagtaaacaatggaccacataaatgaatgacggtggtcccataaaattataatggagctaaaaagtcctgtgctaatgtcatagtgcaacacattactcacgtttgtggcaatgctggtataaacaaacctattgtgctgccaatcatataaaagtgtagcacatgcaattatgtatagaacataatacttgatactataataagttaatatgttactggtttatgaatttactatacttttaatcattattttaaagtgtataccttctacttttttttttttttttttaaagttaactgtaggccaggcatggtggctcacgcctgtaatcccagctgaggcgggcagatcacgaggtcaggagatcgagaccatcctggctaacgtggtgaaactccatctctactgaaaa

SEQ ID NO: 8391 - DNA, 2454 bp, Homo sapiens
cagctcagtttatccttcggagagacaaggatatgcatgattcttaaccaggctatatgttaaaaaaaaattggaaaatgcaatacattttttattatacaaactacagaatgagtatgcaagttttatttatcaaaatgtaatggatttttaaaggctgagaaattttccttatacctaccttttcagttattttaattataccaaattatcaactagaatagcttcatccatatgaaatataaaatgaagagacacctagctctatcaggcttaggattctttgaacttatttccactttaatttctcagtggaagttaagaggggtgagaaaacaaagaaggggaaaaactgacaactaacaaaaccagcaccacatcgctaggtggtgcttactaattaccttctcaggattttcctcagattgaaaagcttatgaggatttcttgggagtcttaataacctgcctgttagtacagagctttcctgatgatatttactcttgagcacatgtggttgtaaaaccttaactttctttctccaggagggtggtgatagaaacagatggtagtatttatgaactgatgttctcgtgaaatgttgagggtggggagaaaagactttaagggaggagagccatctattttgttcctaaagccacctctcagcagaatcgtcatgtttttctgatgcaccgctctgcttcatgcccaagatgacttgcgaggcaatctcaggagctgtggacttaaccgttgcaaagcacactgtctttctcagcgttctctgcaagtcagtaggtgttagtatggttgcaaagttcactgtctcagcaaagttgaactgggctacctctctacagctgtttcctcagagggaaaaatcttgagaccagatggtggagctctggagtcagaggaaatgggtgtcttcagcacaaagctgctgcttttacttcagccacttctgacatttttacataccgagcctgagattgtgtgattatctcaaatcaaatcactttgatggagataaataatcaaaactgttttatagtcattgatttggtgagaacagtaatggaaaatggtgttgaaggacttctcatttttggagctttccttccagagtcctggctgattggtgttcgctgttcatctgagcccccaaaagcattattactgatacttgcacacagtcaaaagcgcagactggatggatggtcttttataaggcatttaagggtacactactgtgtttcactgaccatacatttttcttagcccctcaagtaatatagcacagagttatgaatgacaattcccctaaccattcctcttcatatctgcctcttccccttaccatcgtaattctccaaactggtcataaaggcactctgtgaagatattggggactgacatcttaagctctcacctggctgcagtaggaaaggccaaactgacgacaaaaaaaaaattctttataaagatgatatggtaacatgtatctttgccctgggtctgggtgggtccagtcagtctcagatttacaagcatttaggagcctaggtaaaagctgctagtattcttttaaaagttatatttatgacttgcaatgatagaaaactccttccaattaaatggcattttataatattatgtgtgtacttcacagtgttaaaaataccctcatacgttattgcatttgatcttcacagaaagtgcattttaaccagtactctgggtgcaataaataatatgtagaaatttaagtcctccaattccagcatatccagtgagttttgacagtgtgtttatgtggaatgtttaaggatatacaattgtactttatataaattggttcttgttcttcttaaatgtgacatgaaataattgtgctgctacattatactggaaattaacaggggaaaagggaagagctcttggctcccttgaggttctgctagtggtgttaggagtggttacaactgagcttttagtaaccatttaaccgtatgtaaacttggtttctaattaaaaaaaaatttctttttccaatttggtttcctgggtatttttttaaccttgaaataatttattaatagggttacaacaactttgatacaaaaaatactgaaacagcaactaccacctggaatggcacactaagtccacactgttaggattttctccttagaaaggatagagaaataaatggatttagtcctcagaaagcttggattaattgcagataccaggatattaatttccatttacccacttagtcaaatagttttaccatagctaaaggtcacatcattaccatgttgaaacttgggaaaaaaattttattctgcttttctctaagctgactattttctacctgtagcttatttcactgtttcacttttacattctatatgtgctgccaatgaaaaattagtatttgaagag

SEQ ID NO: 8392 - DNA, 1632 bp, Homo sapiens
gcattttgaggtaggggaggtatccattcataaaatgaatgtgggtgaagccgccctaaggattttcctttaatttctctggagtaatactgtaccatactggtctttgcttttagtaataaaacatcaaattaggtttggagggaactttgatcttcctaagaattaaagttgccaaattattctgattggtctttaatctcctttaagtctttgatatatattacttgttataaatggaacgcattagttgtctgccttttcctttccatcccttgccccacccatcccatctccaaccctagtcttccatttcctcccgccagtctccattgaatcaatggtgcaggacagaaagccagtcagactaatttccttctttcctcgcacttctccccactcgtcatcttttaactagtgtttcacaaggatcctctgaaaccctctctgtgccccaagtacagatgccattacttctgctttcgtatctcctcaggcaaaagtggagggtgccttatgggccctcctcataggttgtctctgcatacacgaacctaacccaaatttgctttggtgccagaaaaactgagctatgtttgaacaaagatgtcgtgcaaactgtactgtgaacaacagttggtttaaaatatgaggggcaaggaggaggatgcatttcaaaagcttgattgatgtgttcagagctaaattaagaggagttttcagatcaaaaactggttaccattttttgtcagagtgtctgatgcggccactcattcggctccccagaattcctagactgggttaatagggtcatattgtgaatgtctcactacaaaatgacttgagtccagtgaaatctcattagggtttaagaatatttcagggatccttaatgttttgatttttgttttctgaaattggattttattttattttatcttataatttcagttcatctaaattgtgtgttctgtacatgtgatgtttgactgtaccattgactgttatggaagttcagcgttgtatgtctctctctacactgtggtgcacttaacttgtggaatttttatactaaaaatgtagaataaagactattttgaagatttgaataaagtgatgaagttgcattacacctcactgcaaggattctttacttagcttgtttttagatttcttctatatatattttatttatatcccatctagaattcagctaggtgctgctgctgctctgtttcctttgatgacgctttgaaataaaggcaggagtacaagcctaagacttgatcatttcatgaattccattccagatgttcaacttttcatcattttactccaacctcttacaaattttggaatttcggacctaaacttagaaatgagggaactattgattctcctaacttgctctaaagtttggcttgaagaaaaggttctggtatagcaatttgtatacgttgaggatgacctttagtttctccaatgttctatgtggagaaatactgaaaactcatagaatctaggttgccaagatagattcctcagctcttttatttattttttgagacagggtctccctctgtcacccgggctggagtgcagtggcagtgtctgctcactgcaacctccacc

SEQ ID NO: 8393 - DNA, 1524 bp, Homo sapiens
tttgggaggccaaggcaggtggatcacctgaggtcagaagtttgaaaccagcctggactacatggtgaaactccatctctactaaaagtacaaaaattagctgggcatgatggcacgcacctgcagtcccagctacttgggaggctgaggcaggagaatcactcgaacccaggaggcagaggttgcagtgagccaagacagcaccattgcaccccagcctgagcaacaagagcgaaactccatctcaggaaaaaaaaaaaaaaaaaaagtatattctaacagacagatcagaggtctaagagatcctcccttgctattattacctgaagtctgtagaactgtttacagatatctccttgacaggtgtcctttatcttactttatctgtacagtaatcctgtgagaaagacaggacagaaaccactgtgcctattttacagatacgaaaactgagacacaggtaaaggggcttgtctgtagtcccatagctagcagatggctggagccaagactgaggctcgttcttcaatgctgagccagggctccttccgctgcaccacaagaacgctagaccactcgccaccagccttctcattccctcttcctccattctaatcatttctagctggctggcctccacagagcataggaaaacagccagggccgggcacggtggctcatgcctgtaatctcaacactctgggaggccgagccgggtggataacctgaggtcaggaattcgagaccagcctggccaacatggtaaaaccccatctctactaaaaatataaaaattagccaggcatggtggcgcacacctgtaatcccagctactcaagaggctgaggcaggagaattgcttaaatctgggaggcggaagttgcagtgagccaagatcgcgccactgaactccagcctaggcaacaagagcaaaactccatctccaaaaaaaagaaaggaaaaacagggccaggtagccattgtggagagagcacacttaggaatcctgggatgttagtgttaaaagaaagctcctggagccagtgattctcaggtttgtcccagaacccttttttctaagccccatataaaaggtagattaaaaaaacaaagtagcatgagtgaaattgagagagggacaggtaatgccttccagcccctaacttctaacaatctggaagcacaacgtgaaaatcacgtagcccaaccctatcattttcatattatgaaactgagtccaggtaagtgaatctgtccaaggtcacccagcaaggtatcagtagccctgagggtaaggactctgataaggctcgggagggtcctggaaagcctgaggcggcaggaagagtgtgcagagttgagcgtgtctggaaggctgatccactgctgggcccacatcaaagcccccatggggagcagacccgactgcacatggctcttttgctggaagaagagcatggctgcgcagaggactaaaatttcatctgggaaggcttcttttgactgtcagtagcaggatgtcac

SEQ ID NO: 8394 - DNA, 1202 bp, Homo sapiens
acatattagagatgggaaaggaactcctactgtgtattagacagcagccaggtgctttatatatgcaaattcagccttcccaggaacatccctcaaaagatattgttatctctagttttacaaaatgaggaataaaactgtcttctagggcaagattttaaggtaaagtaagattacacagaggcagatatgaaactggaacttaggtcatatctaatgccaaagccccatttttctctttctaggcaaggcttagttaggagtcaggtactatggaacaggaagagaaattatggggtgtgtgtgtgtgtgtgtgtgtgtgtgtgtgtgtgtgtgtttcggtaaagtcaataaactgcatcaagtcagtaagtgtatttgaaagctacaaacacgggcatttttggttgcttttgggttatcccattcccactccctgctgatagcaggacgaaaagatagatgttacctttactaattttgtggtcttctgttaaaaggagaaaaggaaaatgcctggagttccaaatggaaatgtttgccacatagaacaggaaccacatgggggtcacagtgggccagaacttcagcgcactgggcggtaagtcctgggacgtttcacagcgatgctgcttattgggtagaagttatgcaaaggaatgaggcatcttctttctttcagcctacttctctgtggtgggaatttattggctgaagaatgacttttcaaatggaaccactgactagaagtattatgaatatatcaaatatcgtattcattcattcaagtttctcaaatcacctaccatgttttgtctcacctccagtccttcctaccattgttccctctgatttgaacactcttccctttcctcatctcctggctaactcctacgtacccttagtctcggttcttgtgtcacttcctttggaaagccttctaggactctctctggatgaggttaggtgttcctgctatgtaatatcacagtattgagctctgaccctcccttccccacattacagcctttatcatacttcattattattggttgatctattgtcttttctgctaggctgtttattccaaaagggcagaggctctattatattcctaggacccagcacagtgccctgaacagagtaggctctcaatgtctgccaaatgaatgaatatttttagaataatgtctgttctgtag

SEQ ID NO: 8395 - DNA, 1182 bp, Homo sapiens
agtgaattgactttttaaaatcattatttagtgtctctatccctggtaattttccttgctttgaagtctactttatctgatattaatataatcatcctacctttctgtcggttcatattttcatggcatttattttccactttttacttaaaagacatttttcccttgaaataatttcagatttatagaagtgttgcaaaaatagtaaagagagttcttgtattttcttcacccagcttcccctaatgttagcatcttatataacagtgatacatttgttaaaactaagacatttacattggtataatactttattaggtaagctacagacttcatttggatttcaccaaattttctactaatgtccttttttctgatccaggatccggtccaggataccatattgcatttaacattctatttttaacttacatttatcgtatttaatgtgggtttctggtagatagcatactgtatgttctttttttttttttttaaatccattctgacaacctctcttcttcttattcctttttgaaaaaattgtattgtggtaagaacattttacatgagatgtaccctcttaacaaattttaagtgtacaatacagtattgttaattatatgttcaatgttgtacaggagatctccagaatttattcatcttacttaactgaaagtttatgcccattgattagtaactgcccatgacaatctcttttagttggtatgtttagaccaccttcatttaatgtagttattaatatgtttgggtggtctgtcattttatttgttttctatttccttttccttcttttggattatttttaatattctattttttttttactgttttcattatatagttattttagtgtagcactaggaattacaatgtacatacttaagtgttcagtctacttagaattaatatattaccactttaagtggaatatagaaatgttagtaccaccaggtgcagtggtgcacacctataatccaaacactttgggaggccaaggtgggcagatcgcttgagcccaggaatttgagactagcctgagcaacatggtaaaaccctatccctacaaaaaatacaaaaattagtgggcgtggtggctcatgcctgtggtcccagcttctctggaggctggggtgaaggattacttgagcctgggagttt

SEQ ID NO: 8396 - DNA, 1192 bp, Homo sapiens
tatttgtctttcttcaactggcgtattttacttagcataatgtcttcaagggtgatcgatgttgtagcatgtgtcatgatttccttcctttttgaggctgaataatattccgttgtgtgcatataccacattttgtttccattcatctgtcagtggacactttaggttacttccatctttggctattgtgaatgatgttgctgtggcattttgtttcattttcattgtaaaatgattttaaaaatgatgcttcttccacagcattctggcgtctgtccggaaaggctccttgtagagtgctgggcactggctcatgacaagtgacacttcctctcctcacctttttgatgccagttcattgcacttttgcttcttttatatctccctcctagtataagtaatcaaacccaagcagagactaatgaattttttttcctgccaattcaagtccattctaggactgacaatttccaatcaatgttctctgaactgtttgtttcaagacttgtcaatctttggaaatttgagtttgttctaatactgccttatatgttcagattctctttaatggctctgagagtccttcactacatctcattgtcacacttttctctaaaataatttgttacaaagccttgctaatggcagcttgctgtgcccagggtcctgaggtcccatcatcaagcgttttgattcatctgccattcaaaagactattgatatcccgagggcaagttttagatacacttggtgaatttcattgctttgttcctttgacttcttcctttaaacacccaggctccctccctctgtgggaaggcgtatttttggctggcccttttctatctgtgccatctgtcacaggggtcattgctcagaggctggcttcctccctgctgggagcaggtggtcaaaaccaatggctattgacagggtcaggttggggcagcttaccaatatgccccccaagcagtatgcatagttgttctccttcagaggaacaagagaaaaccttacttgggggtctttttctgcattaaagaggaaaagatgcagatgtgattctaagttgtttatttattcttgtggtccagccacttgtcaactgtcctgtctgtgctcttgtctctgcgtacttcaactggcactgtactttaagaccactacctgaagcagcctccagtgtagcaag

SEQ ID NO: 8397 - DNA, 1114 bp, Homo sapiens
tggaggtctttaatcttggctgcagaactgccagtgtaaccctgggcaaattcttgtgtacgggtctcaatttcctcatctatcaaattttgttttccaataattcttccaactgttattctaatgataaaagttatagaagattgacatggaaatgacagacctgaggataattcattttggactgttctggaaggaaagaatgagaattataaggaaaagtgtggattcagttgtccagactcacccaagttcttgtggccatggaggggtcctggttgtagttaaaagtcagaaggttattttagttaaaagtgagagatagaaggatgtatttaaaagatagagatagaactcacttaagcgagttctcatggagccacagttcttgggaactgcaagtcagccatggtacttattgaacgttttcattgttgttaatgtcgtgacgcatcagattctcaaacaaatggttttttgtcaaccaggagtaaaagagcttgtccctcttggaaagccaatggtgaatgagctgaggagggggcagcttgtgtggagtatgtgtatttatctgtattcttttccataggtaccattaaatttgtctggcttaatttaatggggacttctgggacctgcagagactgtaaagggcgagggtaaggctcttgtcgtctgttcaggctcctctccttccagtggaacttcctcactctctccctctcctgtcagcctctccccttttccaacttgtgtgtatgttctaccgccttctcgattttctcttccctgttgttttttcttctgcctctcaaccacctttccttccaggtcatttgagtcaagttgaaataggcagctggtgttacccacttcctctacctggggggcccaatctgtgtctgcagtgctaggggctttattctaacactctggaacctctgttttctttctttttttttttttttttttttttttttttttttttttttggttaccttttttgtttttgtttttctcttctgtttctgtgtaggtctctttagtcagccttatagctaatgccctgggctactcggaactaggtgccataaagtcccttaggaccctaaga

SEQ ID NO: 8398 - DNA, 2805 bp, Homo sapiens
agatccggcatgggctggcacccggggccttaagaactcctgctctcttgccacaacgcttttgtctcctcgctatctgaatggcaccctccttctccctcactctctccatcccattctctgcattctcttggttttctctcccttttgctttgtcgctgacacccctgcccaccccatgctggccctgtttctctcctgcccctccctccccagctctccatccctcaccctctgtgcttctgtctccatccctggctctccagcgtccctggccttttggtccctgagctttaatgcctttccctgccttctgttcttatttggactgcagtggccctttgcaggagctctggaggcccaggggctgaggaggagggttacccctctacccatctgaaacctagggtctagggggatcaaggaaaaaaagtccccaaagaaggggaattttttgtttgtttttgaggggagatcccagaaatgtagcttgtttcatattttagtcttcttatttttgtaaaatgtgtagaatttgctgtttttctttttcttttgacaactcaggaagaaactgacctcagaaagaatgttagactttggctgctctcctgtgtgcccctcacacctgccccctcccccccactccatccaggggaccaaattctcccagacactcaaaaaatgagacttacggggaaggggagaggaagacccagaggcctcagtgaaaccccagctattcctggtcagaagcagaatgtattcctaagggcttcctccccagggccgaggcctaggcatgaatgtggggagtgggctgtggggtttgagagaagggaggccttattcctctcctgctgctccccaccccctgccccacccaacccctccgctgagtgttttctgtgaagggctatccagagttaggatgcccttgcccaattccttcctgagacccagaaggtagggtgggagggcccaaatgggaaggtgacctaagcagaaagtctccagaaaggtcatgtcccctggccctgccttggcagaggtccccagtgacttatgctaggaggattccatctgggtagacagtctggccacaaaatcagctactggacctcagccatctctgctggaggctctgaggaggagtgagcatccctcacttgtgggggctctgtgaggaaatgtgccttccccattcccccggagtcctaggtctggagctccagggctgggagagggtgagggagatgggcaggggtgttttctctgaccttgggggcttagtctcagtcctgcctgaactttccactaggcttggaacccttccaagaaccatatttctctccttcccaccaattttcccttgatgaggctttagcagtttgctcccaccacccccagcccatttcacaactctgatcttagtccaaagcaggggacacgcccccccaccaccactttttctctctcccatctcagcctcctgtgcagttccttgcctgcccgtgcatttcctagagtctactgcctcccccctggctgggagggtgtctgggggggatctttcaggggccctggcacccagggcctgtgctggcctaggagtgctgaccagaaggctgctctgttcccccccacccccgttgctttctggccccctctttggagccagccacccacagggctttggtgcctcagaagcagtgggctgccgggtcacagccgcaggctgcaaaagaccctcggagggagcatggagtgaggggttctctctcaggtgtgtatgtattggggggtgggggtgggtggagggtgtcagggaagttggggtgggatcccagccttcccttcaagaggcagggagctctgggaggtggagtccccaccgctttctctactaggctcctcctgttccccaggcttggggagctttgcacaaggagactgcccccagcctagtggcacctacctcatgggctctggggcaggtaggggaagggccagtccagctctggtaatgctggggggaggcataccaaagaatccaggggcagggagtggggagggtgacttccgagctggcctctccccttcctctacccagactggggctgggatcctctcctcccgctgtaaccatttctacctcattttgctgcgtgttgtacatggacgtatttatctcctgtctgacgatgctctgcagttgtggtctgtctacctcagaagagactgtattttaaaagaaagtattacacagtattaaagcgatgacatgtggtttgcagaagatttctcgggggcagtgggatgtgggagtcctctgggagatgtctggacacctgtgtatgctggtgccctgggcggggtgttcctaatcccctagtaacaaggagcaaggactcctgtgactcactgtgatacagtgagtacctacaggaatgggcactgaggctatggggaagaagccatgggtaaggggccttcctgccgttctgagctctgacattcagcactggggcaggctcattgtatccccagagccacaaaataggggggcaaggaagggctcacatgtttgttgaatgagtgaagaaatgaatgcatggaggaagggggttgctgaagagagggaggagccatccagaacctgcagcagccttcattgaatagagctagggttatacttgtattccattctcagtggagataaagtggatagagggcggggtgtggagacggccaagttccaatgtctcaggtgacgtggtgtcctttgtctaccatccccccatc

SEQ ID NO: 8399 - DNA, 1126 bp, Homo sapiens
atgagacaggtgctgtgtttgggctgtgttcagagggtcgctgggacacaggaggccctccaaggctttcctgtttggtggtggtagatccagctcattgtggttctcccgtgcagatgagcaagtcttggtcaggatcaaagcagtgctgcacacaaagctggtgatagctgttaccttccccaggcatatgcctcctctttcctgagtacctcacatttcaaatttgacataatgttcagaatcctacagttcacctaaaggaaatcaggagcagtcctaagaaagaaatggtgttcccctgtccttactgaggtcccaaactggtagaccactataaatgaaaggatgctagatggggcttcagggggcatggaggtgggaaatgtgaattcaggagtctaacctgattttgtgttgtatacactcatccttaccaaccttcactgttttgctgatagttacactttttctgggactcatctgtggttctctgcagataatggcacctggacacagctgtggcttgtttctgactatcatgagcacgggtccctgtttgattatctgaaccggtacacagtgacaattgaggggatgattaagctggccttgtctgctgctagtgggctggcacacctgcacatggagatcgtgggcacccaaggtgagtggactagcgcaggagcggcgaagtggtgtaggcatgaaaggtccgcagtgtcctgatttagttcctagaattcctttttactgaggaagttggggctggacctcaggaactctagtttaatttaaaggaaaggaggtttgagcttcacttaagtgaggtatctacagggtgttcccttcacctctgtcttgatagaactccctcaggaaccctataatatcaatattcagctacttgtcaatcagtggcttgacatagtcatttgttacgaaggagtaatcatcttagaatcccacaatagacatgagaaaaaatggaactaaaaagataaaccagtgtactgggaacatcagtttagtgatttccatgttcattgatggggacagctggcttaaaggccacttggtggattagattctgggccttactaatctgggaaggttttcctggagg

SEQ ID NO: 8400 - DNA, 3592 bp, Homo sapiens
aagggagccttgcagagcatttccctaaggtcggccgccgggtggatgtggatctgccagactgcactgagcgggaggtggcagggaaatgagtgagagcctagggaccagaaaggcttctccagggcatgaccgagctgatggctcctgggtctctgcacaggcactgcgggtgatggggaagatgatgcgagagtgttggtatgccaacggcgcagcccgcctgacggccctgcgcatcaagaagaccctctcccagctcagcgtgcaggaagacgtgaagatctaactgctccctctctccacacggagctcctggcagcgagaactacgcacagctgccgcgttgagcgtacgatggaggcctacctctcgtttctgcccagccctctgtggccaggagccctggcccgcaagagggacagagcccgggagagactcgctcactcccatgttgggtttgagacagacaccttttctatttacctcctaatggcatggagactctgagagcgaattgtgtggagaactcagtgccacacctcgaactggttgtagtgggaagtcccgcgaaacccggtgcatctggcacgtggccaggagccatgacaggggcgcttgggaggggccggaggaaccgaggtgttgccagtgctaagctgccctgagggtttccttcggggaccagcccacagcacaccaaggtggcccggaagaaccagaagtgcagcccctctcacaggcagctctgagccgcgctttcccctcctccctgggatggacgctgccgggagactgccagtggagacggaatctgccgctttgtctgtccagccgtgtgtgcatgtgccgaggtgcgtcccccgttgtgcctggttcgtgccatgcccttacacgtgcgtgtgagtgtgtgtgtgtgtctgtaggtgcgcacttacctgcttgagctttctgtgcatgtgcaggtcgggggtgtggtcgtcatgctgtccgtgcttgctggtgcctcttttcagtagtgagcagcatctagtttccctggtgcccttccctggaggtctctccctcccccagagcccctcatgccacagtggtactctgtgtctggcaggctactctgcccaccccagcatcagcacagctctcctcctccatctcagactgtggaaccaaagctggcccagttgtccatgacaaaagaggcttttgggccaaaatgtgagggtggtgggtgggatgggcagggaaggaatcctggtggaagtcttgggtgttagtgtcagccatgggaaatgagccagcccaagggcatcatcctcagcagcatcgaggaagggccgaggaatgtgaagccagatctcgggactcagattggaatgttacatctgtctttcatctcccagatcctggaaacagcagtgtatatttttggtggtggtgggtttggggtggggaagggaagggcgggcaaggagtggggagggagtctggggtgggagggaggcatctgcatgggtcttcttttactggactgtctgatcagggtggagggaaggtgagaggtttgcatccacttcaggagccctactgaagggaacagcctgagccgaacatgttatttaacctgagtatagtatttaacgaagcctagaagcacggctgtgggtggtgatttggtcagcatatcttaggtatataataactttgaagccataacttttaactggagtggtttgatttctttttttaattttattgggagggtttggattttaactttttttaatgttgttaaatattaagtttttgtaaaaggaaaaccatctctgtgattacctctcaatctatttgtttttaaagaaatccctaaaaaaaaaaattatccaattgaacgcacatagctcaatcacactggaaatgtttgtccttgcacctgagcctgttcccactcagcagtgagagttcctctttgccctgaggctcagtctctctcgtattttgtccccacccccaattccttgagtggtttttgctctagggccctttcttgcactgtccagctggttgtaccctctccaggcatttattcaacaaatgtgggtgaagtgcctgctgggtgccaggtgctgggaatacatctgtggacaagacatgcttgggtcctactcctggagcactgtaaaaagagctgattcaagtaagtagatgcctgttttgagaccagaaggtttcataattggttctacgacccttttgagcctagaattattgttcttatataagatcactgaagaaagaggaacccccacaaccccctccacaaagagaccaggggcgggtgatgagacctggggtttagaaccccaggtgagacctcaaatcactgcattcattctgagcccccttcctgtccccaggggaggtgtattgtgtatgtagccttagagcatctctgcctccaacccagcagttctctgccaaagcttgtggaggagggagagccctgtccctgccctcaggctccccagtgctcctggcccttctatttatttgactgattattgcttctttccttgcattaaaggagatcttcccctaacctttgggccaatttactggccactaatttcgtttaaataccattgtgtcattggggggaccgtctttacccctgctgacctcccacctatccgccctgcagcagaaccttggcggtttataggtaatgatggaacttagactcctcttcccagagtcacaagtagcctctgggatctgccaacacacgtccactcccaagccactagcccactccccagttggcccttctgcccttaccccacacacagtccaactcttccacctctggggaagatggagcaggtctttgggaagctcccacacccacctctgccactcttaacactaagtgagagttggggagaaactgaagccgtgtttttggccccccgaggctaaccctgatccatagtgctacctgcacctctggattctggattcacagaccaagtccaagcccgttcttacgtcgccataaaggcccccgaacggcattctcggtacttctgtttgtttttgtacattttattagaaaggactgtaaaatagccacttagacactttacctcttcagtatgcaaatgtaaataaattgtaatataggaaatcttttgttttaatataagaatgagcctgtccaatttctgctgtacattattaaaagttttattcacagagctgctctggtgccatctgtcccacatacgtagtacggccacccagcttttgtcaggggagttgggaatggggtggatgttctaaggtcagggtctcgtgctcacaccagctgtagcagaccccagcaagaggaatgctgttcccaacatcctgggtcttcctgagactgttgctttgtgttcctagagggcgggtctggcatgcaagggacagaagacacaaagcatccttttcttgggctttgtctgaatttgtcttctcacgttttttcctgtttacaaaagagggtcatgttcctagttagtcacactctctcatgtcttagaggcatgag

SEQ ID NO: 8401 - DNA, 1176 bp, Homo sapiens
cagcaggcggctggccttagttcagtctcctagggtgcccaactgggcgcacggtgctctgaacttgggtgggtgtggatgggggtcacagcaccgtgggggaacaggtacacagagctttggcgctgctgggatccgtacgattctaactgggattggatttccaaaaggccctccttcctcccagcctgtcagctccctcccagtgtcccggttgttttcttaacactttagaggctgtggctgagttggcaggggttccccaccctgaactttctgtctgaggtgcgttaggaagcctccggatcattgaaggaagtgactggcttggtggctgacctgtggagggctgcttgctgtgtattgaataaaggaggcttcttggggtcggggcagggtctctgtaagcacagggagaattgatttcgctggggcttggatcacgtgtgtgtgtgtgtgtgtgtgtgtgtgtgtgtgtgtgagagagagagagagagagagagaaagagagacagaggtggaaacccttgtccttggggatcctggatagaagttgccagtgttggagtcttggggcggtgctgcctagaggatacctcccaaccattccagctccagatgctgatcatccctatgccccctcccccagtagtctctgttggatcttacaggtagggtgcagcctgaggcttgttcagcagaacaggtgcaagccacattgttgccaagacctgcctgaagccggattctccccactgcctccttcaaccccgcctcttcctcctcctgtgggactgctcccccctcctgtgaggctagatgtaggtccatatcttgtgttgttaagaacctgcatgaagggggagggactgatgggggttgatccggatgtgggacgtccaggtggagaaacaggatttgaataaggcaggaacaagcgcccagttctgcccaactgctgtctttcctccttcacccccagcccatccctggccaggctgtcctagtgcaggcagatgtggccaccctcacctctcgcagggtgctgcatgcctgtggactggtgccactgggtgtgtggggcctgagctacaagggtctctgttgtcttggttgtcaggctaggggtggaggtgccctgttcagggcctgtggagttagaaggaaggctaggac

SEQ ID NO: 8402 - DNA, 1312 bp, Homo sapiens
aagcaggccctcacaggtgggaactcagaggccttggcttgctcattcgttcccttcttcccaggatgcactgcgcaactctggtggcgatgggctggggcagatgtccttggagttctaccagaagaagaagtctcgctggccattctcagacgagtgcatcccatgggaagtgtggacggtcaaggtgcatgtggtagccctggccacggagcaggagcggcagatctgccgggagaaggtgggtgagaaactctgcgagaagatcatcaacatcgtggaggtgatgaatcggcatgagtacttgcccaagatgcccacacagtcggaggtggataacgtgtttgacacaggcttgcgggacgtgcagccctacctgtacaagatctccttccagatcactgatgccctgggcacctcagtcaccaccaccatgcgcaggctcatcaaagacacccttgccctctgagcgtcgctggatctctgggagctccttgatggctcccagaccttggcttttgggaattgcacttttgggcctttgggctctggaacctgctctgggtcattggtgagacttggaaggggcagcccccgctggcttcttggttttgtggttgccagcctcaggtcatccttttaatctttgctgacggttcagtcctgcctctactgtctctccatagccctggtggggtcccccttctttctccactgtacagaagagccaccactgggatggggaataaagttgagaacatgagtttgggctgagccatctctcccttgtcttgtgtctgcccgacgtgttaacactttctggcattcctgtgaggacacaggtgtgtgttgagggcattgctccaagatgaggggggtgggtgggtgggattaaaggtgtatgaaaatggacagattttgtacttggctggatattcacacaaaacaggtgttacccagatgtggctatagccagtctcgtgaaggaaggtgcattgtagggtgagggtctgttgcttttggatgtgactgagctgttcctcccttttcccccccagcaatcgactccctatttcaacacctccaaactcactttgctttttttttttttttgtaaacttttgcagattattttatcactcaggtattaagcctagtacccattagttatttttctgatcctctccctcttcccatcctccaaaaagctccagtgtgcattgttccccgctgtgtgtccttgtgttctcatcatgtagctcccacttataagtgagaacatgtatttggttttctgttcctgtgttatctc

SEQ ID NO: 8403 - DNA, 1127 bp, Homo sapiens
aacttcaaactcaccactaggaatacaagagttgtcagtagtggttaaatatacctggagtaagagggacccaggtttgaatcctagctttaccgtctgtgaccttgggcaaattactgtctgaaatctgagtttgcttttctgtagaatgggggacaacctcacaggactgttaaaaagataagatgggatataatgaatataaagtagctggcacacagtaatattccataaagagttgtatttatggaataatatttctttgcttacataaagattaaggtgtcataattaatctcagaagcttctcttcgtaaagtgcccttattactgaacccccactttttttggtctggttttcttgtatagcatgtttaatatttggcaattaacatgggtcctcttgttctatgacagtagtgagagaagtttcttctaatttcttacattcattcctctatcctagtttcgaccacttggcacagtaacgatgacgatgtgtatagggcgcctccaattgaccgttccatccttcccactgctccacgggctgctcgggaacccaatatcgaccggagccgtcttcccaaatcgccaccctacactgcttttctaggaaacctaccctatgatgttacagaagagtcaattaaggaattctttcgaggattaaatgtaagtgtaaaagttgtaataattaactagatattgaggataatgtctaaaaaagactaattgtggaatgggcagttgctgttgaaaaaacaactagaaatataatttaaggccgggaatggtggctcacgcctgtaatcccagcactctgggagtctgaggcgggtggatcatttgaggtcaggaattcgagtccagcctggctaacgtggtgagaccctgtctctactaagaatacaaaaattagctgggcgtggtggtacacgtctgtaatcccagctacttgggaggctgaggtaggagaattgcttgaacctggaagacggaggttgtggtgagccgagattgcgccattgcactccagcctgggcaacaagagtgaaacaccatctcaaagaaaaaaaataaaatcaaaattatatatatatatattttttttttttctttttttt

SEQ ID NO: 8404 - DNA, 1105 bp, Homo sapiens
gcaatgtttgaagacattgtagttgtcacaattggagggagtgctgctgacataagtagaatccaggggttaattctatagggaataggacagtccccatcaacaaagaattatgcagcccaaaatgcatgtcaagattgagaagactgattgatctagatgaacattaaatagatgataaatagattagctgcctaacagcacgttggtcacaaaggggacctaatttgtatatgtttcagggactcctggcccatacagaatttgagatagctaagcattaaaccaataggaaaaaacgggaggaaaagagccacctggggttgaattggagcatgtacttatggggcctgaggtaactgggatgacagtgtgacgtgaaagtgaaaaatagggtaaaatgggggttttctatgtgtgagaaatattgggcaaagtttttatgagataacttacggtttttgttttaatgtatctgtagacagggatgatcgttcttttggccgtgatagaaatcgggattctgacaaaacagatacagactggagggctcgtcctgctacagacagctttgatgactacccacctagaagaggtgatgatagctttggagacagtaagtttgtttttatgaagttagcttcctctgtgctttgggaggctatttagtaataggacaaatgtgttacagatgatcagatcacattaacagatagaaggaggaaagcagattaagaaaaattttggatagtatctgaaagaactgatagatgcaggaaacgaatttgataaattaataattttttttgaaaacttaaccaaacaaagggacagacatttctctttttttggagacaattgtttataaagaaacccaaactgggcatggtggctataatcccaacgctttgggaggtcaaggcaggtggattgcttaaggccaggagtttgagagcagcctgggcgacaaaacaagaccctgtctaccaaaaagaaaaagaaaaagctgacgtggtggtacgcacctgcagtcctagctgttcagcaagctgaggcaagaggactccttgagcccaggaggtctagactgggtgacagagcgaga

SEQ ID NO: 8405 - DNA, 1263 bp, Homo sapiens
ttttgtttttgcatgtaaacctcttctccttctggaaattcattatggaatatttagggattttttaatttccaacccacccttcccaaattattagctgagcaacaattatttcaccagggaaactttttgaagaaatcagatagaaaatttaaataaacagattcttccaaattggactgatagcttaccgtgtttctattaatggtgtcagagaaaaggggatggtgttacttgtctgtttcctctagagtatcgagatcgttatgattcagaccggtatcgggatgggtatcgggatgggtatcgggatggcccacgccgggatatggatcgatatggtggccgggatcgctatgatgaccgaggcagcagagactatgatagaggtaattgtaaaacatgtcgaattgctctttcagtaactttgccttttttttttccccctccgctgtgatgattataatttgggatatatttacaggctatgattcccggataggcagtggcagaagagcatttggcagtgggtatcgcagggatgatgactacagaggaggcggggaccgctatgaagaccgatatgacagacgggatgatcggtcgtggagctccagagatgattactctcgggatgattataggcgtgatgatagaggtaatagttttctttttacgtacttcatggagcagaaactgggaaaactacggaaaatttgtgattgtgttacgaactactgagttgggcacaaatataatttgcacattgtacaggaagcagcaaagcatagtagaaagagcattggctggccaggtgtgggcagatcacaaggtcaggagatcgagaccatcctggctaatggtgaaaccccgtctctaccaggtgtggtggcagacacctgtagtcccagctactagggaggctgagagagaagaatggtgggaacccgggaggcagagcttgcagtgagtggagatggcgccgctgcactccagcctgggtgacagagtgagactccccatctcaaaaaaaaaaaaaaagcattggctaaggatgacatcagtggaaacacagcagtcgaattgttttcatctcatatgccttcacagatagatttttcagttaaaatttattgaataaacagtagaaatggaaaaaaaagttgccagatactgttatgttgtgatctcagtaaattacacttaaaacagatggttttagctccattttccaagtaagggaaatgaaattcagattaaaca

SEQ ID NO: 8406 - DNA, 1070 bp, Homo sapiens
atcatagtccatgtgtgttgagttttaagctgaagttgagcagtggttactagagtttggggtttcattgtaggtcctcttcacatatgtatattctccaggtcaagacacttttaacattgagaatgcagaaaggctgtaaaggatactcattcctaaaaaggtcacatggctgggtgtcccttaagttgtatacatggtcattattttttctatttctctgtgcatcagtaagacattgttctggaaatacttgtaaaccactggtttagggataaatccatctttgggagccaaaacttggatgtggaccattttccacactgttgagatcctggtagatgcgtgagcatctgcagcctgataatttgatattttcactctggcttcacagatgcacgaaggagagagagtgagaagtctctagaaaatgaaacactcaataaggaggaagattgccactctccaacttctaaacctcccaaacctgatcagcccctaaaggtaatgccagcccctccaccaaaggagaatgcttgggtgaagcgaagttctaaccctcctgctcgatctcagagctcagacacagagcagcagtcccctacaaggtgagtcagtttggaaacagtagttggttaactgcagattctaaaatactgtgatgtaatgatggaagatctcctacgggatgccagcgttgtatagcaccttataagttatgctggctttagtctcttagtgtgctggaactggctcataagacctagttgttccattttctggagttccaccactttgatagcttgaaatcagctatgatgggagtactaatgccgcacaaatctgcaaatactgtaagtcagaggcttcccttttgccacatattggcagtatggtagggggtaacttcctttcatttctcttaagtcttctcatttgtaagcaaaatagcaacactattagcctggcgtggtggcaggtacctgtaatcccagctactcgggaggctgaggcaggagaattgcttgaacctgagagcggaggttgcagtgagccgagatgtgccattg

SEQ ID NO: 8407 - DNA, 2789 bp, Homo sapiens
ttcattctaagaaaaattcttagaattctaagtattcttactaagaattaaaaattcttagtattctaaactttttgccgttggacttctttccatttggaatacaaagtgtttggaaataagacattggtctttactgaaatagcgaaagaagtttagctttttcctggtttctgtcttcctttgttctcatcccttctgcaaggtgtagaggtggtatgagactatagtaagatcgcatgtgcctctgaccctcttccctagctcctctccaatggacaatgctgatgagcaagcaagtgggtgtcatctgactgtcatcccccattgccaaaggatcagtatcctgtgtcttgggttttgatgtgataattcagggccttcattatcctgtcactctcgttgtgttacagaagttcagttctgcaagcaagtatgctgctctctctgttgatggtgaagatgaaaatgagggagaagattatgccgaatagacctctacatcctgtgcttttctcctagtttctctccaccctggaacattcgagagcaaatcaaaacctctatccagacaagacaaaataaaactcaccatctcctgaagacctttcttacctttttttaaaaacaaaaaatgaaattattttgcatgctgctgcagcctttaaagtattgaagtaactggagaattgccaatacagccagagagaaagggactacagctttttagaggaaaagttgtggtgcgttatgtcaccatgcagttgccagtgtgattagtgcctaggggtctccatttagcagaaatggtaatgacagtgatataatgcctggaacctggttgggcagtaggggagggaggtagaaggaaaagtgtgagatttctaccttttagtttttatcctattgtggcatatatgaattctcaaacattatctgaataaattttccactcttggaaaggtagatttagcctcaagttgttctagtctccaggaggctgccagcccctcctcttatttaattctgagttttgggggccagcctagagggaattccttttttttttttaaccccccaggggggtagttgggagtgagactataggccataaagaatgggactgcattggaccaaaataaatgggaaaatcgtggtttgaaaagaagcttttgggaagtgatgagtcattttgcaccaggtaataggggaaaattgtgtgacctccagcaaacacatgaatggttatttcctggagccggaagcacttgggggtcgtggtaattcccagtgttttctgtgtcctagttttaccctttctaaacactgtcctttttgaaagttttgaatatatccacattctattgaaaccttgaaactaaaaatttagactcttatcatcatcttaagttcttcatgctactcttaacctcccaaaaagcagtatctaagtcacatacatgatgtcttgggcattttctcagccatggagaactctgaaaggaagaatcgctgcttttctcaagcaaatcggtttcttgatgtcttttggttctccttgcctgctcctgatgcttggaccccttttattgatcagagtgctctagaataatggatggtcttggatgatggataaatagggacagggacagttaaattgggagcctttcttacaaccttgatgggatttttccccccaagtttccttctccactgaaatgccacactaatgcttgttggattcatgaggtggccagaccaatgtgttgttttgttgttgtttttttaagcttcccttgagagaataaatggtaatggagagaactatttaacaaggtcctggtttctcttgcaacacagtagctaaacttgcctgcttttatatgcatttttgtagggatcagcttggtagacagtattagcggagaaacaccttgatcttggtttgcaagcccttctcccatcagtcctagattaggccctgttcagccatgcaggggtgttggtttatgcgtgctgcagcagtgggcataatgaatataatttacccagtggacaaaggtgtgtaccaagtgaatttaaataattggtgtggattggccagtagctaagaagtgggcttttaaagagtattgaagattgaaagggtttttctttcttttttaaaaaagaaaaacaaactattgattgtagataatgaaaagctagggtttgccctcttcatgtctactctccttccaaatagttatatccaaaactgtttttccctctcccctaccttgtcccccctattaaaatagaaacagggattgattaatgtcccgctcctgaatacatgtaaaatttgtacaaaaatatcttctatgaaaatgatttgtaatctgtagacttattacctgggagatgtcttgatgtaaaatcccatcctttgggttgtgggttttttgttttctccaaataaatctgatctttaaagttcattgtaatgctgaagttctttgacaaatactctgcactcccagtggtttttactgtagtcattgaccacctgctcctcctcctcctaccatctctgaagttttcattcagtattggataccatattgtccaagattagagggtggggttacaagggaatctatttcagtgtttattgaggcccaataatagagtttgcatcctagctcccctctggcttttttttttttttttttttttttttttgcctggtgttaaattttttaatcacctggatgtgcctgcagtctatttcctgtactgtttatttt

SEQ ID NO: 8408 - DNA, 1205 bp, Homo sapiens
ggcctgtggagctccagcatcctcagggaagaggccacagcctgcttgctccattcttctccccacctcctccccaggttttcttcactcggaatggcaagatcattgggaagaaggatgctgttgttccttctggaggcttcttccccaccattggaatgctgagctgcggggagaaagtcaaagtagatctgcaccccttgagtggctagggcctcccctccagacctgctccttctccctgctcaccctctgctgggccaggcacccagttcctgacttcccagaggcttcgtttacccagcaggcccctggaggtgtgtagtcactctgcccccactggctcaggcccctgtcacgcttctctgtgcccacgtttctgacctggtgctgccactgttgtcagtccctgggcctgagtccctggttggacaggaatggacccaaagaatggtgttggtatgtgggtggtcccactcgctttggtcagtgggcttctgggtccccctttccctcaccggccctgtgtgggtggagaggcgtgagcaccctatctcagctgctattcgggcatgatgctttgtagagggtagagtagacagccccctcccctactcaccatggtatttctccttgaattcctctttcttgttttctttcctggttgtgtgaaccagttgctgctgtcatacccctggcagggccaggggacctctctttggtcatctctgtcctttcactggctgctgccccaggaagactcctctaggctctccatctttcccttgagagctggctccccaccccaacctgctcaggcaccacagaggatctaggtctctggctccccatacctggacccacatgggtgggtgcctgttgcatgtttaagagagaggggctgtgaggtgacagggcactagggccttcactcctttctccccttccatcctttctttaccagtgccacccatgtccctagctcccgggtattggggctgaggctctggggcctgtctccctgccagcgtgagggcaagaccccagagccttagctgagcaagcccagaggggcagcgtggcccctccctccccttttcctgccccgtcccatgcctcagcttgctgcttgtgccagttgcctgtttcgcttcagtgtttgattctagcacttacatgtgtcctccccaccaagccctctatct

SEQ ID NO: 8409 - DNA, 2275 bp, Homo sapiens
tgggtgttgtcatggcccatgtcacattggcacctgatggcatcagctcaaatgcctttaggaggaaacttgggtgagagtggcccatgaagcccttttcttctttttttggggagtcggtcttggagatggtatgtggctacctcgctgccattgactcctaaagtgagacagatgtgttgagcaaggagtcatggaagtcaaagtgggttctctctccttgtgccctcttaggaacaacccaagactggtcccaagttggctaacagctgctcaagaaacaaaggaatctggggtcttctgacatgcctgttgagcagtaggagctgttctccctccccaagtcctatcactgtattcaggtagaggaggtagggaggggtctgtcctttggtcccaaaaaacaagatctcggcttgcttcctgatggccatccctacccaacagagtgtgggggatgggggtgggggtgctgcagagaaaagactaaagaagaaacctaatgtaggttccattcttaaccatattctttgctcctctctgctccaataccaccaccttgtccactcccaaaaaagtaatcgggtgtgtgtgtgtgtgtgagagagagtgtgtgtgagatatgaatgcatgtatttgtatgcttgcaggagatggcatattattgagccaaacccttctctggccctcaccttcagggaggatgagtggaaaatagcctcctcttgcccaaacatgaagggtgcttgaggtctcagcaggagctgaagaacacaatttggggaacagaagggcttttgttttggagggtttttttttttaagatgaattcaacagcctggtggttaggatgtttctaacccaagccagggcttgtgaacatgaattttctaaggtgaaataaaccttttctttctgctaaagaaagaatccttatgggaagttttggggtttggttgacccccactgtaacctgacctgacctgtggcgggtacgggaactgtcttagtaatcatggagactggctgaacctgagtgccaagctgtcagtagggtctgagatgggaaactcctgaaagtatgatttcatttcccagaaaatgtaaagaatggataccagcaatgattcctggctgttacctattctggaggggtggggttggggagggggttgtccatacctctgtggtatgagtatttcagggaaaaagaaagcaggcatggcacccattcgattttccctgacagcatctgagatccttttggggagacgctgaggagtgtttgctgccatgtactcttacagctctatgctgacactcccatttgatgtggtccagaacttagacctcagtccttggatcagccctgtggtccctgcaagcaggggcatctttctgcatgtgagccagcccccttcctgttcaagggttctgctggatctgggcttttcctgtccttcacttctgggatgattcaccccacatcttccagtaccctgtaaaccattttaaaatatttagaaaactatcctcccaaaaatgcttttgaaaatgagagccctctgtccctgccacttacagctagtctctttgggataggggtgtatgtggagagattcatgtaagtctcacatgagtgacctgtgcccctatgtgtactaatgtgtgtactgggtcagaaggtgccctgggttcccacagaccttggtttcctgcctgggtgggtgggagggagggaacttcagagagtatgtgcgaacagccatagcagagccacccctgccaaggacccagtgagggaaactcaggagcaggtggttggttcagttcccgcgctgatgtctggggcagtgcatgtgtgagaagagaggcgcaaagcagtgaaaggagtgatttggcatccagagggcccgggagccccacggataccccagggaagccactgactcacaccgctgcagaggctcctgggcccaatgcccgacccctgctggccagcatggggcctagcactggaagatgcctcaggtgtgtttggagtgggggaaacggaagtagggcacgctctcagagaccaggatagagagtcagggaacctgggaaagagtagtgccagttccgggtaggctgctgcaccaggccctaccagctcaggctataaacagtctgctttgccccaagtcttttccgtccacccccaacagccttgtcatcacttagctactgatcacgcccatggcttgacattggagggttacattagtggagtccg

SEQ ID NO: 8410 - DNA, 2065 bp, Homo sapiens
ctcgctgaagagacagcctgaaagaatgggatgaatgggcagcaagcctggtagagaaggccaggtagaggttccaggcagaggagtggcacccaggaagcctagtgagaagaggatgagctggggacggagaggtggtgggcctgtgctgggcgccccctaggggagtcaggggcagttgagaaaggttagggagatggccttaagggccatgtgcctctgtcctcctgagcctctctctttctctctccattgtaggagctgaaagggccattactctgaagatggagattccaggcccgatgcctcccttaatccgagagatgctggagaaccctgaaatgtttgaggatgactcctcgcagcctggtccccaccccaatgcctctagcgaggatgaggttcctgggggccagggcaaagggggcctgaagtccccagcctgaccagggcccctgacctccccgctgtgggggttggggcttcaggcagcagactgaccatctcccagaccgccagtgactgggggaggacctgctctgccctctccccaccccttccaatgagctccttgtttttgccaaagtttctaggggtgcctctgtgttcatccccttcctgatctaaccggctccctcgccagtcccgggggcctgccctgctcccaccaggagagagggcaaagggatgagcctgggtttggactctaaaatctcagcactgccccatgggtcctagacttcccagggcaagaggaagaccctgccattccacagccccttcctctgccaggtgcttggctctctgagagcaaacaggaacactagagaccaaaaaggggacaaaggagaagggctgagcccaccttcttgctcctacccttggtgcctaatgctgtgtgatgcacctgcagggtgtgtgctagcctctgtgccccgtccttgtgccaggtcaaggtgggggcaggctgggccctgcatttctggggcaggaacagagggtgaaagggacagatagatgcaggtccattctgcacctcttggctcgggtgcagagttcaccctgtgccctccgttataagtccctcccccagccctgtcatgtgccttgggctcctcctgccctccatctcagccattggggcagggaccctcctacactacagaggggccaggggatccctctctccctagtgccttccaccctttactccccagagcagcttggcccagggaggggggatgctgcttagctgatcccgccctgacccagaggaagcctctatttatttattagcttttgtttacaccgtggaattgaccccttcctccaggggtcttgggtgggggagcccagggcccctgtgacccctcctttcttcctccaatccccagtttgtatttagctgccaaataagattcccattggctccctgtgttctcttggggggtcagggtgctgtcccctcccctctgtttacatctcccctctaccccgctgtatcgcatattgctgagttttctatttttgcaaaataaagtgatggaaactcatgagatgtggctccctttaggaggtggtagggaaatgaccagctgacctggtgagggagctgagtgaggagggaaagcttgtaattgattggactttgcagctttcttggtagaagaaaacaggatgaagtgtgcctggattgtggtggggacaggatgggggaaagggagcccatggggactcaccctgagtgaccgggtttcccacaaccaccaggtgtgggttcagaatctcactctgtcgcccatgctggagtgcagtggtgtgatctcggcttactgtaacctccacttcccaggttcaagcaattctcttgcctcagcctcccgagtagctgcaattacaggggtgcaccaccacgcccagctaattttttttatttttagtagagacaggtttcgccatgttggccaggctggtctcgaactcctgacctcaggtgatccgcctgccttggactcccaaagtgctgggattacaggcgtgagccactgcgtctagcttggtgtgg

SEQ ID NO: 8411 - DNA, 1177 bp, Homo sapiens
tttgcaaattcttggtgcctgataagataaatgcatgcacggatgtgtgtctaagcaagcgcgcgcgccgcggagcgagtgtacgtatgtgtatgtgtgcgctccactctcagctttgctcatctcggtgcccggcccccttcgctctccaagccccaccccccacccctccaggcttcgcttttaaaaaaggtctccccagtgctagctgccgaagcacccagataagagctggacggaggctaaagcggcagccccagcttcgcgccccgcccagtccctttcccctgctggggatcccccctcttccccgcccaccccttacccgcatgcagcccagcgccctatgctagccctccccctccccccctgctggagcggggcgccgccgggggaggagggggaatcggctgcgggtccttggtgtttccagcacccagtttcccttcaagccgggtcgcgatgtacgactgtatggaaacgtttgccccgggtccgcgacggctgtacggggcggccgggcccggggccggcttgctgcgcagagccaccggcggctcctgtttcgccggacttgaatcttttgcctggccgcaacccgccagcctgcaatgtaggtaccggagtccggggctggggtgtagggtgcaggagagggtgggatttactctttccgtgtgtaaagagtggaactgaggtgcaaggaggagcttctggccctttctatgtaaggtactggccctttaaacgtgggggcctcagcgtctcctttgcgtgtgtgcagtagtgtttggagtgtgtgtggtttttatggtgggtgtttagctcgaacctgtggttgatgccactccagagttcctggggatagggagagaccgaggtgtgtgggtagtttgcgccttcacgtccgtggccctggaaggatatgacactcaggaccgtgggtggcgtttgtaaagcccatgtgggaagctggcagtgttaaaaatatcgtttgcagagcgtgtgaatccctggagtgtgcagcgccttgcctaggtggtgtgggtgtgggagcaagggtctctccaccagtgtcgcctgcgacagctgccaggtccacatggcctgtgaggggatgtttgtggcgtgaggccgggagggcgtgtgcccctgcgtggctgcgggggcggttttg

SEQ ID NO: 8412 - DNA, 1241 bp, Homo sapiens
gagattgtgctactgtactccagcctgggctacagagcaagactccatctcacatctgaatattttcaaagatcccccaggtggtcctttgagcaaggagagtgagaacctgggttcttggttttttggttttttttttttttttttttttttttttttggagactgagtcttgctcttgctttgtcacccaggctggagtgcagtggcacgatctcggctcactgcaacctccacctcctgggttcaagcaattctctgcctcagcctcctgagtagctgggattataggcatgcgccaccatgcctggctaatttttgtatttttagtagagacgggggtttcatcatcttggccgggctggtcttgaactcctgacctcatgatccacccgcctcggcctcccaaagtgctgggattaccggcgcaagccaccgcgctgggcaagaaccagtgttcttaagcaagaatacctgtgaactgatgcattggcgggattggcaagcaagatgagtcatagaggggcttgggtttcatcttaactgagatgataagcctctaaaggatttaagtggaggcatgacagcagacaggcattttggatttccctgacttcgctgtgatgaatggagtgcaggagaaaagaccgggtaatcaggctgctatagtattctaggcagggaagggtgggctgaactgaagcagctgcacgagggatggaatgcagtggatcggtgcgagaagccaaggattaacctggtaggtgactggcgggagggagagcgagagaagggaacatcagagatggccccacatttcttactcaggagaaggcagtgccatttgctgagaaggattacaggagaagcaggttttcaagggtgtggatgatgaacataggggtggagtggattgcagcctctgagttgaaggcactcagagtatttcattcttaggtgtctcctgccttgggtgggtgtggctcaggaggcccacctgccaaccccgccccctcatgtggtgtatgtacctattgcatgcatatccccttccaccatacacactcactggttcctctccagtttggtctgttccctttctctggtcagttgcacaggtgcttccggctacaagtagagagtttgaagaaactgggtaaacaggcccagggctgcaagatggtgattttgtggctggcagccctgcaaccctgtagccctgaacacatggctgagccagtc

SEQ ID NO: 8413 - DNA, 1138 bp, Homo sapiens
cccttcccagggcgctatggcagatactcatagtaggcccagcttaagcacatcttctccctgcagctctgctctggatgctatccgggaagccctgcagcttctggactctgtgaggcctgaggcccaggccagagatcagcttctggacgataaagcacaggccttgctgtggctttacatctgtactctggaagccaaaatgcaggaagtgagtgtggctgctgtggggctcaccagaactgggtgtaggaattactgtccctgggcccccaacaagttggtatcagcccttttttttgttcgttatttttagagatggggtctctctgttgcccaggctggtcttgaactcctgggctccaacaatcctcccacctcagcctgccgagtagccaggacgataggcccacaccactgtgccctgttttataccccgatcttcccatccagggtatcgagcgggatcggagagcccaggcccctggtaacttggaggaatttgaagtcaatgacctgaactatgaagataaactccaggaagatcgtttcctatacagtaacattgccttcaacctggctgcagatgctggtgaggggtaaatggagtgtggcatgggcatctccatggcttcctaagagtggaacagggacccctggtgagggaaaccctgaccttgtagggtaggaggttgtggaagcagtgggaggttggcgtaaagggcagaggatgttatggaggaagggaagttctctccagatggcccatgctgagacagcagtcattttcttctggcttaacagctcagtccaaatgcctggaccaagccctggccctgtggaaggagctgcttacaaaggggcaggccccagctgtacggtgtctccagcagacagcagcctcactgcagatcctagcagccctctaccagctggtggcaaaggtaatggggtggggcattgagggggacccatataaacaaggactagaccagaaacagctccctcgccttctttggcctgtgatcctcctgagaagccatgaaagccagtgatggaagcgcagggctgtatcaccagtcttattttaaatccaagctccctcattcattagtgtatggccttgggcaagttgctt

SEQ ID NO: 8414 - DNA, 1184 bp, Homo sapiens
ggcaaggcaggagggctgtttgggagcacaggatgtgttctgaggagtgttagataactggagagaaaaggttggaaccttgaagtaatgtcatagattattaatcctggatagatggatggccaggctggatggcctgtgggcagagagctgtgttctggggtagggcctgatatcgccccaggggcagtaccttctaggttactggttaggttttgcctcatggcctatctcgtgaaagcactctttcaccctggcctgagaccttgcagattacctcttctctgttgacctgctcgtggtgacttggtcgtttttccccttcgctgtttttttcttttaactttcacaatccttattcctttttcacaacctggatttgagcccagagtgggccatcaggataggaggttttagcaggaggcaaagaaatagaattttggggatggcttcttgtcatcttctgactccacatcctctgtgttcccctccagaccctcttctggctgtgcccaagtgctgtctcaccctgggcatacacctgttaccagcttggcctgggcccccagtggggggcggctgctctcagcttcacccgtggatgctgctatccgggtgagtgggtccctgcccctcatgcacatttcagtcctggcaaaagtgttcctcactcggttgtggaaacatcttgggggaaggaggagggaccttggtccattcagtcttaaacttacccagagaggagctttgccatcagactcgtgaggtttaaaattccgctgtctgtaattgtcagcatgaacccgtgcctcatgtttcacagtccctctcccgcttcctctcgtttctggctctttgtacattagagaggccagcccactgtgagatgatggggtgcttgagttttcccttatctcctgccccactctcctaggtatgggatgtctcaacagagacctgtgtcccccttccctggttccgaggaggtggggtgaccaacctgctctggtccccagacggcagcaaaatcctggctaccactccttcagctgtctttcggtgagtgggacaaggatggagggagggcaaggacctagagaaaggcacttagctcctggaagctctgtcaagggaggtaggtccaacttttagaacttagaggtcctgagctgtaatttgctttt

SEQ ID NO: 8415 - DNA, 1159 bp, Homo sapiens
tgagacagagtcttgctctgtcacccaggctggagtacaatggtgcagtctcgctaactgcaacctccgcctcccgggttcaagcaattctcctggctcagccttccaaggagctgggattacaggcatgcgtaccattcccagctaattttgtatttttagtagagacgggatttctccgtattggtcagactggtcttgaactcctgacctcaggtgatccgcccacctcggcctcccaaagtgatggaattacaggcgtgaaccactgcgcccagccactcttggtattttcaatgatgattcttgagatttcagtgagtcttcaggtgtcagtgaatggaatggctaaacataaaaaggcttcaaaacttgtgatactgtgaatgtaggatgtcagttcaaaagaaatgatgttgtgactgtagggtatcactgagatgccagtgataacctgcccatgtcacatgttgacccttttctctcttaatttcaggtgatcatggagctcagcttggtctccatggggctggtggtgatggaatacatgatgacacagcaggtggagaggaaggagaaaacagcccagatgcccaaccccaagccggtcggaggacccggcgggaagcatgcacctgcccctactgtaaagacagtgaaggaaggtgagttgacccagccagtttcttacaaatataaagaaaaattaatagatttggagataagaggaagaagattaattttttttttttttgagaccgagtctgactctgttgcccaggctggagtgcagtggcgcaatcttggctcactgcaaactccacctcctgggttcacgccattctcctgcctcagcctcccgagtagctgggactacaggcacctgtcaccacacccagctatctttttttatttttagtagagacagggtttcactgtgttacccaggatggtctcgatctcctgacctcgtgatctgcccgcctcggcctcctaaagtgctgggattaccagcgtgagccaccatgcccggcaaaggttaatttttttttttaggatttaagactcagagctggatgcatataatcccagcactttgggaggccaagataggaggatcacttcagcccaggagtttgagaccagcctcagcaagaaa

SEQ ID NO: 8416 - DNA, 1084 bp, Homo sapiens
atctgtttcaggtttccattctgcagaactcctccaaagcatgtgctagtggcaagacagtggttcttatgatgttttcccttaacttttccttgtatgttcttgggtggttcctaagggaaagggaagcacatgatcatgggaatgatagcccagaacaaaaagaaatcttgtcttaccacagtgttttataggagagattgggagaaatcatcctgttttctctgtgacctgatttcagaagagactgatccaaaaattataacggcagggaacctagtgcatttggcactgagatttaaatgcaaccagaattgtcctcaaggcccagccataaaagcattgtctctctcgaccttctggtatcttgttagagagcttttcactgtgaggaagtgtggaaaaatagctctgtgtgtgtgtgtgtgtgtgtgtgtgtgtgtgtgtgtaatctgttaggttggggataggttttctgctagccaatattaaaagagacctgcaataaaaaaattaccctgatctgatagaaagcaagtgtttttgtatgtgtgggtgaatgtgtgttcatgcccgtatatgtctacacacagatgacaaattatatttgaaatcgttggaaaataaattcagatcaaaatgcctttcaggcccattacctagaaatctatcttaaaacctgggtatgttcctaaggtcatttctttgcttatgctaaattaattacaattatgaatggaggatattctactgtacttttttaaaaagaaactatttttgtgtttgaaagtgaaaccaacatccagatctatagcagagtccttattcttctcataaatctttttactttggctacaaatagatgatggtatgattctattatatattttatataaaatccatccaaattaagttttgggtaagtgtgttgtttaatctgaactatagtaacttaatactctaaacaatagttcactccatttggtcctttctccacagatgtaattatgttttcaactcaggaactatggcaaggaactttccccagatcaaattctattaacgctgagatacaagtcatcca

SEQ ID NO: 8417 - DNA, 1975 bp, Homo sapiens
ttgatggtatttctttctcgaatgaaaagctgctggtttaccctcaaccctattcattagcattaccatgagtgaatttatatctaattatttccacttgccctgttctcttcacaccaaggaagctccagatccagtatcttgtttggcctcaaaacagaagcagcttcttttgtctcccagcagtagtgagccactcagtctcttccacaggaagtttggagcctacattccttgagtcaggagcttattacagaaaaaccccgtttccctgaacttttggctaacagaaattaatttaactgacatgcatattgattctgaaatttttttcctaagtttttttcatttttttgaatgagttttttaaattttttagatgaccaaaacttgcagggcaggggatgcccagaagagtggtgagatagtaaaacacttattccctcatcctttcaggttttcaggttgcccatttatattcatttacatgtcatttgactgtctcactttttacccagaacagtaacaacccacaccgtcttccttcagggatttccaactggcactctgtgggtgctacacagaatgcaatttaatggatatttctcagcctggttcagaataaattgatcctttgatcccagaaagtatatactgaagtgtgggataaagattatgattaggggagggttggagacaaaagctgtaaattactatggctgatttatttctactatatacatatatattttttgcttttgtatatcctatataggaaactaagcattgtattttttttaacaaatctaaaaaagcactatgaactacaggtgtttgactttcaaaatatattttgtattgttaatatcttcacattgtgtgaatactggaagctgcagatctttgctaggacgcaataaatttatatactttttgaggggttcttctggggtgctaatcaggcccctgttatgcttagggggagccctggtgctacttgcttgaagttttcagtgtaagtaccctgatgccttttggaccttgggatcagatcaagagttttggagatcaggtaccaaggaaataaggacagtctagctgcctcaagtgaggggccctttgcatagctctccttccccctcactgaagctgggtagcctattggggttgagagggaaaatgtgaaatctcagaatttatctcccttagaagagagccagtaacttatgtacaaggatgaaagaaaggtcgcagcagtagctttggggaaagggaggaagatatggcacttctccaaccccggaaaacattgcttttgaaaactgctgataaaatatgagccggttattacttctgtttgggagactgtgctctctgtggtgcctctcttggctctactccacagataccagacctcttctaagaggatgagcagaccagctttgaggttgacctgtttctctttgtctgccttcccaaaacaccagcccccaggaagacattaagcagccttaagcttaaattcctactccctcttccaaatttggctcacttgccttagatccaaggcagggaaaggaaaagaaggggggtctctggctttattactcccctaagtctttactctgacttccccaaacccagaaagattttctccacagtgttcatttgaaagaggagtattttgtcccattttccccttcctcattatcaaacagccccagtcttccttgtctctgctaagaaagtagaggcatgatgatctgcctctcaactgccctaagtcctagctaagtatcaggggaaaaaaaaaaaaaaaaagcctaacaaatgggattagactagggctgcaagtagtgaggattttgttgatacctctgctgggatgtgtgctttcccatatcttgccttcaggaattacactgtgccttttccccagggatatgggctctgtctacccagtgctccagtttcc

SEQ ID NO: 8418 - DNA, 1172 bp, Homo sapiens
tggatctgatgctatcttctttcccctttcccctttccccttgcagcattcctcctcttcctcctcctcttccagcagtgattctgactgaatacaggccctggacccttccctcaagtctcaccagttctgctctcccatcaagcttcagatgccatgttgtactgggggaatgtagcccttgtgctccccaccccctacctccacctgagcctcaccctgctgttgagccctgagtggctaggggaaatgggaagaggattgccatggcctggccatcttgttgctgcttggttagatcatatagctaatgaattaggcaggggagctattttttgaagatgatgaactaaatgttgaagacaagtttgagatctgtaaaatgtgattttttacttccacttataatacttgtgattggggaggtttgtggaaattcaattatgatgaaaaacctatcttttttgtaatgttggcatacttggggaatttagtggcaaatacattccccagcaggccttttgttggttgcactaactgcaaggttgctgggaagtagagtccatttggttgatgagctttgactgcggttttggaaccttacctctcctccttagcccaatatgctgtcttgggtcctattcaaataaagttatttctcctggtctcagctcacctgtgctatcaccttggctgggcatggcacattctactacttttgctaaccttccacagaccctttaaagtgtatcagtttcatagaagggaaccagagcatcagtgagaaagacactgtatgattcccatgttttttaagtgggaggactcttcaaaattggctcaggcagagtggcatgaatctttattgtcttcccttgggtgaatggatataggcctttagcttatatgttttcatatctgctacagagattcttaaccctggctgcccatcagctgtgagagagtaatttggggctttgccccaaatctactgaataatacttatttttatttttttttaaattttttcctaaaactttttatttttatttatgtatttacttattttgagatggagtttcgctcttattgcccaggttggagtgcaatggcgcaatcataacctccacccaccaggttcaagcgattctcctgcgtcagcctctcaagta

SEQ ID NO: 8419 - DNA, 1205 bp, Homo sapiens
ggcgatggccggcttgctggccgggcgggtgagcgcggctccccgcgggggtcaggcgctggcgcagccacacggggaggcgctattagtccggcccctccccctgtatcgcagcgcccccccccgaccgaaccgtttattttttcccccctctttctagtcgagggaagggggggctttttttcttaagtggaaaatgcttggataaccgaggggagagggggctgcggagttaaagaaagggtagacgggctcccagttgccgagttaatcaggacgtttctcggggtaacgaatttttaaattacaaaatgcctgccgatgtaatcccagaccgagctatttatggaaggggtattggacagcagtgttagcagctggattgctggaatggggtacctttatcttgacctagtcaggagggaaattcgacaaatttcttggattacttggtttggagttagaaatgcatctttgtactttacctcaagaaatggcttcaaataggtttcctgttttgttttttttttttttgccttttcgaagttgcgttattgtgatatttgtaaagggcttcctattacatctgcaagagggtaaggaattaaactaccaggtctttaccacatcttattaaaaaaagaaagtcattcttacagacctaacgcttcttcccccaccaagcactatttttccatgagtgaaaagtgttgaattctgggattttgccagcaattaattgtattctgaaaatggggaaatgatgtgctttggggatgcacttatataatcacttacattcttggagtagccagaggacagtttgccatatacagaatggtgtgacagacacttaagcacctaagatatttagggtatgggctttgtgttagaggaaagttaacacagtggctggttttgtgaaggaggaaatctagctgtgggaggagagagatgacatgttgagttttaaaaggatggatacttaaaatgtcattggggacattctacaacttgggagaggtcctttctaaagctgttacgattaggtgctaaaggaggtattgaaggcaaaggcatatccaaaaaaacaaattttctttctacacataactagttactctaaagcagaaatgttaggaacaatgttaggaattgtttcataggtgggaaaagggccatcttgtataggaaaggtgcatttg

SEQ ID NO: 8420 - DNA, 1109 bp, Homo sapiens
atttcacttcaacttcaattaccatttagtaattctggattgaagtagcagttggagctcatgcttgacttttcctttacagaaaggagaatcagttaagaagatgcgcgaggaggtaagttatgaaagactgagattgttaactttgggaagtaaaaaacctttaaaacaagtgaaaattctttttcagaaattaggaaggtctcaataagggaaatatgtattttttttcggcttggttatttgtagtgataatctggggagtgtattttttttttcccctttttgggaagtgtggttttgacaagtcagaattctttcaagacttaaggcagctgctgtaggctatctttgaggatagtcatggagcagtagtgtttggaatgatgctgactttgctttgcatcaggatcatgtacattggcagtcttataagggactgtagatcctgtacatactcagatcttctttgttttaacttcttttggatcttgtttcctatctagagtggtgcacgtatcaacatctcagaagggaattgtcctgagagaattatcactttggctggacccactaatgccatcttcaaagcctttgctatgatcattgacaaactggaagaggtttgttgtctcccactccctcattcttcatttttaagtgcttccagagagcttgttgattttctaagagctttttaaattcaaggacacactggaccttgagactcgctgtaaatgggtccttagcttcctgtagcctcccacaaaattcgagcatttgtagtttaaaaaagagtcacttgaggctgggcgtggtggctcatggctgtagtcccagcacttttgggaggctgaggcgggcagataaacgaggtcaggagttcgagaccaacatagtgaaacctcgtctctactaaaaatacaagaattagctgggcatggtggtgtgcgcctgtaatcccagctactcaggaggctgagataggagaaacgcttgaacccgggaggcggaggttgtggtgagccgagatcacaccactgcactccagcctgggcaacagagtgagactctgtctcaaaaaaaaaaaaaagtcacttgaatcatca

SEQ ID NO: 8421 - DNA, 1127 bp, Homo sapiens
gcttagctaatttttgtatttttagtggagacggggtctcactatgttggccaggctggtcttgaactccctgacctgaaatgattcacctgcttcagcttcccaaagtgctgggattacaagcttgagctaccgtgcctggcagtatttgatttaattttgacatcatcttttttccccattgcctggccaagtgtaactgcaaaacagattattacttttatccttagcaagtacattccttcagggtgaaggaaaatatatttatggctaattttgaggaatttttcatgagcttttatctttacatcaaaaatagtttgagaggggcatggtatttgaaccttttgtctatggtggattatgacctcgcatgtcctaataagatcacttaccctaataagggtaagtggttctttaatggcagttactagtttccagggatctgcttattgtggtgttctttctttctgtaggacataagcagctctatgaccaatagcacagctgccagtagacccccggtcaccctgaggctggtggtccctgctagtcagtgtggctctctcattggaaaaggtggatgcaagatcaaggaaatacgagaggttagtgacttttgtcgtccttttagaaatgttaactatttgttccaaattggctctttgtatggctaggaaaagttagcaatgagatgaagatttttattgaagtaacagttctagaggattacaatgtgattgtactgaaaataaaactcatgcaatagaattattttgcataattcataaattttaataaatcagaacatgagaatgttaatcagaattttcaactattacatatgacaagtttctatttttttttggcaacttttccatgaggctacatagttctttttcatgtctcaagggatgagtttgctatagtagcaacggtttttctattttttaatttttaactttttttcttttttttgacacggtctcactctgtctccccaggctggagtgcagtggcgcagtcatggctcactgcagcaaaacatcgaccttcccagcctcaggcgatcctctcatctcagcctcccaaggagccgggactgcaggctcccaccaccacaccca

SEQ ID NO: 8422 - DNA, 1204 bp, Homo sapiens
gttatatgcaagtactataccattttatgtaaaagacttgaatatccatggatatttgtttctatggggggaatcctaggactaatctcccaccaataacgtagggacacctagggacaactgcattgggattcaggttgaaatagtgactgattttggtagctgcctaagcaagtgcgttgctcaaaacaccttttcccacttggggctggtctgttacaagcatatttagttaactagttccatcttacctgcgtttgatctgggagccatttagagggcaagcataaacttgggagtccatctctttcacattgtgttgaattggcataaaaatgaacaagtttttagaggtttagtttgtcgtgtagttatgagaggtttcacaggaaggtcggttatgtcacagtgttaaccttgagtcagtttagtaccttgcttttagaaaagtacaaactggtttgttcaaagggctctcagtctagttagtcagagttgggcaggataagcaaaggcccagagtcagtgtcgccagaaggatttagccttaggagtttttctttcccaggaactccaggttcctgctcttctggattctcccactccccctttggaatagagtcccatactgggtggcagcaatcctctgtacttaaaattcttccttcacttccttttttttccactccccatcacacctcccccttcatacctctttgcttccctacccaccctccctccctccctcccctttatttagttgatgaccaccgtctaaaaatttgcagcttcttctatgagtggccctgtcatggattgttcccacaggcctttttaaatatacaatgtccacagatggacctgtgtcttttgttcctttgtggcaaagtgggctctgtaggggttcaacttaatcccacactgaccaggagctggcatcagctctgttgccccaccccttcattcttattgaaaatagcccaattgtgcagtgtgaaatctgccactaggtaacttttttttttaattcactgattacagctcgtttcaaattgtgtctgagctcctttttaaaggaaaaaggaaaaaaataaacaactttttttgtgtgaatttcatgctggtgacaaggtgccggattgacagccctggagactgaaatcctctatttatccacaggacaggtacagcacaggcagcgaca

SEQ ID NO: 8423 - DNA, 1155 bp, Homo sapiens
tgtaggatgaaattgggcatggcggtatacacctgtaatcccaggttacagggagcacagagatacagaggctgagattcgaaaatggcttaaaccaaggagtttgagactagcctgagcaacatagcgagaccctcggtttttttttttttttttaaagggccaggttcggtggcttatacctgtaatcccagcactttgggaggccaaggtgggtggatcacaaggtcaagagattgagaccatcctggccaacatggtgaaaccccgtctctactaaaaatacaaaaattggctgggcatggtggcatgcgcctgtagtcctgctgaggcaggtgaattgctcaaatccaggaggctgaggttgcacagtgagccaagatcaggccactgcactccagcctggccacagtcgtaggatttggggtgggggggtgggattcttagacctagccatgcaactctaattcggtgtgccttgtttttctttctcccttaagttgattggctgcataatcgggcgtcaaggcgccaaaatcaatgagatccgtcagatgtctggggcgcagatcaaaattgcgaacccagtggaaggatctactgataggcaggttaccatcactggatctgctgccagcattagcctggctcaatatctaatcaatgtcaggtaagattgctctaccttttgtcttatttatgccaacacagtaatgtgtgtgttggggagagctgcagtgtattaaatatgggattacatgggcgatgggtaaagatggccaaaaggtttttttttttttttgctagctctactttcttagagtgtagcagaaaaagtaaactgcagtaagttttcaaggggttggtgggggggggagcacagattgcccgcatttaacttgatggtttggtaagagggaagagtggtccttgtcttcagtaagagtcctctggctagagcactcacaaaatcaaatgtgggtctctcttgttctacatagcatatagactactatttctttcactgatttgatttggagtccaaagcacccttaattgtaataaggacattggagtaataggacagcaaggcagtttctgggaggcagcaattaccatttattctggaaacacccatttttctcacactgcatg

SEQ ID NO: 8424 - DNA, 2738 bp, Homo sapiens
ccctacacattgatagaactccagggctttaaagtaaaggccttgagttgtctcagcattaaacccttgagactactctcagatgactctttctttcctaaactggtattctgtcagcagtttgggaggagccaaagtgagctcagcaataaagaaacattgcttctgtgtattgtgagcactctttagaggggcctgtttccagaaagtacactccttggttagcccaccatggaggtggaactaaaagagaacatagtttgagggacattggataacaagggctgtttcccttggttctgaggtaatagacctccacatgcttgaattgcaaggattaaaggatcatggtactggtaaatttaagaaaccttaaaatgtctcccttggtactccagcactggttatttactcttcacatttcatgaaccaggtagagatgaggtgcagctgagcactggggaaactaactgagttcttgtttctgtgttacaggctttcctcggagacgggtggcatggggagcagctagaacaatgcagattcatccataatccctttctgctgttcaccaccacccatgatccatctgtgtagtttctgaacagtcagcgattccaggttttaaatagtttgtaaattttcagtttctacacactttatcatccactcgtgattttttaattaaagcgttttaattcctttctctgttcagctgttgatgctgagatccatatttagttttataagcttctccctggttttttttttttggctcatgaatttttctgtttgtcatggaaatgtaagagtggaatattaatacatttcagtttagttctgtaatgtcaggaatttttcaaaaaaattaaaagatggactggagctttttctttgtgaatagaaactggatgccacagtgattcatgtgggttttattcctcttgtcttgctgttatttttgtaccttttatccctcaaaggacccttcttgggttttgaatggaagcctttattccggttaagatgttttcttctattttaccacttccatctttttttgtggccctcgatcctatttttccctgactccatgcttggttggcccttataaaacttgtgcccaaaagattgaggattagactttccgaggacttacctgtcctaggggagtaggcaagcacttccactagggagggggtgggggaaaggaatgacacatgacatacatggcatacacattaagcagttgatcatatgtctgactgggttccagtttcttgggaatgttggtccccttgttcaggcttgcatattttaaactaaaaatttcagtctattgtttttagtaacttcatttatagtcctccataacaagttagaaggatgtatctgctaccatttattcctataattttagaaagttggggcttgacattatactcatttagtgagagtagatgcaaaaaagtggaggggcaggagaacttctccagacacctcagataaagtccggagcccaaggctttatcttaaccatgtatggtaccccattcattcatcaagaaaaccctcaacagctgggcctgcatggagtgttatatttcaaggtttttcacaggggttacagtaggacagtccccaccccaatcaggcaccaggataaaagcagggacttaaacagcaccccggttcttcagcctgagccatcacatgctatcagtctcctaacctccccctgggccttaagacagggcttgggcagagaagataaatggtgggacaaaaaaatgagttacattgccacctgagaaacctcagaggggaggacccagccttagcctccctcctcccaagtgcaaaatgtgtaaacagagtaaacggaacagaaaagtgcagtctaagtggttttctctcctgcccctcccaccgcccctccccccaccccctattatttggggataaagaatataaagacaaccctggcttttctattgccttgttgcttgctgaatataaggaatggggtggggcaggaaggggcttgcccttagccacagctctacggctgtgcctcattcatttccacagctgccagtgtccctagagtttatcaggtgaattggtcaggggatcagtctccctcgagcctgacttacggctgggacagccccatctttctgttgattatgtggcgcatatatatatatatatgtatatatatataatttatataaatatttctctatgtacaaggaatacgagtggctttcatggagggagggaagctgggggccgcaaggcatcaacgctgttggagttgtccaattcagtgctgtcacagtctgagtcctcagaattgggagggccctgtgagaaagagtagaaatggagtgagattccttggggttctttgctggggtcattttaatagccagtggcttactgatttgttttttaagacagagtctcactctcgcccaggctggagtgcagtagcacaatctcggctcactgcaacctctgcctcccaggttcaagcaattcttctgcctcagccttctgagtagctgggactacaggcatgcaccaccacgcccagctaatttttgtacttttaatagagatggggttttaccatattggtcaggctggtcttgaactcctgaccttgtgatccacccgcctcggcctcccaaagttctgggattccaggcgtgagtcaccatgcccagcca

SEQ ID NO: 8425 - DNA, 1192 bp, Homo sapiens
cccggctaattttgtatttttagtagagatgaggtttcaccatgttagccaggctggtcttgaattcctgacctcaggtgatctgcccgcctcggcctcccaaagtgctgggattacaggcgcgagccactgtgccggtcaagattccgtattgttaagaaacaaaaagtaaccgtggtttcatttgtctgtctgtcttataaataatcagagtttccaaatgaactgtagtttgtctaagtatgagactgagaagactggaaggaaataggaggcaaaattgaggactcctacaaaagggaagcttggggacatagtaatgagacttgctgtggttaccagaggctggtatatccttttaccagatcttactactctacctaacatcaggtgtgatttggaaaggattaatgttcccatcaagtaacctctcttccttcctgggcaccaggtctcaccagctcagcccacccctagtactggggggcgacggcggcgcacagtagatgaagatccagatgagcgacggcagcgctttctggagcgcaaccgggctgcagcctcccgctgccgccaaaagcgaaagctgtgggtgtcctccctagagaagaaggccgaagaactcacttctcagaacattcagctgagtgtgagtgggtcctggatgcttattggaattgttgaaaatccagaaagtgggatggaatcagaaaaaagtggtacaatttgatagaagatggtaattctctaattaggacagatctagttgtcccatgaagaatctcttaacggtcagagttgaaatctctttcataggtattggtgaagacactcaccatctacccccaaatctcctattagagtcatccttaaacgcatttggatgaaggaattagattaagcaccccagggtgctcttttaaatcatctgtagaatctgactggggtcatgaaaaccaaaagggaaatgtgtttgccctagataatgcagcttaataaaagagagaaagaaaaaagtgctacaagcacaaatagaataattataatctataatccataccttctcttgaatgttatttttccttctgattattaaaatattaaatttaaaaagcaatatataaatacatttctattataaaatatacacacaaatgtacagaatagaaacaaagtccctctttaatctgcc

SEQ ID NO: 8426 - DNA, 1177 bp, Homo sapiens
tctcccttccccgctggcgttcacggtcactgcctcacgggccggccagagggtggaccagcgtaatttacgaggcgggaggagaattcacccttaaaggggctaccagccattgaggtcccactcagccccagtttcccaggcccgtgagaatgaaggaggggggcgctccagccccccacccaactcccttctctcttcctcgcccgccccccaacattgccctttgtcttcagaagggctgcctccgcctcctggcctgcaaacctccacagcctagcacatggaccagagcagagggaggggcacagccctagaacccattggaggtctgagaatggcttctctgagtgggaaggactttcatccagactccttcagaccccagccccagcccagtagacgctgggctggcttggaagagaggagcagtgagagaaccatcaacctttctgtacttcatttttatccttctccccaagagtcccccagcctcccatctgctgtccggccctttccaggagcaagaggggtgagaagcagggcactgatgggagttaactgcagcctggacagtgtgaaactggcctgctggcttggagtgtttcccatatggggagagtctcccctaacaaactctccaaaggcaatccaccgagctttttactctcccaccagcacacagcttctgtacaggcagaggcaaaggcaaacacatacacacagctgagcccagcacagcactgggcccaccccactctccctagtgcactcgcaagcaggcagcctcataatccccacatggcccagcagaatggagataaaatcacatgcctccatcccccgctgggtatctgacacctgacaattccccatccacacatacttgcttcacccatgtacaagttcccccaaattaccaccattccagctgtctgcagtctcctgtggtcttcccctgggcatgaagcactccccaccttgactggtcacccactgtaccccctttatgcagcccttcctgtgacctctgggctctagggtgctggatttgagctctaccactccagactaacctgattcccaatctaataatgaagagggaccagaacactctaaaaggagtgaggggacaaagatatgcaatattctctttccatttgctttaaacttgact

SEQ ID NO: 8427 - DNA, 1558 bp, Homo sapiens
aaaactagcctgtgattttttttcactctaagcattaagagctcctaaagccttttgtcttgttacttttttccccctcttgcatgctagaggtggaaggtagtcatttagatttcccccctcttccctcttcattgttggccaggggttctcttgggcagctgggggaaggatgtagtagatctctcttttttttttttttttgagatggagtctcatgctgttgcccaggctggagtgcagtggcatggtctcagttcactgcaacatctgctttcccggttcaagtgattctcctgcctcagcctcctgtatagctggaattacaggcatgtgccaccacgcctggctaatttttgtatttttattaaagacagtgtttcaccatgttggccaggctggtctcaaactcctgacttcaagtaatccacctgtcttggcctcccaaagtgctgctgcctggctggatgtagcagatctccaattgccttaccaaacctgcagggtctctgttaagtgtctgttaggggtcttatatgatactctggacaccgtgagaaacaggtgatggggcagatgggaacctggtatccaactcattttttatgtctgctgaatggttgactgggtgcccctttggtaagggctgggaaagtgaaccaagttgggagcagagcaggtcttgagaccaccttaatgaggaacacatggtctacttcctatctcctgggacacaggtcatttccagcttccagaattagtaagatttttcatataaatcctcccctacttcattgtataataaagaatttggcctttgtcttcagttcctgagaaggagactctaaatccttggaatttcccaagtaataggagtatctttgtttttcgtggcaggtccctgaaactacacctgaatttatgttgagatttgaccttaggctgcacctaattttatattgaatttgatctcagaccacacctgagtttgctgtaagatttgactgaggatggaggctgaccatgccagaatgaccaaccatatagttacagggctgggactttgagctggatgataccagcttgatccccagggaggggagaggggctagagattgagttcagccacatgccgatgattttaaccaattatatctatggtaaaactctagatataaaaacttctgacacaggttttggtcagcttcctggctggtgaacacatggatgtgctgagggatgtgcattggtatcctgtttctatgagcagagggcacacatctgtgcctgggacactcctggaccctaccatatatttgtcttcatttggctggttctgatttgtatcttttgtaatagaaccataatcataagtatagagttttcctgagttccgtgagtcattctaggaaattctccaacctcagggtgggtggcggggggttgtggagactcctgaatttatagccagttggtcagaagtgcaggtggtctggggatcctcaagctcgcaactgacatctgaagtgagagcagtcttggtggggagtatgccctt

SEQ ID NO: 8428 - DNA, 1048 bp, Homo sapiens
gaccttgggcaagtcacttctttcaatgcctcagttccccatctgtcaaatggggttaataatactgacctacctcacaggggtgttgttgtgaggcattgtaaatcaaagttaatagaatacttcagggtcctctgtggaggatgtcttgagccagagtttaagcctgacacacaggctttggtcctcactgagctgtctccaagactggaactacttagtgactcggcaaattttctgccccccacccctcatcaaagctgctagttcagatgttgacagtgttttcatgaatgttggaatcttactagtccagacttacttaggatgttgttggggaaggcacttgggattttctgtgtcttgcattcacagagggaggccatttcagattcaagagcattggattagggaatcgtgaggcagggatgctactgcgtatttctctctgcaggttggggattaaagttcctttccccatgggtttgaagcagactcagactgtctcaggatcaaagcaaccctcaatggttttgatttatgtcattgcttaccactccccaaccaatcccaggacagctgggtcactgtacccctttgtggtatctgtacctgggcctctccttcctcatagggaccagctgattgaataaatgtgaccaccttatttccaccccccacccccaaaagctacattggaattatttttcctagaaatgtgtataacactcagaattgggcattgatccttaaagcttcatcccattcaccgtattcaacatctgtcatctcttagtgtctgcagtctgaacctaaccttgaccttttttccctctggtttgagaaaactttggacactatttctacttggccaggtgtgggctcaagagccttactctttccatctcagtttaggggcgcagccagctcctcttcccaatagggctctttctgctttccctctccttggccctagatttgtaatccatgaaaaagcacaaggtcctggctccttgcggtcacattctggttctctgtgttttgtgga

SEQ ID NO: 8429 - DNA, 1048 bp, Homo sapiens; identical to SEQ ID NO: 8428

SEQ ID NO: 8430 - DNA, 1093 bp, Homo sapiens
tgcaacctccgcctcccgggttcaagcagttctctgcctcagcctcctgagcagctgggattataggcgcctgccaccatgcccggctaatttttgtatttttagtagagacagggttcaccatcttggccgtgctggtcttgaactcctgaccttgtgatccgcctgcctcggccactcaaagtgctgggattgcaggcgtgagccagcacccggccacagtatctttattacagctcactgcagcctcaatctcctgggctcaaatgatcctcctgcctcagcctcccaagcagctgggactacaggcgcacaccacggtgtctggctaattttattatttaaaaaatgttttgtagagacagtctccctgtgttgcccaggctggtctccaactcgtgagctcaagtgatccacgtgcctcagcctcccaaagtgctgggattacaagcataagccaccgcacccggcccctagtgaacattttactgtatgtgttgataaatcatcttttgagtttctgttgtatgtggggacttcctacactggctgctgtgaagaggtatggaagaaaggagaggctttctgcctagaaattctttgagaacacctgaaaagacagtttaatcatgtcacaacactcttaaggctcaagtcagtgttctggtttccggtagctttaggattggattctaaacgagggctggtggtgagtttggtgtttgtctcgtgtcaccctcacccctcacctcctcagtttaggataagagacataatgatttctaccagaatccaaagtaaatccaaagggggagaaaagacataactgttttttcttctaccttttttttgttaaagagttacatctctcacaggaggaaagaattcaagagtctatatgattagttacagagaatattttcatcccctctccctgaatagaaaagcaggggtcaccatttgtatccttacccttgaggtgtttttgaagatgctgtaactcttgaagttgagctgaggcagaaaggttggaaaaatgcagccctctgggtattgtggggagggatgtgatgtagtaagagggtgttttgtg

SEQ ID NO: 8431 - DNA, 1134 bp, Homo sapiens
ctgcaacctccgcatcccgggttcaagcaattctactgcctcagcctcccgagtagctggggttacaggcacctgccaccatgcctggctaattttttgtatttttagtagagatggggtttcaccatgttggccaggctggtcttgaactcctgagcttgtgattcgcctgccttggcctcccaaagtgctgagattacaggcgtgagccaccatgcctctgactccggagtatcttataggacattagagacttttagggttcaccaccagtcttctggaggaattccaggaaagataatcacatcttacaaaaatatctcttgacatcactgtcacttcattgtcactgtcagtacttagtattaagttctaaaaatttttctgaattggtgaaagaaatgatatcaggagatattaacttaggttatgttttgttgagcctagaagcagggagtttctttactctttccacaagctgtaacctttctttatcttctatttatagcagagcaatgatatcgctcggggctttgagagaggactggaaccagaaaagatcattggggcaacagattcctgtggtgatttaatgttcctaatgaaatggtgagagagatttggcttcgctttacaattgtgtttctttgccagtgacttgaatttgtgtggaagatagggtggcaagactgcatattcccaaaccatgaattttgaatgtcagagatctttctttttttgagacagtgtttcgccctttgttgcccatgctggagtacagtggtgcgatctcactcagctcactgcagcctccgcctcctgggttcaagtgattctcctgtctcagcctcccgagtacctgggatgacaggtgcccgccaccatgcctggctaatttttgtatttttattatttatttatttatttatttatttttgagacaaagtctcttgttgcccaggctggagtgcaatggtgcgatctcggcttaccgcaacctccgcctccgggttcaagcgatactcctgcctcagcctcccgagtagctgggattacaggcatgtgccaccatacctggctacttttatatttttagtagagacagggttcctctatgttggtcaggctggtctc

SEQ ID NO: 8432 - DNA, 1173 bp, Homo sapiens
tgcctaagcaagccttttttgtgtgctgctaagagactgggcaagatgctcagagcacagaaaactcatattttagtggcttttcttttttcatttttataaagacgcttattcaccttggagaaaaaggttttaattttatcttggttcatttaactaaagattttgcacatttctgtttgagttcctggcttgtaaacagttacaaacatagccaggaataacataccacactacttgtcttttggaatctgaaatagaagagttaaacagttgtgccttctaataattttggtctctttagccgaagaggaggttgtagttgaggaagtgaagactgattcatttttaaattaaactcttaggactcatctgtagaatgatttgagactcaagagcagggcacatggcaactcagtgttatccccttttcatcccatcaagaaaagacaaagtttttaactcctcacatggattctaaccattttgtcctttgcctttgcagggacctggtggccttagtctttcaggtggaacggtgtgcgacatgggaaagaaaaccaagcggacagctgacagttcttcttcagaggatgaggaggagtatgttgtggagaaggtgctagacaggcgcgtggttaagggacaagtggaatatctactgaagtggaaaggcttttctgagtaagttccttttttcccccaggcgttgggactctgtagagatagatacctttggtttacttccttaggaatcacaagcatttttgtctttttcttccccctcctgcactcttcctaagagttagaagacacagcagtaaagaaaacaaaatctctccgcttgtggagcttacgttctaatgatactgcttttgaaaggcagtataatgaattggttaggagcacagactcgagagtcagattgcttgggtctagattctaactccaccacttatgatacaaactggatggccttggctaatttccttaatcattttatctcctcagtgaaataaggataagcagtagtgcttataaggccaggcgtggtggcttgcactctaatctcagcactttgggaggctgaggcgggtggatcacctgaggtcaggagtttgagaccagcctggccaacatggtgaaactccatctactaaaaataaaaaaatt

SEQ ID NO: 8433 - DNA, 1452 bp, Homo sapiens
gaatttaacttttattatcccaaatatgaaaacattactgttggcactttgaaactttaaaagaaaaattgtacttttcaggtggctatggcggttccagcagcagcagtagctatggcagtggcagaagattttaattaggtaagtaagcacctttttgtgtgttgacataattttttaaattgctgatgaacccaataaccctaatgtagctgagcagtgcaacatagttaacattataattgcagtaattgtggatataaagttaatattcagatcagcaaaatttgtgggaaacaaacttgatattggattgtagccttgagtcttaatatgtttagattaacaactttattccatattgttcaacaggaaacaaagcttagcaggagaggagagccagagaagtgacagggaagctacaggttacaacagatttgtgaactcagccaagcacagtggtggcagggcctagctgctacaaagaagacatgttttagacaaatactcatgtgtatgggcaaaaaactcgaggactgtatttgtgactaattgtataacaggttattttagtttctgttctgtggaaagtgtaaagcattccaacaaagggttttaatgtagatttttttttttgcaccccatgctgttgattgctaaatgtaacagtctgatcgtgacgctgaataaatgtcttttttttaatgtgctgtgtaaagttagtctactcttaagccatcttggtaaatttccccaacagtgtgaagttagaattccttcagggtgatgccaggttctatttggaatttatatacaacctgcttgggtggagaagccattgtcttcggaaaccttggtgtagttgaactgatagttactgttgtgacctgaagttcaccattaaaagggattacccaagcaaaatcatggaatggttataaaagtgattgttggcacatcctatgcaatatatctaaattgaataatggtaccagataaaattatagatgggaatgaagcttgtgtatccattatcatgtgtaatcaataaacgatttaattctcttgaatgaaatgacaactgtatggatttgggactggcagagatttggactttccctacccactccccctgataataatgttgaatgcttctatcacaattcaagttcaaagctctgccagggaatagaaactagctgctggctaatgccgctccataaatccgcagatttgaagtgtctgggaggccttttaaaaataactaatatcagaaagcattttaatgaacgtaaagataggcttacattaaaggaaaactgcagtttgactgggttctggttgggtgggccttcagaggttctatcagttaactatactaattaatttggagattcaaaccataccaatagaaactaaatttttctacataatttcatgttaactgcagtt

SEQ ID NO: 8434 - DNA, 1452 bp, Homo sapiens; identical to SEQ ID NO: 8433

SEQ ID NO: 8435 - DNA, 1636 bp, Homo sapiens
ctgggagtaaagctcccagcatatttagataatagggcaggggaagcaccctctttctttctagactggattatgctcacatgctcccttgccctgacatttttgtaaattctgtgccctttgctgtagctacacttcagattaaagtaggagaaagaatgtgctgagtgttttcctccctttgcctctacctggccctcatcccaacagcccagcaaggggagagagaaagagaattcttttctatagaacgagtgggggcggggatgggtagggatttatccaatctaagccctaaccccacttagtgacctcagtgttttcttccattccttcttactgccctgtcctctgccttggaagaggctttgggaatagttcatagggaagggacaacatggaagaaacagcgatttaaattgtattgaacagggcatataaaatgcattctgtaccctgatctggcatatagcttcaaaactgcagtggcgagtgtccatctcttagttagctaccttaactgtccacccttactacctgtgggatcgttgcctggtttgtcttctctgtgtcctggagcaaagccagttcctaaaactaaaactccattctagtcttgggaagaaaagtttctactcagaactggggaaggagtggaacttatgacttgggcctctaggctgtctctgtcccctcagctccccgacatgcatttactctctgccgtgggtctgcagtcgctgcaacctaccctctctctgcctcagccttacacccaagcagtaggtctgtgctctccctgtctctaggtcgctgagagaggtgcttttcttcataaaacctttggggtttggatttccccaggaagatggagaatggaatactcactcttgggtctaatctttccccttgacccagaacttcctccccacaaaaatgcctttaaaaaccttcctgagacttaagcattctgccccacttactaactgccagttctccagcactgaggtggggcagataacggggcatatttaagggggcatctttgtgtaaaagatgcatggagtcaggagaaaaccaccttcataaactgctctgtgcaaagaggaataaaacattttttccaaactgcctttgtgtgatgtttctgtttctcttcctctctttttggcagctactcctgttcctccagccccccgtcattccccatcttataatatttcttccctcctacctcagagactcctagcagtgcccccccatccctaatttacggggctgtttgcctccttggcatctctccgtcccctcgcctggaaattggcgccaggggtggggtggggatggtattttctcagtgggagtcccagggaactgagttcttcccccatcacccccaaagccagctgcctgctcccgcctcagccattagtaacccagagacgcgcacctgcgtgggggctcttctccagcccttgctcacttcctgcacctcccactcctgctctgaaacggcgctgagcgggttatttatcggagccagcgctgctccagaaggtcaggacggtggtgtaaataacctcttctcgccatttccccgtccctccagagcctgctcccctccccctcctccacc

SEQ ID NO: 8436 - DNA, 1128 bp, Homo sapiens
ggccagatgggagggggccggtgcttggagcttgattatactccctcgctgttgcccctttccgggagctcacagccccctatccactggcccccgcagcacatctccagccggcggcaccgagacggcgtggccgggaagcccaacccactactgagccgtcacaagaagtctaggggcgccggggagctggcggtgaggcctggatgctgggaattcagcagtgggagggcgcgggcggggaggagagagggacgcgggctttgcccagggagaggtggggtttgcaggaccgccgggtgacttctcttcctccgcctttcgcccgcttcagggcacgctgactttctccaaggagctgcccaagtccctggcgggcggcctgctccccagccccctggcggtggctgcagtgatggcagcggcagcaggctcgccgctgtccctgcgcccggctccagccgcacctcttctccagggaccgccgatcactcaccctctgcttcacccggcccccggacccatccgaactgcgcacggacccatcctcttctccccgtactgacctcaaccctgaacccctcccattcaactccccacctccagccgggacccaggcgtccgggctcccagcccgcccctcctcccggcactccctaaatgatctctccttccccccccccaccccgagatacggggttccaggaaaggggaggggtagcgggggaggggggcttcagaagggggggaacaccccagatctcagggaaccccgccccctgcctttccctctcccctagaaaagggggggccgtctcacccccgagcccccttggagacaccccccctcccaaaagccatgtccatccagcccttccccccaaacctagcacaaaacggggttcacaagccatggtcggggtccgggggggacagaaatggattttcttggcaataagcggactctgggactccggctccctaccccaaactgaagcgcttccgtgaacacccccgtcctccgtagggggaggggagcaggcgggatcctgggtccctcataagcactttggttttaccgcctgcaacctcactgtgcccgccccgcaccatgccctagccccaggt

SEQ ID NO: 8437 - DNA, 1181 bp, Homo sapiens
gggcctctccgaccttcatcactattcttaggataatgctggcgggcagagatgatcaatcatcatattaaatcataatgagcttataatcctcccactggagctgctattgtctcctgcacattcattaggaccattatcttctctcttcctttttcaaatgtgttcagcaaacattcaacctgctcctactgcagagtagcagcaaaggagcccctcttttcctttgtggggctcttcgaggggtcattgggtctcttcctttgcccccagcttgactgcgtttcctactggggcaaggaggaagtgcccttcagagatgttcactgcccacctactctactacattgtttgttacaagttctctcttgctttaacccctcctgctttgatatctccacaacccagagcagagggtcagttagtctccgtcaattctaggttacatgacaactgattggcccagacttaggtgggttttccctcctgtaccatttgggggtactctgccttttattgggagggactaatttaaccccaaatccttttgtcagcctgggtatagctgttgctccaggaagggatttctcttctggatcttaaatttcacagacctcattaggttgtatggccctgagagtgggtatccttgagggagtacaagctgtttcaacttagcccttttctgcgctaattagaatttcaagcgtcacagagcctgggggctttcaagatagcactaaactaggtttacttaactccttggcaggaaatagtggcccccatgcatcacttctgtgaatccactgccagggagaagtggagaaacagatcatatatgtcacaggtctagagtggttggaattgacaaatataattagctagttggttaattagggtcatgtccatactttcatgatgaaagggaagcagttgtcggttttcagcaaaaacgattcagccttcctgaagcctatttgatagctgttttggggttttgtacatgtgtttgctttttatttcttgagacccaggcttagtcaatactttcttaacttggcacccataatcaacatacagatttttcttagcaacagttgtctgctctttagggtggaagcgatagagaatcctgcttcgtgcatcagcaaatcctccttccttgctatgggaagggctta

SEQ ID NO: 8438 - DNA, 1188 bp, Homo sapiens
attcctgaccacaaaaggacagagatgaaattctacattcacacagcccgccaagttagccaagctccctaggaggctgtctgaagtgcctaaaatgcttctctacaatgatcacccagagctgagagacttcagtggggtagtgagaagaaagagggttgggagagacaggaaagcatcctctccttgagggaaggaactgggaatcaactgagaaccagctagcactgccaggaggtgaggagagggaaggagaataatttaaatgaggccagggagcttctgctccctcaattaaacggtgatagacggcctgacaccaccagccctcgaagcctgagatccacaggaaatgttaaaaactggcttggcaatataagtattagaaaatacttcttccaacactcaccaaaaactaagctcccaataaagaacacttcacctgccctccgcaaccctctacctctcttccccgccaagatcttcacccaaggtctcaagagggcggttcccaacctcacgtgacacagcggtcacgtgacatggccccggggagccgaggtgagcgttccagcttccggagccggagggggcccggcgtacccagcccccagcccgacgtgaccatgctgtcccgcctcctaaaagaacaccaggccaagcagaatgaacgcaaggagctgcagggtgagccaaatatcctgtcggccgttttctcttcggccgcggcctagcttcagcccggagcctggatctcgagtaactaaccatatccagggaaagacgccagctagcgggcaacgggcatgggggagagggaatttcagagaggctttttttgaaactcctttcccttgccaactggctccggtcccttgggcaatactccggtcccctcggcaacgcccccaatccccgacctgccgcaccttagccccgcccctgccccggagcgccctgcctattggccctgggagcctctcgtcctggcggcgggaaggagcgactctggagggaggagggtgtggggaaccccccagagatgggcttcttggaggcctgaaaccaccggaacggaggtggggcacttgtttcctgagtccgggctggaaatctcggagttaccgattctgcggccgagtagtggagaaagagtgcctgggagtcaggagtcctgggcgctgccgc

SEQ ID NO: 8439 - DNA, 1188 bp, Homo sapiens; identical to SEQ ID NO: 8438

SEQ ID NO: 8440 - DNA, 1114 bp, Homo sapiens
aaccttagtcacagctgatgcgcgcgtgggatgtgcactggaggatagtgagggggcagttctgggagagaattgagctgggagccctggaggcctgtagaaagcattattctaggtcagaaatacgtgtcttgaggtcaaggctttctgggaggtttttgaatttggtcatgtccctgattaaagagccgggaggggatcaggggaggtaggggcaggcaaggatgggtcatccccctaccccacagccaaagaaattccctagaggtgtgagaatctctcttccggatggggtcaagtctgtgtcctaggtgtaccccctgccctccaccatggagggccactgtgttgtggatatggcctaatcctcacctgattttctcttaggcctgtgcagtgggactgattgccgtgggtgtcggggcacagcttgtcctgagtcagaccataatccagggggctacccctggctctctgttgccagtggtcatcatcgcagtgggtgtcttcctcttcctggtggcttttgtgggctgctgcggggcctgcaaggagaactattgtcttatgatcacggtgagttgggggcgggaccaacatgggcggtctgggactgccagagcagcttggttcgggctcaggaaggtgggtgaggtgggtgggtgaggaagacctttgtgagtgtccagggaccggctgtgccaaaacgggcccctgtaatgcatagactccaaacttgacttctgtcctttgctcctgcagtttgccatctttctgtctcttatcatgttggtggaggtggccgcagccattgctggctatgtgtttagagataaggtaagcagggaataatgggaagggcctgcctcagccgggtctgggaccctggtgcttgaattctgactgcaacagtgctcctccgtactctcaggtgatgtcagagtttaataacaacttccggcagcagatggagaattacccgaaaaacaaccacactgcttcgatcctggacaggatgcaggcagatgtgagtggggttgctgggagcaggggtggtgggaatagagaattctcatctccaaggctgggtgtggtgactcacgcctgtaatctc

SEQ ID NO: 8441 - DNA, 1130 bp, Homo sapiens
ggctttgatgacttttaaaaatattaaataaaactttatttacttccttaggtctgtcatctgataacaaacctatggtaagaaatctttttttatttcttacacacccagatcttaattctatatagctaactttagagactcctcctccccagattagaggaaactctgagaacattaatttgttgactcttttcagtacaatgttgtatgtcttgaatttaaaaaattgttggagatactgagaggtcaggaaaattgtcacatgttcaattactgcagacgtcttccttcctaccactctttttgaaagtaagaatggattttgttagccatgtatgtaactgttttatggtactggaggccttgtccagtggccttagataatgtctaattcataattaccacaagagaatctatggaagcaatttaggagttctgtttgtagatagtgcttttttttttttttttaaaatactatccgtgaaatgtgaaatcagagtaaagaatggtagaataaaatggctttctggaccattgtgactagtcagcatatttaaaaaatggtaacgaatgctgtggtgaaatagaatcagctttatgaaatcctgctttaggggttgctgtttaatattgtaagtgaaggtttaatattattaatgaaaatttcctaaatattcttttttttttttttttttttgagacggagtttcattcttttgcccaggctggagtgcagtggtgcgatctcagcttactgcaacctccgcctcccgggttcaaggaattctcctgcctcagcctcccaagtagctgggattacaggtgcccgccaccatgcccggctaatttttgtatttttagtagagacggggtttcaccatgttggccaggctggtcttgaactcctgacctcaggtgatccacctgcctcggcctcccaaacttctaggattacaggcgtgagccaccgcgcctggccctaaataattcttaacaatagtagcaagtccatgtaccaaggtttccaagaaagaggagggaagagaatcgagttgggtagtagttataggttgtcttctgaaaaaggtgcttccgtgatagtttctctttgtttggagatagagtta

SEQ ID NO: 8442 - DNA, 1367 bp, Homo sapiens
caagggagaagccaaacctaagcggcggaagaaagtgaggaggcccttccaacgttgatgccccttctctttcctcaaatcaatgtcagggagtcaaaagggctgtagcacaggatggagtttgatttatccctcctcccccaacacctaggaactgaatctttttctttttattttttgagatggagtcttgctctgttgcccagctggagtgcagtggtgtgatctcagcttactgcaacctctgtctcccgggttcaagcaattctcccatctcagcctcctgagtagctgggattacaggcacacaccaccacacctggcccagctaattcttttttgtatttttagtagagacggggtttcaccatgttgcccaggctggtctcgaactcctgagctcaggtgatccacccgtcttggcctcccaaagtgctggattacaggcataagccactgtgcccggcctgaatcttgtcttttgacaataccaaagaaatagggggtagctagagtaaagaacctagggcctggacctgggctggacagtgtatccctttaggtgtgggaactgggtatttccctggggtctgtatgcctttgtcttgtcatttgcttttagggcagatgacactttttcccacccttttaaagctacaagtctatcttctttcttgacccatttcaggagggagccctctcctttatcctgatataatatttaaaagagaacaagaaagcatgtagccctaatgataggagattatcgcatagagttcagagactggaaactgaattttccctcgactttcactttgtgggtaaatcacccaattttaggctcttttctgcaaggatggccaaaattaatcatttttaaaaagtagattcatgcccactgcccttgggtgagggggaagaatacgggggttcccagaagcccccatgtgatccaagggtttgtattttttttttaagtttgttcatatttgtatgtacatgactatttaaagccaggggattatctttctataaatgtataactggcaacctgtatcttccctctttgttgcccatatagccggagccctttttctcatttgagaatctcttccctactaagtgttaagcttagagtgaagggcacctcctactggaccaaaggagaggggattggagaattgttttaagttttatacattaggtcagtattccatcttcccacccccagccttatgaggacagctctctacccatcctgattaaactgcagctatagctgaaaaaaattattgtaagaaaaatacacagcaaaacagagctggaaggtggtaagtgtaaaagatatggaaagatgtaatcaccaa

SEQ ID NO: 8443 - DNA, 1255 bp, Homo sapiens
caagctggtcttgaactcctgggctcaagtgatcctcctgcttcagcctcccaaagtgctaggattatagccaccgcacctcgtcttgaaatagccttttaaatgttcacctcagcttgcctcacagtggtaaaaataagcatttttttgttttgtaggatcagggagcttccaaggcatttgatacctttttgatgggaagaagggctctgaggagctccaagataccccaacctccaggcccttcattagggggtagttgggtttctgtttggcctttccccctgggccccataggcttaaactacccccacccccacctccgcctcctacctcagctgggagcactgtcttccatggggcttccacttctctcctcaacctggggaagaccacagggcagtgcctgcctcaggacctgccttccccaaaagctggcttcttgctccaaggagagagcattgacccacctgccagagtcttgccttttgcccaaaggagcctggtcttcagggctgcataggatgcaagtgccttctctgcttctcaccgtgggtggcactaatttcctccttaaccagaactttgttccagccactgacccattctaactcttccccctctgactctcctgcgcagggtctgttcctggtttcccagatgcataaaggaagacatatccctcccctgggcagcaaggctacaatgggagggagggagaacatgggagcatgtgaataaaatggcattaaatactgaaccagggagtccagcctctgctgttgctgctcttttctttctctgcaccccaaaacaaagagctaaccatcttgacaaatcctctgtcccctaaagatctaatagagatgcccttattatacagactactgtaagagttatacagccagacagctagaggaagagctgttcagtcctctcttatgaacatggagttagcttttattaaacacaaatgtaccagacactgtgccaggcacttcacatacagtatttcatttagtgcaacaatcctgcagtactggtcttaacctaatgttgcaaatggggaatctgagattcaacaaggttaattagcttgcccgtaatcataagcacataaatgtgattctcaaggattccaaggcccttgctcagtttactggccatgctgttttcttgcattttatgtaggaagaacaggacccaggcatctccctccaccattgacctccagagaagagatgacacagttgga

SEQ ID NO: 8444 - DNA, 1210 bp, Homo sapiens
gggaggatggaagtgagaattctgccttgggtagaaggagttctggtttcctgatttctgggaacacctgctgcccatttagtccactatcacatcattgaagtcaacatgcatctctccctctagcaaatgctgcactacgaccctaacaagcggatttcggccaaggcagccctggctcaccctttcttccaggatgtgaccaagccagtaccccatcttcgactctgatagccttcttgaagcccccagccctaatctcaccctctcctccagtgtgggcttgaccaggcttggccttgggctatttggactcaggtgggccctctgaacttgccttaaacactcaccttctagtcttggccagccaactctgggaatacaggggtgaaaggggggaaccagtgaaaatgaaaggaagtttcagtattagatgcacttaagttagcctccaccaccctttcccccttctcttagttattgctgaagagggttggtataaaaataattttaaaaaagccttcctacacgttagatttgccgtaccaatctctgaatgccccataattattatttccagtgtttgggatgaccaggatcccaagcctcctgctgccacaatgtttataaaggccaaatgatagcgggggctaagttggtgcttttgagaaccaagtaaaacaaaaccactgggaggagtctattttaaagaattcggttgaaaaaatagatccaatcagtttataccctagttagtgttttgcctcacctaataggctgggagactgaagactcagcccgggtggggctgcagaaaaatgattggccccagtccccttgtttgtcccttctacaggcatgaggaatctgggaggccctgagacagggattgtgcttcattccaatctattgcttcaccatggccttatgaggcaggtgagagatgtttgaatttttctcttccttttagtattcttagttgttcagttgccaaggatccctgatcccattttcctctgacgtccacctcctaccccataggagttagaagttagggtttaggcatcattttgagaatgctgacactttttcagggctgtgattgagtgagggcatgggtaaaaatatttctttaaaagaaggatgaacaattatatttatatttcaggttatatccaatagtagagttggctttttttttttttttttg

SEQ ID NO: 8445 - DNA, 1907 bp, Homo sapiens
cctcagcacacaacccctacggtaacagcacactgagccctggctcccaagggctgcctcctgacagctccgtcatggcactttttaacgcttcagcaacaaacaccaggcagctgttgccactggcctcctaccccctactctggggcttgggggtcaactccccccaggacttaccttccaaaacaaactttcttcactttgtattataggtacaagacagcgacttacgtatcttttctcctcctccctagtgttcctccccattttttcagaaaacacttctgactcctgtcccttccccttctgcttttggtcagtccctgttcttgagcctcttttctcctctccccaggatgcagaaagtggtgaacccaggaactgaggaaggaggtttccagttcatttacattaagggccctgggggagaataaagctcagagcaggagggagtaaggaaacatttcctttttgtttttatttggttggagtttctcatatttgaaaacattgcggtatccatgatttggccttgtggagggtgttcctaggtagaggtgagaatggggaggcaagatctcaggcaccaggcaggaggtgccttgtaagctaactgggcggaggtggaggtgcagtgtcaactgtggctctgtaactcttcaaaggcccagtttcccctcacgcagcctcttaggtagcgtttcccctaatcgtgggggttggaccccagagtcttccaaagaattttcactggttgcctgcatctttggctctgctgtgatctgattggaggagggacagtttctggtacccatcctctgatttatacatatgcattttttcccctctggcctttagatggcctcagccccagccaccatatacccctgcagtttgcactttaattgatggtagttcagttggggtacttgttttatggaagttttgattgatttacttgccctcccaccttctttttaattcaatgaaatctgaggttaatgcgaggttcgaggagaggttatagataaaactaccagtggcagctactcaagtcctatctccactgttagcttcctccaactctaattattaacctatattcttgccaagctaactattgactataggtttgcctttcctggagaattaattgagcaattgaggagtgtctcaggatagcacaggccaaggtaggggagtaaaaaggaggtcaggcaaaagggaggagttttctgtcctttcccaggtttcacactcaatttgatatccattaccatgtcttttctacttccttgtaaataggtatgatctttattcccactgtacagtctgttctatcctctgcctcccatcaggccctgtttctttgttcctttgttaatatcttgaatttagtccctccatccttaatccccccatccctccccatcatgcaaccagtggtttaatccatgtaccaataggggctagtaccacagaggcctcctgtggtgccctcgtatcataccacctgttcctgtggagagggaatgaccggcactgaaggtaccttacaactggctcatattatcagaggaccttggtcctttctaaatctctagtctctcttcatatccttcatcaggtgttttaagatgtctctgagaagccatcaaggcaaaagagaactttaagttccttgttccagcccggagttttgggaaagaaagaaaggaaaggtcacagtgacctaggattggaaccttcctgcccttttggcttgcagactgccttctatcccagaacagctgagaaatctatgaagctgagattctgaaggacccagcttaggttcttccacttaggcctcaattcccttccttttccaggggcagccttagttcccatggccctgaaacacacac

SEQ ID NO: 8446 - DNA, 1057 bp, Homo sapiens
cgcactacaattcccaccaagcatctgtccctctctggcctctaataacgagtgcgccttgtggtccagcgtctggcaactttcacgcctagcgtcgcgtataccggaaaactgcatcgtccagaattgcttccgagtcggcgcggcgcaaggcttgctgggagacacataacctcgattttcttccgccatccggctaaatagtcccatgtgcactttgttccatggataaataaacactaggaacgcatttccaccctagatttcagcagaaatgctgaatgtaaaggaatatttgagtaaagtgagttgccgttcttgaagcccgtctcctaaggattctcccggtgtccgcgtagggatctcatgctatataggagggccctgccaggcaccgtctcctctctccggtccgtgcctccaagatggtgagtcttcttgcgtggtgagggtgggggttcgggtgcagactctgggattgtggggaagtgagagcctggagcacggctgaggggtggaccgagtgtacatttcatttgctctgggggtcggcgggatttgcggagaaacaggagatccgagcggcgccttcctggaggctgccggtgcggcttgtggccggaaagggactgaggctgggtgagttgcgccgttttcctaacagttttcccatcctgtcgcagacaaagaaaagaaggaacaatggtcgtgccaaaaagggccgcggccacgtgcagcctattcgctgcactaactgtgcccgatgcgtgcccaaggacaaggccattaagaaattcgtcattcgaaacatagtggaggccgcagcagtcagggacatttctgaagcgagcgtcttcgatggtaagtgggtcaccggcgcgaactgtgtgaggatcccagtatcttaaagccttcgcccaacttcgcccttttggaggctctgttctttggagcctctcaggcaatttccacgtatttaaggttgttactggtagaagagaattctcttgtttgccgttttgattcttttctgggcagagggtgactttgtgataga

SEQ ID NO: 8447 - DNA, 1204 bp, Homo sapiens
atacctgtaacctcaacactttgggaggctgggacaagaagattgctagaaaccagcagttcaagaccccatctcttcaaaaaatattgagaaggaagccaagcatgatagtgtgaacctatagtctggctgctcgagaggctgaggcaggaggatcacttgagcccaggagtttgaggttgcagtgagctatgattataccacttgcgctccagccagggcaaaagtgagaccttgtctcttaaaaaaaaaaaaaagttgcttcctcctgtggtgcagggggtatcaaattaaggtctgtgcctcaggttaagctgtaaggcaggtgagacccacacctgaacatgcttagagacactgcaaagcagtgttagaatcagaattggtttttaggatgcagagtagtgttctccctccacctctatcagcttcccatgcatttgtagcctgaatacatcagtttgtgagaggatggtggtcaagttctttgggggaagggagtcttggatccatgggttttaatttactcttttgtttctttgtctttcagggtgctgccccacgtcccccaccaaagcccatgtaaggagctgagttcttaaagactgaagacaggctattctctggagaaaaataaaatggaaattgtacttaatattgcatgttaagtgtatctgtgccagataaggtggggattttgtgtgttagaccaagtgtgaagtgacacacattattttcatggggaagaaagcttattcatgtaatttaatttttttcttttttttttttttttttttgagacggagtctttgtcgcccaagctgaattgcagtggcgtgatctcagctcactgcaacctccgtctcccgggttcaagtgattctcctgcctcagcttcttgagtagctgggattacaggtgtctgccaccatgcctggttaatttttgtatttttggtagagatggggtttcactatgttgtccaggctggtcttgaacttctgacctcagttaatccaccagccttggcctcccaaagtgctgggattacaggcttgagccacctcgcctagctatttatgtaaattaaactttaattgtggtcgtatggttggcctcacaattcgcatagctgtgtgaaatggagattaggcatctgaattttggatttaaccacatcaagtttaagttggcatcctaaaaa

SEQ ID NO: 8448 - DNA, 1648 bp, Homo sapiens
gctcctcttttttcttctctgatcatatgcctctctgtcctattaattttttcaaactttcccctaccctcatgaagttcttcacatacctagcctttcttctcaacccccaggtactccctcctcccgggaaggcaccctttcttcagtgggtctcagttctgtcctgggtactgaagaagaagatgaagatgaggagtatgaatacatgaaccggaggagaaggcacagtccacctcatccccctaggccaagttcccttgaggagctgggttatgagtacatggatgtggggtcagacctcagtgcctctctgggcagcacacagagttgcccactccaccctgtacccatcatgcccactgcaggcacaactccagatgaagactatgaatatatgaatcggcaacgagatggaggtggtcctgggggtgattatgcagccatgggggcctgcccagcatctgagcaagggtatgaagagatgagagcttttcaggggcctggacatcaggccccccatgtccattatgcccgcctaaaaactctacgtagcttagaggctacagactctgcctttgataaccctgattactggcatagcaggcttttccccaaggctaatgcccagagaacgtaactcctgctccctgtggcactcagggagcatttaatggcagctagtgcctttagagggtaccgtcttctccctattccctctctctcccaggtcccagccccttttccccagtcccagacaattccattcaatctttggaggcttttaaacattttgacacaaaattcttatggtatgtagccagctgtgcactttcttctctttcccaaccccaggaaaggttttccttattttgtgtgctttcccagtcccattcctcagcttcttcacaggcactcctggagatatgaaggattactctccatatcccttcctctcaggctcttgactacttggaactaggctcttatgtgtgcctttgtttcccatcagactgtcaagaagaggaaagggaggaaacctagcagaggaaagtgtaattttggtttatgactcttaaccccctagaaagacagaagcttaaaatctgtgaagaaagaggttaggagtagatattgattactatcataattcagcacttaactatgagccaggcatcatactaaacttcacctacattatctcacttagtcctttatcatccttaaaacaattctgtgacatacatattatctcattttacacaaagggaagtcgggcatggtggctcatgcctgtaatctcagcactttgggaggctgaggcagaaggattacctgaggcaaggagtttgagaccagcttagccaacatagtaagacccccatctctttaaaaaaaaaaaaaaaaaaaaaaaaaaaactttagaactgggtgcagtggctcatgcctgtaatcccagccagcactttgggaggctgagatgggaagatcacttgagcccagaattagagataagcctatggaaacatagcaagacactgtctctacaggggaaaaaaaaaaaagaaactgagccttaaagagatgaaataaattaagcagtagatccaggatgcaaaatcctcccaattcctgtgcatgtgctctt

SEQ ID NO: 8449 - DNA, 1168 bp, Homo sapiens
cctaggtgtagacactgcccacccgctgcggctccactctactccacccctgcccgctcgactttaaacctatttccccgccgtagctccgcccctctcccctcagcccgcccctctctgttactggctctcgctcagcgttctcggtggaagtggtttttccgggagagaccacgcttcccctcaagctccccaacggctccgccttcccgccggagcctgacccttcccagagtgcccggcgattccggcgtgcgaggcccttggagggcaaggccccagggcctggcttaggagcgcgagaggcaggctgggaattgtagttcgaaggccctcgagagcggctagagtctggcggccgagaggactagttgtcccagcgtgccctgcgcctcagcccgcgcgctcgcagcttctcgctctcgcctgcctgcccgctcccttgcttgctcgcgctttcgctcgccctctcctcgaggatcgaggggactctgaccacagcctgtggctgggaagggagacagaggcggcggcggctcaggggaaacgaggctgcagtggtggtagtaggaagatgtcgggcgaggacgagcaacaggagcaaactatcgctgaggacctggtcgtgaccaagtataagatggggggcgacatcgccaacagtgagtgcggcctcgggggtcggggaatcaaggctgatagggaaaggtaacaggctggcccggaaggggctggagcggaggggtcatgcggactgagctactgaggggcccgcaccggtccgctgggcacggcgtggtgggaagacccggtgtcgcgcctgggacctgagcgggcaggcccaggctgaagtctatggaggtgcgggtcggcgaccaggatgagcgcagagaggggaccctggcaggctccgacccgaggccgtttgttaggaggcaagacgtgttttctcttgttcctatccttcattcccgattattgcttcctctgattctggcagcggcgaggccacctcgaaaaggaagcgcccagctattggcgacagaagtgcccctctgtttttgtagcgtctccggggcgtcaggagccaagccggcacgtgttgctgggtcccattgcggatggctggcccccttcttactccgctagtgtccctgacaccagcttc

SEQ ID NO: 8450 - DNA, 1261 bp, Homo sapiens
gaatcccacagaccagcagaagtaggtgccaaccctacttattaccttctaccacacaagactagtcatcaggtttttttctatactcccaactgaatcttgtccgccctctactccatgttttcaggagtgacctgttgctcttaatattccctttctctaggccgggcgcggtggctcacgcctgtaatcccagcactttgggaggctgaggcgggtggatcacctgaggtcacgagttcagaaccagcctaaccaacatggcgaaaccctgtctctactaaaaactacaaaaatgagccaggcctggtggtttgtgcctatagtcccagctacttgggaggctgaggcaggagagttgcttggacccgggaggtggaggttgcagtgagctgagattgtgccactgcactccagcctgggtgacagaatgagactctgtgtcaaaaaaaaaaaaaaattcctttctctctattccttttaggaaggaccatgaaaaagctgaatttgaggtacatgaagtatatgctgtggatgttctcgtcagctcaggagagggcaaggtgaggagagtaccagagttggcaaagaggggtgactgagagtgttcaccagaccaaatgttacttaaattactctttcaggccaaggatgcaggacagagaaccactatttacaaacgagacccctctaaacagtatggactgaaaatgaaaacttcacgtgccttcttcagtgaggtggaaaggcgttttgatgccatgccgtttactttaaggtactaagcaatgatagtacttggaaccagtctgactcacagaccatacacccaggaacactttttcctctcccttcctgcctagacttgtagcgtgcatgtgctcactccctccctctctctccccatctccttctcattgaaggtaatgtaaaagagcaatcctaagcatgatttctgcctgagggtaggagctattttaaaatatgagcaaaatggtaagacttgatggggagttaaagatacctctgaatatcatcttccctgccagagcatttgaagatgagaagaaggctcggatgggtgtggtggagtgcgccaaacatgaactgctgcaaccatttaatgttctctatgagaaggagggtgagttccaaaaagagcttcactttggattccctgattataagatatccttcctgtaagttcagaagagctaagtatgacaaaggaactttttatcaaaacacatcttcatttttg

SEQ ID NO: 8451 - DNA, 1873 bp, Homo sapiens
tataatcccaacagtttgggaggcctaggcaggagcatcacttgagcccaggagttcaagatcagcccgggcaacatggtgaaacctcatctctacaaaaaatacaaaaaagttgtacatggtggcatatgcctatagtcccagctacctgggaggctgaggtgagaggatcacctgagcccagggaagtggtaccactgcactccagcctggaaaacagagtgagactgtctcagaaaaaaaaatacttttatctctggtcccagacatccccaagtagttagaaactgacaggtcttctccctctccttttcttgcatataggcctccaagactgcagagaatgccaccagtggggaaacattagaagaaaatgaagctggggactgaggtgggtcccatctccccagcttgctgctcctgcctcatccccttcccaccaaaccccagactctgtgaagtgcagttcttctccacctaggaccgccagcagagcggggggatctccctgcccccaccccagttccccaacccactcccttccaacaacaaccagctccaactgactctggtcttgggaggtgaggcttcccaaccacggaagactactttaaatgaaaaaaagaaattgaataataaaatcaggagtcaaaattcatcgtcttcaagcccctctttctagccttttctactactctctgcttggtcaaggtttgtgccccactacagaacagggctaaattagccaccaccactgaaaactcagccgaatttttttataccactctgatgtcagcattttttccatctgtttggggctttttcctcttttttccattctccccaaatattttatctggcttcaaaattaagaggattatttttcagattgtttttattcagtgtggccgattcctcatctgattcaggctgtccagtcaggcccctcccattttaggagctggagccttcatttatgaagagattctcatctatgaaatggatcctcatttgtaaatcttttttcttccattttcacaaagctgtaaagaaataatccatctcaaccttaccctttttctctggagtcagtggggtctttcctcgctccatcttacacagacctgagctggaagctcaactggttttgttccctgtttgaaatattgtgatctccctcccatgaaagaaaaaccaagaaccagaggcgtagactgactgaagacacaactcctggctttctgaagctatggacttggattggattgctgggggtttgtagagaaaggtgacaaatttcagtacctctggcatgctgtcccaggaaactagggctcccactaacttatgaggtttttaaacacattgaaaatgacatgacattaaaataaatttggatttgctcataatgatgtgctttgtatgctgctcttgtttgatggaggtggggagaatgtcagttgaagtggtattggaactgttcctccacagtgccatgctctaccttcccaaaacgaggaatgtcttgacttgcagaagacacaaatcttagaatctttgatgatatagtaatctgctggagttgggtggtgtaattttctaagtagaaacagtcctcactgctaagatttgtttggggctaggacacaatgtctactgcaaaaacagtactgcaagtgtttatcttgaattcaagaagccaggaagaatggtacactagttttcagggccagactaaggtcagatgggtaattagtttatcttactacatgtcaggaattgctaaactagagatactacaagtgaacagaactgaacacaggtcaaatgtgtaatgatgtatatctaccattaaaatagagtagttttagtg

SEQ ID NO: 8452 - DNA, 1364 bp, Homo sapiens
gtagtttgtgagagagctagcggttaagtgctatgggtagagagggtgggcttagaaaagggtggaattctgatcttatgttgggagggtgtccaagttactgatgtagttgttacgaccaatctttcatacttcttggttaagaatctgtccggttctaaagagtgcatttcatatccttgctaagcctactaataagcttcatcccttttttttttttttttttttaattatctgctgcttgtgatcggttgctagtggaggaagaagcgaatgcgcaggtacgttgagactttgccagcccaggaggagggaagttccttggacaaaacttaggagaaacatttggtttggaaatcttaaaagatctttaggagaaaaacgtttgagtgttttctccctggagccaggatttaacagaacagagaacgatagaaccgtagtgcttgttcattttaccacctcattctttatgtggacgtttgatttaatgtgggagggaaaggcaactctggtttgaggtgtattccattcctgtgtctgcttttcaggctgaagcgcaaaagaagaaagatgaggcagaggtccaagtaaaccgctagcttgttgcaccgtggaggccacaggagcagaaacatggaatgccagacgctggggatgctggtacaagttgtgggactgcatgctactgtctagagcttgtctcaatggatctagaacttcatcgccctctgatcgccgatcacctctgagacccaccttgctcataaacaaaatgcccatgttggtcctctgccctggacctgtgacattctggactatttctgtgtttatttgtggccgagtgtaacaaccatataataaatcacctcttccgctgttttagctgaagaattaaatcatcttgtctattatgttttttatggttccatcgggtgggggttttctgtcattagagtttgccctgtcactacctgtgctatggagggtatcaaagctataaaggcaacagcccgggttacgtggtgtggtttgcatctcgctggagttggatgggatatggtacgtctctggaggcaggttttaggtttcgcgggttattaggggccaatgctggtaccgcccctttccaggagggctgccttggcgactaccgcttagaccatgtcgtgcctttgggttgggttgccatagtgacacgcaaagcgtgctgggaacgccctgcggcatgtcgcacgcgtacttcatacaccatagagtatggttccgggtctgctggctagagcgtcacttcttccgcaggaagcggaagagcgatcgggtaggcggctctttgtcgaagctagaggaccggcaggcggcag

SEQ ID NO: 8453 - DNA, 1364 bp, Homo sapiens; identical to SEQ ID NO: 8452

SEQ ID NO: 8454 - DNA, 1481 bp, Homo sapiens
ggcggctgctggacggagggagggctacgggaggaggtggtgcggctgctgcagtgcccgcggcgcacactcccccgcactcctcggccggccacacccttttccggactgtgggctgcgcttgttccgttggggcagagacccttatttctgcggcggccgcgtctcctgtgctgaggcggatgccttctctctagtcttgcagaggcgaagccggttacccggcccctcccagcagaggtgccagtctagggggagaatggcagcagagaggaatcaaaattgacactagacagacacagccaagcttcccaggccctggactggaaaggggaggagaaagagggccaaatggctctaggggacctgtagcctaggcagcaagtgtttgtctcctcctcatcatcatggaaaccaatcttcctacccccaatacaaagcgcaggtgtcctttcccttaaaaggagtcacacagagaaagatagaggaaaacacacacacacaccccaaaaaacccacaaagccaggcctaattaggtcttctggcccctccctgactcaaggaaggacttgcttccctcttcaccttcctgctctagaagccccgtctgaggggagttgagaaggctggaaaaggggacttttttttttttcttttttgagacggagtctcgctctgttgccaagctggagtgcagtggcccgaacttggcacactgcaacctctgcctcttcaagcgattctcctgcctcagcctcctgggtagctgggattacagtcacgcgccaccacgcccggctaattttgtatttttagtagagacagggtttcaccatgctggtcaggctggtgtcgaactcctgacctcgtgatccgccggcctcggcctcccaaagtgctgggattacagatgcgagccaccgcggccagcctggaaccaggactttttaaatcccaggattccctcaaactccaatttgactggacctccccctccagaaagaatgcgcccttctcctcctcccgctcctctctctctcagcagctgtcatttcaccacgtccctgagctatccacagggcaacagcgtgacctctaccttgtcagctccccttattagagagacatcagcccccaaactctgtgaggaatgaacctttggggcatcctcgcccctcgcccaccctgagtgtgaggagtcacacacactccctctcctctgtggcacaccaccagcatcttagtaggaaaccagaggcgagggtgtgctgcacgtcactgtctctgccttccccacctccaggtcagcttcccagacgtggaaaaggctgaatggctcaataaggtgaggattgatttgatttttagtcttcatgaggggagaatgggaatttgtttcttcttgccagacccatcctcaaccctcagtgctctccgtggggaggattctgaaggaacttgccttgagagggaagactgg

SEQ ID NO: 8455 - DNA, 1197 bp, Homo sapiens
gatcatggtcctgttgccccacaggttcggggtgagggcactggcgtgctgggctcattatccctgcccctctcagagctcctcgtggctgaccagctctgcttggaccgctggtttacactcagcagtggtcaggggcaggtgctactgagagcacagctaggggtgagtgacaggagatggtgggcaggatgagagggaggaggggagggccttcacaggtgagggacacccaggagggtgggaacagagggccgtgtccttagagtgagggaactgagagaactctgcccagctcacagctttcttgcccctagatcctggtgtcccagcactcgggagtggaagctcatagccacagctacagccacagctcctcatcgctgagtgaagaaccagagctctcggggggaccccctcacatcacctcctcagccccagagctccggcagcgcctaacacatgttgacaggtaaagggctgggacaggaaggtgggacgcagtcagaaataaaaagtattacaggttcactaggctctagctttccccagacctactgatatttctccacagtccccttgaggctccagccgggcctctgggccaggtgaaactgactctgtggtactacagtgaagaacgaaagctggtcagcattgttcatggttgccggtgagaccccatccctcctgtcctccagatcgcctccatcccttccctcaggttaccatatcacctacatcctcctgttgtaggtcccttcgacagaatggacgtgatcctcctgatccctatgtgtcactgttgctactgccagacaagaaccgaggcaccaagaggaggacctcacagaagaagaggaccctgagtcctgaatttaatgaacggtcagtcagtgggcattcaggtggagagatggcaggcttggaaaggactcctggcccctaacatccagtcctaccccaggtttgagtgggaactccccctggatgaggcccagagacgaaagctggatgtctctgtcaagtctaattcctccttcatgtcaagagagcgtgagctgctggggaaggtaagagggcaggatggcagggcagaggtgagggctggaagctgctggcaccaaggttatagtccctgtgaggaaggaagtaccccacgtgatcctttagaggtgactcacctctgcaatggtt

SEQ ID NO: 8456 - DNA, 1225 bp, Homo sapiens
gcgagggaaggggaaaggactgttcagctatagcagcagaatggggcaggcaacccatacccctctatgccagctacccatgctccagggccagaaggtcaccctaaagcaagactggtatacaggctggtgagagttcccagacaccagcacccagggccgcataagtaaaacctcagggcccattctagaggtaaggaggtactgtacccccaggttgtcttcctctttgaggaatccctcccctccctagtcagctccatgcagaaacatgccaggaggaagtcagatggtagtagggtaagggcaggggataaagagcacaggttggggaaaaaagaaacactggggagatcaactagaggagaggctgggaggagccgtacccgccccatgggcccgtcaccccgacaggatatgcctcacaaacgctgcaggaaggaagagacattcatggtgaagacaagacaaagacatggggtgaggggtcaggcagtggggacagacattccattatttcacttctcattccttcccaccctctacaatactacccccttcctttcctgttataccgccctgacctcccactcctgggctgggctgggcagggccctgcaccttgcctcctggctctttttggagcccaagtccagggatagggaaagccccagacactatacttgacctgccccatatggctgctttctctgagaaagcgcagttcacctcttaccttcatagttgatacaaccattgctgtcctcatgccctgccaccagcatctctacttcttcctctgtcatcttctcacctgcagggggaaagaaagcatttttggaattgggtgacaagtgaggtacctcagggtgccatctcagctcaaggacaaggacacagaaccttacccagtgtgacaagaacatgccggatttcagcacccatgacggtgccatttccttccttgtcaaacacccgaagtccttcgacataatcctcataggtgccctggtccttgttcttggccactgtctgcagcatgggcagaaagtgctcaaagtccagcaccttcacattcatctctgccataaaggaggtggaagtgtcaggccagagaagtaacacaagttctcaggacaggggattatagagacctcaactgaacagagagatgacagatgactccccactaaaagcaaggaaatccatgggatttgctaatcca

SEQ ID NO: 8457 - DNA, 1669 bp, Homo sapiens
atttttatatcagattattcaaggacttctgtttaaaagatgtttataatgtctgggagagaggataggatgggaatgctgccctaaaggaagggctggtgaaaggtgtttatacaaggttctattaaccacttctaagggtacacctccctccaaactactgcattttctatggattaaaaaaaaaaaaaaaaagtagattttaaaaagccacattggagctcccttctacccactaaaaaataaccaatttttacattttttgagggggagtgagttttaggaaaggggaattaagattccagggagagctctggggatagaacagggcgcagattccatctctccccaagcccctttttagtgactaagtcaaggccccaactcccctcccccaccctacgctgagcttattcgagttcattcgtactaataatccctcctgcggcttcctcattgttgctgttttaggccaccccagctcagccaatgattcctttccctctgaatgtcagttttgtttttaaaagtcacttgcttagttgatgtcagcgtatgtgtatttggtggggaaaacctaatttcggggatttctgtggtaggtaataggagaagaaagggcactgggggctgttctccttccttccctgggctgtatccatggactcctggaaggcacagagaagggagctataagaggatgtgaagttttaaaacctgaaattgttttttaaagcacttaagcacctccatattatgacttggtgggtcaccccttagcttcctccctctcccaccaagactatgagaacttcagctgatagctgggggctccccagatgaggatgcagggatttgggagcagtggaagagggtgcccaaccttgggttggaccaacccttggctcgcagctcaactctgcttcccgcattcctgctccacgtgtcccagcttctcccctgtgacgggaaggcaggtgtgactccaggctctgcactggttcttcttggttcctcccaccaggccctttgttcctcatgtccccatgtttctctccctctgcgtcttagcacctttcttctgttcaaagttttctgtaaattttctctttttttctttctttcttttttttttttttataaattaatttgctttcagttccatcttgtgggtgcattctgtgttcttacctgtggctgtcaggcagggggattgtgatgggagcagctttcctggagtccttcacagcggcgtttacctgggccgaaagacactctgcaagccacacggcctacagacactgcgcctccccacaaaacacgaacggcagcacaactgtcgagactatgtgctggtataggagcagaggctctcacctgccctaaaagctgtttaagacttggaaggacattcccacaacatggaattttgtatctctgtcccttcagaagtagtggtttcactccttcccttattagagaggaggcaagccccttacctacttttgttataattggcccttcaccctgctgaggtgacggacaggcttaggcagtgctaataatggcctggctttagctccaataaacactccacaggcttccccacaaaaggccttattgggagcttgggagggcgggggccagatttaaggagctggaagggtag

SEQ ID NO: 8458 - DNA, 1127 bp, Homo sapiens
gaaacctttcctcgattttacaatgaagtcaccttgcaacctagctttgcagtaccctgggtttggggtcgagaggttagggtgagcttcctatctctagcccctcacacccaaaccccataactggagatcataaggtggtgaacaaaaggttcaagaatccttacctgtcttttctaccaaacctcttcctggtgtcgtctttgtctctaggcctggttttctctggaaatggtctgcctctctttttctcactaccctcagagagggattctctttatggctttctttcagctccccagttcttcctgccggctttgcagctcgtcagaagtgtgcttagtggcttaggagaacttcctactgatgctggttgtgagcctggccctgcccttggggtctctctgggtgtgagaatcctgacaaatagctgctatttctatggcatgtctctacgcctgtgagaggctcttattcccaggcttctacctttgaccttttgcagggagatcaggctaggggcttagcctccggccttgggggaattgacagttgtgacctggttcagcttccatgctcttagctctttgtcatttacctttcccttcacagatctatctcttttcacctctcactgagaggcactgtcttctttgtgatgagtggggagaaaacgggtcaaaaagtaaaaagaaagtctcctggctcaggttcaaattagaatggaaggctaggatgctactaggtagcagagtgtggaaacatagaagtagggccagggttacttgtctcagatacagtttcctcggacagggtagatgttgtcttgctcttctccatcaggctgggtagtggatggcccttcctgtctaggagggcctatgaagacatttatacccagtcttcagaagcaaaatgcacaagctcactcagtcaacttgccctccttcacttccttgtaccttttcttgttaggctacattatagggggaatcatggctttacagagttcccctaagaaatgtctctcttagagccccagaggtattgcttccatgacctgaactttataaacctccagaattttacaaccctcagtgctgttggttaaagatgaggtgccaaga

SEQ ID NO: 8459 - DNA, 1204 bp, Homo sapiens
gaacctcctccagggtcttggaaggagtcctgagaggtgggattggggccgggctggcagggctgagtttgcgcactgtgtatcttatgcacatgagtgtttttgtctaaatgactccagtgactgctccagcggggaggccccttcctccttccctctcagccatttctcacccacttcccatacccagtgttcatcccctacctccccttcccaccgcaaaggaaaatagccttacagaccctagcccagaaaccctactcctggggcaaaccagtatgggcccccatcccgcctagtttgaaccctaccttttaagaaggagggataaggaacaaagcagccccttcccctctaattgtggtggctccagccttctgcagccttgacccaggttgggcaagggcggaggtgaggaatctttgaggaccaagcccagtggtctgggaatcgggaggtagagagggaagggtctgccttgggggctccctcctcccaacccaacccctagagaagcgaccaaatcccagagatggggtgaagctggggtggggagggtctgctctttgaattacttgaaggtactgactccaaggctgctgttgcccacttaggtgtgagggggacactgtcactgcatttgggagggcagagggtggcgggtaaccagaggatccaccttggccctcacccactcctgctaggccctttccctggggaatctggaagcctgactttgcccccagggaagttggggaccgccttccctcccttctccacctctcactctgggcaccctctccaattgcactaaagtagctgttgtgccagtctgccccccacaaggggggaggtctctgcttccagtcttcttcccccgctgcctccgctcccaccctggacaatctccttgtttcccttgtgttcctggatagctcagctttgtatgtgtgtttggggggtgggggtgggttctggcttgagtgggtttggcaggggtttgggaagggttaggggaggatggaggatgaagtctcctacccccttctccagctccaggccacagaagcctgggaagggagggtgcctactctcgctgctgtgtgtcttgcagatgtgccaaaatgggggtgggtgggaggggagggtgcctggcagagcagcccctggggtggctctctcaaagcaatatagttcccctgcg

SEQ ID NO: 8460 - DNA, 2440 bp, Homo sapiens
acacctgcctaatgaccccatgtttaagttggttgctcagctgtacaagattgtgcccaatgtcctcttagagcagggtaaagccaagaatccttggcccaatgtagatgctcacagtggggtgctgctccaggtaagtcctcctttccctcttttccctctaatttgtaccaaaccctattgttatctgccatgcacaaagtcaattaactcctagtcagagcagggacttccctcacagagcattttgataaagttgactatgagagggttgggggttggggttgctctgttttcagaatcccaattgctatacttttctcagtgtcatttctatttaaggttgactgggctaagtccttggagaaaaatggaaaatttagcttttaaggtttctatcacctaggacttgtacatgccactgcctctgccttaaatgaaatatttttctcttctaccttacagtattatggcatgacggagatgaattactacacggtcctgtttggggtgtcacgagcattgggtgtactggcacagctcatctggagccgagccttaggcttccctctagaaaggcccaagtccatgagcacagagggtctgatgaagtttgtggactctaagtcagggtaaaactggagactgggtgaaagtgactaccagaaagtgaggaagcctaaataaaaagtatacttttgtttcagggggcctttaaagacttaagattaaattatatctgaggcactgataatatgtttgaggttaaaatataaattaagactttaaaagatgaaaaatggtcccttcttccctaatcagctcccttcccctgcctggtatgagttgcccatcatacgcatggtcctggaggatgaccaggactaatgcatgtggtatgagtaggtttggccccctcactatctctagagtgagaatctggctcctgtttccatgggtcaaagccggttgcagagaatctgtagtcactttggagctttagcttctctgccaagccctcaataagccagcaaaccaggactctgccccttctgtttccataggaatcatgttggatagtcagctgtaccaagccccttggccctctcccatgcacacaaacacctcctagcaagacctgttggttagctggacatgctttggcaatttttttatactaccaagtgaccataaaggcatggcatttgttgtgactggcacccaatgtttgattttttttttaaaactatccaattaaaattaaggtctgggagtgttctgtttcccattactttaatactcacctcctcccagactttctacacctgttgcacctcaggcagaggatgttctggacctccccctcttggtccctactagagacctctcaacagatctgtgggcccagtcattgggttttatcagtgcttaatgtgaactaagttttttacttccacagaatacaagccactaccttctgacctccccaccccccaccaacccccatcttttaatatgctgtggggcatagaactccggaatgaccagcatgatattttcagagtcttgtccccggggtattagcacctctttttgaacagggaattgattcaagattggacatggtctcctctgattatcaggtactggggctgagggcattaaaaatagtaagcctccctcctcgtcccctgcctcaagaaattgcctccttatttatcaacatctttttcctccctttccctgagagctcacagtacaatgtttcagaagccccatttgcacaggttttcagcaactcagaatgctctacttctttttctttgagaaaggattaagatacactcctgctgtgcccccatctttcctccaaactcctgcctgtgtttgtgtggatacccagtcccagaaccacactgttgagttggacacactgtaaacccctgggtaactgtcaagtcatgatggagacttcaggttgttctgtataaaatgcaaaataaatgtttttattaacaatgcttgagcctattattaaataaggcctggaagaacctttattatgaggtaaggaatctggctagcaagatcctgaacttagtgggttataagtaatctgtatccatttatctttaggcaggtttggctttcttttaccttaaccagaggaaagcctccctgagaaatttccagaggagatttctgtccttcctcaaggttaggaagtccttgatgtttagcccctaaccttgctaattttgttgtaaggtaacatactcaagggctatagctgagattctcaattgcttatgtgactaatccaagaactggtctagcccactgagagaaaggaacaaactaccaaggacgaatgggctagtactgctacctcaggaccagagccactagagggctctggtacttcttggagtgcctgctc

SEQ ID NO: 8461 - DNA, 1233 bp, Homo sapiens
caaatgatctccaccgagcagctaactctggcatcctagcctgttgtccacatgatgtcacctccatggccgtgaagccattaaccaaagacattcctcaagaaagcgcgccaaggcggtagaaggatcaggcaatgatcagtttccatgatcatattacggaattggctccaaggaccttcagaggtcgagtcctggagcgtctcctttagcattcgcctcagagataaccccaaaagtgttaaggtcaaagggaaaagccaagagggaagttaactgagttatcaggcacctatttagccacccgcacttccccgcccgccacccatccacccttaattagccctaatccgggcggtccaatcctccccgtcacaactgctgtcaagggctaaggtcccgccccgcttccataccggaccaatggccgggcccggggagagtcccttgagaggggcgggctcgggttccggccagtgggcggggcctccttgaggaccccgggctgggcgccgccgccggttcgtctactctttccttcagccgcctcctttcaaccttgtcaacccgtcggcgcggcctctggtgcagcggcggcggctcctgttcctgccgcagctctctccctttcttacctccccaccagatcccggagatcgcccgccatggctttacttactgcggccgcccggctcttgggaaccaaggtgagcagcgaggggagggagcacgccgtcccagggtggggctgaggcgaccgcaggccctccggcgccggggtctccctcccacacccgtgcgcaccctgcgcgccttaaagggccctgcgcttggctggccgccagccctgcgtgaagctacaggaccatgtgccgcgcttcccttctggctcctgggggtgaagtgcacgccgcccgccctcggcccgcagtccagaacgcgtgaggaggccgaccctgctgtcaccccgcatgtctgaaatgaaaggggaagggatgcgtggccctgaaatagcaaggagccgagacaggaacctctggtagagactagagatgtggtgttccactggagttacagtcagtttggtggagggagcgggagtgaagatatgtgctcactctggagcagtggctaatttcgtcctctgctttgtaggaagggccttgtcagttcccgaactgcctgtttccatttctccaagcctattatttaagccttcggtgaccacgccga

SEQ ID NO: 8462 - DNA, 1135 bp, Homo sapiens
tgcttttcttcttccctatggctctcgaccctgctctttccaggtctcctcagccgtgttctctttaccatggtctcctctacaattctttcttgcctctacaactttcaagtctcctctgagctccaccggtttggtggactcactgcttcggtggactcctgcttctgggacattttctccaccagctcacttaacctccatatttctcctcacccccaggccagtttcctacatcagttcttctgcttttccctccaggtgctctatttcctggagcctgtacgctgtctaattcaaaaccacctttgccagaaggagttctgtctggcatgtgagctgggcttcctgtttcacatgttggacctctctcgtggtgacccttgccaggtcagtacttggagacacttaaaatggaaggggaaggaaggtggacacaaaagacaaaataacccctttccaccaacacatttccagggcaataattttcttcgggcattccgtactattcctgaggcctcagccctcggtctaatcctggctgactcagatgaggcctcaggcaagggcaatctggccaggctcattcagaggtggaatcgcttcattctcactcaactgcatcaagatatgcaggagctggaaataccacaggcttatcgaggtgctggaggcaggtatgaaatcaggatagaaatagttaaagccatcatgacaggcccctctgtgatttaaaaggtctcctaacttcctcaatgtgcatatatcatcctctccactcttagcagcttttgctcatcgggggactctgttattgggcagctcttcagctgtgagatggagaactgcagcctctgccgctgtggcagtgagaccgtgcgagcctcatccactctgcttttcacactctcctaccctgatggtagcaaaagtggtatacccttcagctcagttgggaaggctccccaaaatgtcctgtaatatcagggagagggtgttggggactaactgtgggtagaggggagaaccaggagtatagcatctaattttccctcagataaaactgggaagaactatgactttgctcaggtgctgaagcgaagcatctgcctggaccagaatacacaggcctggt

SEQ ID NO: 8463 - DNA, 1247 bp, Homo sapiens
tttgagtcaaccagaggaggaacagaagctgcagccagagctgcagcctaaagtccctggagagcaaggctctgatgaggagcactgtaaagagcaccgagcacaagccctgagggccctcttgctagcccacaagaagaaagcgggcctggcatccccagagggtaatagtgcgacagccatcttctgagtattaacgtgtcagccatgttggtctagagggcaggaaaggtgttctgagaatatgaggaccgagttcctaattttgtgtcatttatggtcattgcagaggaagacgctgttggtaaagagccgctgaaggcagcacccaagaaacgacaattgctggacagcgacgaggaacaggaagaagatgagggcaggaacagaggtagggaatttgatgggaccttctttttcttctctaatcctgaagacaaactctaccacgtccttaccccttaacatatttagatattctctctctctctcacccccatcgttcccacagcaccagagttgggagctccaggaatccaaaagaagaaacgataccagattgaggatgatgaggatgactgaagagctaagaagcctaggggtagagatagacacgtttttagatggtgcattcaagtcagagttggaagggtcatacaggacccagaagctcctcttactggacagagcagtagaatcccaggctctttcacggatttaggctgagaaacttcagcagcagtattggacttctctgctgtcagtctttgtttctcccagtttttatcggtatgccccagcagctctctggagatttagttctcttcttctaggaaccatttcttttggttattggagctccttagcaaataagaggagtgagtgaaatagagaaagcaccccggaccccttttattggtctgttcctttggctttctcttggaggtgggtcgcagcaccagatggggagctttatgacatgacaggcgggagttttgtaccacttttagaagataccagatgcctctgtcctcattttgtttcctatgatcatcctctagataccagatagaggcccattcctgcatttgagatagggttggaatatagtactctagatgatgaatgtgtttgctttgtgtttggtattaaacatgtaagattagaagttctcatctcagtctgacttggcgatatgtctaagttccccagcccttcccctgctgtgctcttgaaagaagaactta

SEQ ID NO: 8464 - DNA, 2023 bp, Homo sapiens
atgtggagcgcttccgggagtgggcagtggtgctggcagacacagcggtcaccagtggcagacactactgggaagtgacagtgaagcgctcccagcagttccggataggagtggcagatgtggacatgtcccgggatagctgcattggtgttgatgatcgttcctgggtgttcacctatgcccagcgcaagtggtacaccatgttggccaacgagaaagccccagttgagggtattgggcagccagagaaggtggggctgttgctggagtatgaggcccagaagctgagcctggtggatgtgagccaggtctctgtggttcacacgctacagacagatttccggggtccagtggtgcctgcctttgctctctgggatggggagctgctgacccattcagggcttgaggtgcccgagggcctctagtatgtccattactggagtccctaatcacgcctttggccagcctccttttgaaagtgtccgaagcctttttactttgcctcaagcaacctctagctcccacaattcagtgttgggtcctctgtgcaatatcatgatcatcttcctcatcccctaccttgtgaaagctaggcatacagccaaaccctccttttccccacccaccaactactgccaatttcctaggctaccatgggtgtatcttccttgacctgcttccttcagtccctctgcctccctttgcccaggcctttctcagactgtattccatcctggggtcttatcattcagctttgtttgaatttattaatcaccatgatacctctccctccctttgtccacatgtaacttgttcttggggctctaccagatggctgaagagtaaatcctttctacctctggctgaaggagtggtgcagtcaatgacttggccctttttctacagcacatttagagtttgggctctggctccctcagtaagtgctttattaactcagtgtgtcaaaatgaaaacagagccctccttccccagtagctcagtgccacagaccttcagccccacacagctgtagctatccttaccctgagtccatctaccttaaatctgtacctctgacacccagccagtctgtcataatcattatcccagttataaccttgaccaaaggggaagagagacacttgggggatatctaggggatgagtgctagaaactatttatttatttttgagacagagtctcactctgtcacccaggctggagtgcagtggcatgatcttggctcactgcaaactctgccttttgggttcaagcgactctcgtgcctcagcctcctgagtagctaggattacaggtgtgtgccaccatgcccgtctcatttttatatttttagtagagatggggttttgccatattggccaggctggtctcgaactcctggcctcatgtgatcagcccaccttggcctcccaaagtgctgggatttcaggcgtgagccaccacacccggccaaaactgtttattcttgagaagttccatcttcatttctgccacagttggaacttcccgaggaaggaaggaggcctgaggttttgcacaatctgtttcagagcctgtttagactcaaacctatgcttcccttggcagcagaatacacttaacctaaagcagtatttggagttgagaaaaacctggtggggtaagtgaatatgtactgtttggtagggtaggtagagaagctgtgctttgaccctgtgattccatctttttctaccttctatgatggtgatgaagctagatacccctagggaagaaagaaggactgggtttagcaaaaatgatttggtaattaaagtttatttgaacacaaaatactttctctgtctataaaattggctgttagcagtagcagcagcatgtcctggccaaggggagtagatttctccagactactaaagccatgtatatagccattcccacttcccatattctgtggatatgtacatgtgcatggtagctagagtccctccaccagagtatctctctcatgatggtttcttca

SEQ ID NO: 8465 - DNA, 1200 bp, Homo sapiens
gtaacaacctctatttcttgtattcttatttatatggcagatacaagagagggcccatgttaatagtctgaagactgccattattcctatgaggatcccatacagggaccagttgaaagaaccttcattacaagctggggttacctcttcaagaaccttgaatttgtgtggcagacactctgtgtttctgtagtcataacatttggagcagttgtggggctgggaacttagagctttgctttctctttcaatgtgtggagagcacagatcctggagaagctagagcctaacccctcttatgctccttaggatggagtccacagagaagtgtgaagccatcatcacccactttaatggaaaatatattaagacaccccctggagtaccaggtgaggcatctggggctcaggctgagagggccacaggttgttacttccagtgaagattctggagcagctttgcatgactgtgcctgggccacatgaggtgggactcagctgcccatctgccttctctctcggcagccccatccgatcccttgctttgcaaatttgctgatggcgggccaaagaaacgacagaaccaaggaaaatttgtgcaaaatggacgggcttggccaaggaatgcagacatggtaagaggacctctgaggagacaggagtactaacgacattaaagtggaacggaaatgatcatggcatgatttctgtgagcttaggtggaaagcttgagagctacagtacgtaattgagaaatgctggctgtgaacatactgccagtttgttctcgagtgtggctttgcggcctgcacaattagaaaaactctgaaacagctgtagtgggacttgtctaggctttaatttgttaaaccaaaacattcccagccttggacattctgggccagctcctattctcactcaagggctcacaatgtgaacactgtgttctttctttatagggcgtcatggccttgacctatgaccccaccacagctcttcagaatgggtaaggttttatataatcaagccacctgaaaatgataatggcctgtgtccagacactcaaatgattcatcttgattctctctatttgaaagtcaagggaacgttggctgtgcctatcagttgggacccttcccttgtggtttcctgtgactcagtactgattgaggttccttcccacaggttttacccagccccc

SEQ ID NO: 8466 - DNA, 1896 bp, Homo sapiens
ttgccacgcctggaggtgggatgtgtgtgctactggcatctagtggctgctaaacatcctacactgcataggatagtccccactacccccagccaagaattatctgactccaggggtcaatattgccaagactgggaaacactgatatagacagtgttgtccctgcctcctgggttagggtaaattttcaccccaaccctggacaaacagtgccttttgacactcatgcaactgttggggaaggactggactgggatccttgaattctccccagactttgacttttgataactctgcatatagcaagagtgattcttgaaagagctgtggctccatgctgaatgcacacatgtactcagagggattcaggtgggcattgttctggtgtgtgctgtgcaatggtgggaaaggacaaagctctctaaactgtccagagcaacctgccctgccccggtgtgcttggaccctttgcccagggaaccaggacatcagaaataatgttccttctgtggaaggacaacggggagctagggtagcaaagagcaataaattccaactctttatgaggtcaggagtcctttaaaaaagcctatgtcttggtctttaactgtccccttctgcaagatgtgactctatacacatggagacagattgaagaaagacttcacccatcttctaggaaataaaatcctgctcttgtcttctcccagtcactcccttatgcactgaaaggagaatttgactcccttgcacttcaaggccaggtgcctctccactagacagtcagacaaaggcaaataatggaggatagagagacaggtgttcattaggctggccatagggagaggaagggggtgacagcaggggaaaagaaactgtagtatcagttgtcacaagtagagctcggcccagctttccctcccttcccagccaccctagaattgagagtcccagtgcccctagtgtcgactttctatgtacatcctaggggtgagggagtgcggggcaatgggtaggatataaagcgtaaaggacaaattgccgcagtcttctaattgatgcttccaaactcaggaagggcttatccagtgtaaaatagccccaagcccagcaaccttctagagggctctggctgggcagatagcttttgtttttgagtctccagccctcagtcaaggaaaatataccatagctgctttcttgtcagtggcctttgagagaaagagaaaacaaatctagaattctgttcatctgatagaccgggggagctttgctatggtaggaggtttaggaagggcctttcacgcatagaaaccattgttgatattgccactcccctctcctctgcctcacagaactcctgattctgtcttctttctctctctatatatatattttaaaatgtttaaatggctctaattttttgttttgaattttgaatttaccttttggagttcttctcatgtgaatctacttgttagattgtattaatgagtgtttctggtttgggcatgggaagtgatgggggcctgaagttattttgcagtggctaatggcactgaggaatttcttttttggtgcatttggtttacactcatttcctctcctaattgttagttcatttgtaacagtgggtgagtgtttggaggaaaggagggagaagaaaggagggatactgtttctcccatgaaatagtctaattggttgggttgatggcagaaggaaacataggggagccttccagctcacagccaagggttgggctcttaaacactatgcctagtgttttctgaatgctgtcttcatggagcccagctcttactctctttgtactttacatctcacccccactcattacagatgctcataacattcttaaaatattttagtacttgg

SEQ ID NO: 8467 - DNA, 1785 bp, Homo sapiens
gaggcctgtcactccaatgtcaacccgtgggctgttactttgcgtcatatgatgctgtgagaggccttgctggaatgtcctaggaatccctagtagcagtggctattagtcttctagaaaagaactattgctgctgccttgtgcacatgccccaccttctgggcaagtggcagcattgcgctcatgaggggctttgcattcttagccaagggcaataaactgggtgggtgatctggcccaaacttgcccctaggctctgctagccctgaatcagcaggcttcagagacgagggtgggtgttataaaagccagtctgtaaagggtaaattccaaatcttgtgccttgttataccaatccttcctgattcccgtttaaaccaactactctatttctgtgctgcctacattttcaatcctcccacgcattagcaaattcctgaaatttcctcatttggtaggccttccataggagtcagctatggacttccataggagttggcagctaaaaccagactgtgagcttctgtctccgttctgatttttgctgcacctcccaggggacagtccccacatgattacaaaagccaggtgccctcatcacccgttacccctgacctgtccacttgttttgaataaaccttcattctccaagcagatccccaaacttccttgtccttgttacacgtctacctcacaacctcacaattcaacaacaggtaaatacctggattcactgatttctttactgtccttctctgagggttgggaaggtgggggctagaaaaggctcataatttttaaactcttgggaattaaacttgggaatttctattcctacagtgttttctctgggatttttagctcactgatcgccctagaatagtgtgaactctccagataggtcctgctgtgataggccaggggagtaggctgtgcagtgacggcttagggtaataagtaatggttggaggacaccagcataggagcagagtttagaacttaagaggacaagaaagctgctcagtggctggcgtatagctgtgaaggtaaccaaacaccaaagagggagtctgtcatttttataaggctggaagcgaatgttccttttctaccttaacatacagtttagggggttgcaccaagacaaagtttccaggctggagggtaatacatatccagcgcgagtgaagtccccactccaacatataccctttttgggtgggtaaacacctctttgcatgtggacagaaaatgtttatacttaaacagacatattttgcatatttttatctggagacttcttctagttttatactcttcccacatctatgccaatgccaccattctaaaacttacactccttttctacccctggtcttttccttgtccttccctacaacttggtagaggtccattttgtcttacttcacacttttttttttttaaataaaacacaaaagtctacgtcttggtgtcttatccgtgagtgggaagtggtaagctggtgatggtcccatatttgctatgacaggaacacagaggtggcagcttaggaagctggggccacatctcacaaggcaggacctggatgcactgaatccccctttgctccagcaactcagccagacatttaggcaggagcactaatgaccctttccatccacacagagggtatggaacaggagcccctgttgttcccttgcctgtggtctcttaagccagtcatacctatcccaacgccgtctccccctcaggtgtgtagaagggaagatgaatacacagagt

SEQ ID NO: 8468 - DNA, 3024 bp, Homo sapiens
cctgccctgtccaggtacaccagctcagaggagtttgcggctgatgccctcctggtatttgacaactgccagactttcaacgaggatgactctgaagtaggcaaggctgggcacatcatgcgccgcttcttcgagagccgctgggaggagttttatcagggaaaacaggccaatctgtgaggcaagggaggtggggagtcaccttgtggcatctccccccaccttccaaacaaaaacctgccattttcacctgctgatgctgccctgggtccagactcaagtcagatacaaccctgatttttgaccttgcccttggcagtgccccacatcctcttattcctacatccctttctcccttccctcctcttgctcctcaagtaagaggtgcagagatgaggtccttctggactaaaagccaaaaaaagaaagaaaaaaataatttttcttttctgttttatttgctaattaaaaatggggagggggaaagtcgtccctacttcctcctccctgcttcctctcctcccctgtacgtgccccagcattctggggttatttaacaatagcaatagttctagtgaatgtgtgaaaccaagaaacactctgtactgtgtgcggacccgcagtgacggccagtaaagtggacttaactcccaagtgtgtcgcgccggacaccgggccctggacatgctgcttccatgttcagtcccttccctgcttctcgctgtctttcttttcccacctcccaccccccagttttcagattttctctcatccaataatgtaaaactatcgtgtacgggttcctccctccttttctcttctcccaaatcttttcccttcaaaggaaaaaaaaatgttcagaggtccctgtcttctgtccccatcttcctgccgatagctatcccctgtatgatgttggatgctcctcacatgctgagtttccagccttttctgaaactcagtagctggggagagggcagggaggcttcctgggccttccagcctccttccccacctccttcccaaaccctcttgggaactcctcagggacaactactgctgagtttgggtgcaccctaagatggaggccaggtagcaatggggccggcctcagagagagcgctgtgtgtgtgtgtgtgtgtgtgtgtgtgtgtgtgtgtcggcctcagagcgcgctgtgtgtgtgtgtgtgtgtgtcagcctcagagcgcgcgctgtgtgtgtgtgtgtgtgtgcgtgcttgtgaccctgtattgtttgataggatccattcagtttccccaagtacctgttttcattcccatttttcccattgtttaaaaccatcacttttttgtctttgggaaaccacaggaacaatttctctggagacaaggctgtgtctctctcctggtcatttttgttccagcctcttcagactgtgcaatctttcagcaggaactccctctcttctcggtagctttgaatcttaagcttctacgggagagtggtagaactggatcatttcctaatcccatttagttgtgcttttcttcatttacttcataccccaggaccccttccccagcagcagagaccctggagcacaggagagtagggaggaggggttctgggtccatcactgccctacatgtgactatgtccaagttaagcccccaacacgagaggaaagctgctgactcccagctatagccatgggcacttggccccctgcttttcctgctcagcagagcccctcccttcagagattacgggtacttgcactggggaggtggctgctggctggcccaagcagagagctgaggcatccaagaaatgttccattggggggtgggggtgccaggtgaggtggagcattccttgtattctggcagcactgaagagccactgaagggggtaggggcagtgtaggtcctggggcagcccctttattcctttatgccccttctccctcatagcctatttctaaagtcgccttttctgtcagataaacctcaaaacttttaattttatttgagatttttttttgcttttaagaggtggattgaagaatatttgaattgactttatattatgcataaatatttatattttatctaaataactgcgctgtaacaaactttgtgttagacagttgaaactgttagagttgggggctctgctttttccccctggcaattttcccctggtataagatgtgctagattaatttcattgtgaggtggatgggggagtgaaattgtgaggtggatgggggagtgaaatctccatggttcctgctttgtgttcctctcccagctccatctctttccctagggaccaggcactcatatggcggggtggggtcctagcctcagtttgaagaagtgggggctggagcggggttgggggtggtagggatagggcatgatcaaaggggccatttcttgcttttctttcctcatcttcactgcccccttgagctaggtggattttctcttcatgacaagagtatttggtagggaaagcaggtttaaaataaaaagacaacccaccccctgcccttttgcttccctcccatcagtctggttgacaggaagaaaccacaccatcaacaccaacaagtttctgtgttccttttacagcaaaagggactttttatataaccaaatgtggtgttttagtgactttttgataatgtacagttttttgtgaatttaaatttatttctttctatatttttaggaccaatctcatttttaataaggttaaaaagaaaaaaaaagtctagcgaaaaaactcctgtttttgccatgtgatgttccacaagtgcagctgtagaaaagtgcttgtcagttgttgaataaaaaaaaccacatttgatagagattcaaaagactctgtgtattcatcttcccttctacacacctgagggggagacggcgttgggataggtatgactggcttaagagaccacaggcaagggaacaacaggggctcctgttccataccctctgtgtggatggaaagggtcattagtgctcc

SEQ ID NO: 8469 - DNA, 1099 bp, Homo sapiens
ggtaaggtcccaaacccagggaaggggctaaagcatcacatttcaagccaaaaccctggctatgcttcacccgccccacttctctcctctctgaggctctactctctgtctggtccctacctccggagccggccttcaacaatccacttgtttttcctgtagctggacatactctccagagtcttgtcaatctcactgcaggggaatagggaataggatgaagtggcagcacaaaaaaagggaaaggaggctcaagggtaaaggggctgcagctgaaaaaggagttccagcctagaacccagattgggtgaatggcagaaggcttaggctctcccagggagggcactgcaattcagtcccaagtcattccagcatcttcagaacatggcagtgaacacacatttctgaggacttctggaaggctacaagtcctccaccccattctgatgcaagggatacaatgaccatccccactcccagcctctcacttgatgatgagggtggagccattgagctcatgcacaaggaaggccaggacagcagccttctgctggggtggctgggcctgaaaaggctgggtgcgcaggcggtcacagagggctggctctactccatatgccataaggaagcagcgcaggatctctgacacattgtctcttgtcagtgggatctcagacaccttctcccccaagatctttagggactgtgtggaggacagcataatgggggtgagtagggaaagatgcacaaccaagttgggtgaatgtgcaagaggaaaatacatcagaagagaactatgggggttaagacagaatacgaaagaagaccacaaaagaaaaggaaaaaataaagaaaaataaaataaggagaggagtcaggaagaaaaagaaatggaaaaatataaggaaaagagaaacactaagtagttacatctcctttacttgtcctggttactttgggagggacttgcactcacctgacagtaggagggaaagccaggatcatggagtgcagccttcagcagcctgaccagcaggtcttgcacctcacccaagctgtcaccttgacacaggagtccctcctgcaggacccccaggct

SEQ ID NO: 8470 - DNA, 1354 bp, Homo sapiens
gtcagtcagacacatatcctctgtcggcttcttcatttcctccaagatcatctgctgcctctgccgttcctccaagcgcctctgtgtggccagggtcttatctgctttacaggctggcttggctttggtcacctcctccttttccttcatttttaccttctccttcttttccctcttgactttttccttcagtttttcctgctttgtctttcctttttctttctcagcctacccaaggaagagaggaaccaagactgccataaagatatcagtcactatccttccctggtcccagtcctcccaacctcacagcccagaaatctcactataaaacaagactgatgtacatgtcctgcaaaatcagtttagtggcttcgaaattatacttggcaagtttgtacatgcacctaccttggatttcttcttagcttccttctgctttaagctcttggtctcttgtttccgcttatttctggcctgtaaaccataagggaagtcatttctcctcaaactctgaaagcatctctgcttgggctaggattcaaaaacagacaagggtgctggggaggagaggtgagagatggaatgaggggttggcaatggattaattctctcaccctagagatgcccacgttatttttgaacaaacccaattctctaaatcaagtgcaagaaatttcagggtaatgaagatatgctgctacacagggagtgacggatgtgggaaatgaaaataaaagatgaagtaagttgtaggaaaaattaacctactgtttcatctctctgatgtccctcacctgcccttggatagtagtctgacactctccccgttgaaccttctgcctcatcttcttcttgcttttagcaatctttgctttatcctcctcattcaatgtttctgtgagagcagaaagaaaaatgaaacaagtgaggcaggaaggcagttctctagcatccagggcaacacatgcccgtctcaaagctggcctcccaagcagctccctgaagaatctagagtagctttttttttttttaagtatacataataaaacattgggggaaaaaatgtaggagaggcacctgctatgggggtggcacaaagaactcaaatgacatctcctgcccagaagcaccagcccctggctccaatcagactgctttagaaggtgtcctgctgatagaaaagaggccacaatggcagagtagccttggagccaatctctctcccaggatacctgacaagagcagaaacccacggactgattttagagcagaaagcagagaaaggatacagcaagccaaactgccagggaaagagggtagtagttagaagcactgattaaccaagggtgtg

SEQ ID NO: 8471 - DNA, 2367 bp, Homo sapiens
gaagaaaacatttgtcagtgagcagttaccttttactccactgaagtacaagaaagacatattttatgataaatcctagaattttgcataggtctctgggtagataataccaccaatgcctttcctttcattttcaccttgtagagatgaggtcttgctatgttgtccaggctggtcttgaactctggcctcaagcaattcttctgcctcggcctcccctcaaacttttatgatccctataatctcatgactactctttcagggagaaggctttacttgttacctaacttaatattaggaagaatcttcacattgtgggaactagaattggatgttttctgaccagtgtttcttaaatcttgctttctgatttttttctcattatcctgctctgatttttctacccttgtaaacagagccagtgagtggaggactatatggtattgatgacacggagctgatgggtgcagaggacaagctgcctcttgaggacagccctgtgatttctgcccttgattgcccttccctcaataatgctactgccttcagtctcctggcagatgatagtcaaacatcaacctctatctttgccagtcccacctctccacctgtcctaggggagtctgtcctgcaaggtaagtgacggtaggtaggacaaagaaagacctttacctgagaaaagatgagagaataagtttcatagttagggccttaagagtgggaaatctggctgggcgcagtggctcacgcctgtaatctcagcacttcgggaggccgaggcgggtggatcacctgagatcaggagtttgagaccacctggccaacatggtgaaaccccgcctctactaaaaatacaaaaattagccaggtgtgttggcacatgcctgtaatcccagctacctgggaggctgaggcaggagaatcgcttggccccaggaggcagaggttgcagtgagccgagattgtgtcgttgcactccaacctgggcaacagagcaagactccatctcaaaaaaaaagtaggaaagcaagagcaccttgctgggagctgaggggctatgggatagtgtatggtggaactaaaagaggtataggctgctatactccgacctgtgccctctgctttgaagaacttgtgagacttggaatttgtagggagaaggaggctagaagctttattggcaccaggtaaaaggtatttcttcacacaatgacatctgtagcaactttaccctttaatcctcatgattggttgggagaaaaagctacttctttttccaaccctagggaagaccccttgaagtaaccctgtttagcttggtccagggttgactgagtagattctcttgttttatgtgatgccttttttttttttaaagcctatcctgtccctttggattctagataacagctttgacctgaataatggtagtgacgctgaacaggaagaaatggaaactcaatcttcagacttcccaccatccctgacccagccagctcctgatcagtcatccactattcagctacatccagcaacctcaccagcagtctcgccaacaacctccccagcagtctccctagtggtttctccagcagcctccccagaaatctctccagaagtttgtcccgcagcttctacagttgtctctccagcagtcttctcagtggtctctccagcttcctcagcagtcctcccagcagtctccttagaagtcccgttgacggcttcagtgacatccccaaaagcctctcccgtaacttccccagcagctgcctttccaacagcctccccagcaaataaggatgtcagcagctttctagaaaccactgctgacgtggaagagatcactggagaaggactcactgcttctggtagtggtgagtatccagattctattctatccctgtctggttccaagaaacttttctgtcccatgttgtagttagcctttccctattggcctattgtttaaatattttgcttgaactcttaacttgggtatcccttcctcccaaggtgatgtcatgaggagacgtattgctaccccagaagaagttcgtcttcccctccaacatgggtaaatgctctagtttgctacatttattgaccttgacaagtttaatgcacaactctagaaagaagggaatgcctcttttcctctgaggtgggggaggaatgggccagacaagagtagattacaggacagttatctgcagtgataatgtttcttggcatgagattcctaggttttccttcttctctcaaggtctgtcttccatcacctattcttttttcatcttgtagtgactcaattttgcccaaggagctccagctattatcttttccaaaccctagggctcacatcca

SEQ ID NO: 8472 - DNA, 1516 bp, Homo sapiens
ggaaactgagtagacaaataatgatatgctctgcctgcttccttccctccttcgcatgccaatcactacattgggctcagacgactttaacagccagtctgatcctgccacagtcagttaaaacagcctcaatgcccgctgctagaccctaaccactccgtatattttgaaagaagcctttcttgatgcagggtgtctgttggggctgtttcgggctcgcccacctgccctctccaggccagaagctctgcatgagcttgaaataatttgcactcccactcgcgagctggtgctgctgccacaaaaacaccagccacttggctctgctaattgctaatcaccaacatgcaaatcagcctccactgcagagagctggaaagacaagtttttctcacctcaaaaagccactatcccccccgagctccatttttcctttccccacccagttcaccaacccagttatacctggctgctcttcttccagctccaagctgcctaccaagccagtgccattctctgccacaactgaagtcatctccttttctgctgcctcatcaggatggataccactgcctacctcctgggagggtgcaaaggtttgaatgctagatcccaacataggagaagtctgtggggaggtgaaaaaactagggggtccattgggcatcacctcaaaattctggtcaggaaaggaatcatacagttcttgtgaatcaaagttaagccccatgggactctgggtaccgttggcccagaactcttggctcccagcccgaaggttagtgttatgacttggggatgaaggttgccggctgcccccaaggatgccgttgagtgggtattgtccccccgagaactgggagagaaggggtgggtccttgaggttgctgccaggattggcagatgggtactgtgagtagttccagagacagtcgtaggccacgctggggtgatggaggtgtgaggtgctggaggagtggggagcagagttcaaaatccctgaagtagtagtgtgagatacagtagataagccattaacattcacatccccattcaaacctggcagagaaagaaagaaaaggtcagttacagatatgtaggcaagcaactttaccaaaacaaactcaaagtaatagcactgactagaaaaagacatggtaaagggaagggggattcctcccctgctatatttagtttttgggtctctggagaacaccaagcccagaggctcctggatgtaggtttagcaactgctgctgaggctgagtagggggctagagagctctccaggcctaccatgagagccaccagcagagctggttgctgctgcttactgctggcttttttttggtttattttttgtttgtttgttttgagacggaatctcgctatgtcaccaggctggagtgcagtggtgcaatctcgacccacggcaacctctgcctccctggttcaagtgattctcctgcctcagcctcccgagtagctgggaccacaggcgcccatcaccacgccc

SEQ ID NO: 8473 - DNA, 1137 bp, Homo sapiens
ctggagagctctctagccccctactcagcctcagcagcagttgctaaacctacatccaggagcctctgggcttggtgttctccagagacccaaaaactaaatatagcaggggaggaatcccccttccctttaccatgtctttttctagtcagtgctattactttgagtttgttttggtaaagttgcttgcctacatatctgtaactgaccttttctttctttctctgccaggtttgaatggggatgtgaatgttaatggcttatctactgtatctcacactactacttcagggattttgaactctgctccccactcctccagcacctcacacctccatcaccccagcgtggcctacgactgtctctggaactactcacagtacccatctgccaatcctggcagcaacctcaaggacccaccccttctctcccagttctcggggggacaatacccactcaacggcatccttgggggcagccggcaaccttcatccccaagtcataacactaaccttcgggctgggagccaagagttctgggccaacggtacccagagtcccatggggcttaactttgattcacaagaactgtatgattcctttcctgaccagaattttgaggtgatgcccaatggaccccctagttttttcacctccccacagacttctcctatgttgggatctagcattcaaacctttgcaccctcccaggaggtaggcagtggtatccatcctgatgaggcagcagaaaaggagatgacttcagttgtggcagagaatggcactggcttggtaggcagcttggagctggaagaagagcagccaggtataactgggttggtgaactgggtggggaaaggaaaaatggagctcgggggggatagtggctttttgaggtgagaaaaacttgtctttccagctctctgcagtggaggctgatttgcatgttggtgattagcaattagcagagccaagtggctggtgtttttgtggcagcagcaccagctcgcgagtgggagtgcaaattatttcaagctcatgcagagcttctggcctggagagggcaggtgggcgagcccgaaacagccccaacagacaccctgcatcaagaaaggcttctttcaaaatatacggagtg

SEQ ID NO: 8474 - DNA, 3149 bp, Homo sapiens
gcggcgcaaacatctccttcgccaaaagcaggcgccgccaccgggcgcatcgtggcggtcattggcgcagtggtggacgtccagtttgatgagggactaccaccaattctaaatgccctggaagtgcaaggcagggagaccagactggttttggaggtggcccagcatttgggtaagtagagtttgttaggaatagtaaagaccttgtgtagcccaaatatccccaaaaccaagctgtctgccttctatgatgattttatcaaaatgactttcgttcttctgagtttgctgaagccacatttaggtactgagaaggagtcttggtcgatttaggtcttgataccaatttatccttatgtataaccctgcgatgcctgtatctaacaggtgagagcacagtaaggactattgctatggatggtacagaaggcttggttagaggccagaaagtactggattctggtgcaccaatcaaaattcctgttggtcctgagactttgggcagaatcatgaatgtcattggagaacctattgatgaaagaggtcccatcaaaaccaaacagtaagttgctcttattgcatctatgcacaaaggaacttctgttatttgcagttttacacattaaggtgacatgttctcctaaagcagaatttttcttctgatacgttcgattattaaaatcacacagtgcagtttcacctgaagaaattaggatgcagaatttctgattgacaaaagcctactacttgaggtttttttttttgagagggagtttcgctctcgactcactgcaacctccacctcctgggttcaagtgattctcctgtctcagcctcctgagtagctgggattacaggtgcatgccatcatgcccggctaatttttgtatttttagtacagatggggtttcaccatgttggccaggctggtctcgaactcctgattttgggtgattccccccccacctcggccccccaaagtgctgggataacaggcatgagccactgcgcctggctagttgagtatttttaagactcggtcttatggcttaggtttaggagtctccaaaacttgtaggtttttgtatttgctattgctatgtgagggaatgctgttaggttaaggctcagtaaaatgaaaaatttatgacagttaaagtcagggaatgggattattgtttcctaagataataattttctttattgcagaaagttgggttagatcctagatgatagtttatctgatttatgtaagaaaggggaggtaagactgtggttcctcaggtaaagggatggacttgagagttgatagggagggatatataagattatcatttgctttcaacaaggtgaatagatactatcctctcttctacctttacagatttgctcccattcatgctgaggctccagagttcatggaaatgagtgttgagcaggaaattctggtgactggtatcaaggttgtcgatctgctagctccctatgccaagggtggcaaaattggtatgttattaaggggtacatattttccaaacctaatatgggaggaaaaactcatacaatgttatgagtggatattgacatctattcctcactgatgagtacgttctgactttcgttcttctgagtttgctgaagccagatgcaatttctgagaaggaataggatggaaggaagcaattactttttttgaagtttgcttatttaggaaagcagaactcttaaatattctttcttttcaacctcttatagggctttttggtggtgctggagttggcaagactgtactgatcatggagttaatcaacaatgtcgccaaagcccatggtggttactctgtgtttgctggtgttggtgagaggacccgtgaaggcaatgatttataccatgaaatgattgaatctggtgttatcaacttaaaagatgccacctctaaggtaagcattgagctaattgatgtccacgtggtagttacgccaggaaactattgccaactgaagccatgttctatattttctatttaatttttttttctttttaagaaaatgttaatattttcattttcgtgtcccagggcctacaaaggaaacctgttagtgttttcccccccaacttccaatacacaaatggacattttctttcctctttgatactgacattaaataacatttccaggttttctttttggtagatagtcccatcatttgaaagctaattttgggagggctggattggacgtggtacatatgtttcagttaagcctattttgtacttttcacttaacttgaataggtttttatttcctttctactatagttttgccttactaatataagaagctgtcttttttttttgaactgcatctctaatagggaaaagaaacttgcacacaaaaacgctgacaccttctgagaaaggatctgtggtcgtttctccgatttgggaaccttcagtatgtggcttctctactcctttgtcaggttttacgattatgtatgattactgcaggtagcgctggtatatggtcaaatgaatgaaccacctggtgctcgtgcccgggtagctctgactgggctgactgtggctgaatacttcagagaccaagaaggtcaagatgtactgctatttattgataacatctttcgcttcacccaggctggttcagaggtaagagggaaggcttgagaggacctggttcatctggcctttcttcggatgaggctaaggatgtagacacctaagacctttttttcttttaggtgtctgcattattgggccgaatcccttctgctgtgggctatcagcctaccctggccactgacatgggtactatgcaggaaagaattaccactaccaagaagggatctatcacctctgtacaggtaagaaaaattacatagatgaagatctgatttgtataaaggcagggtgcagtggtgcatctcagctactgaggaggctgaggcaggaagattgcttgagcccaagagatcagcctggggaacaaagctgtatgtatgtagagagatgtataaaactgactgggccaggcgtggtggttcatgcctgtaataccaacactttgggaggctgaggtacgcggatcatgaggtcaggagttaagacaccaccctggccaacgtggt

SEQ ID NO: 8475 - DNA, 3149 bp, Homo sapiens; identical to SEQ ID NO: 8474

SEQ ID NO: 8476 - DNA, 3149 bp, Homo sapiens; identical to SEQ ID NO: 8474

SEQ ID NO: 8477 - DNA, 1893 bp, Homo sapiens
agtatgtttatacagtgatactttgcatcaaaaaacaaactcaaaatagagatgttaacttctttggaagtaaagtaattttttctttatgaccttgaataaataaccaaagcagaaatgtgaataacttgatagcaagacaacctattaattcattgggcaactatgtatttcgatttttggttgcttttcctttaagacagtaaaattggtagattattcacttgtactatatactaatatttttaaaaattctttcagaaatgccagatctggagtaaggaatattgtcatcacctggattttgagaaagaaaaataacttctctgcaagatttcataattgagagaattcctgagttgatagctctaaaggcagatatgctgtatttgcctactttaacccatttttcaacctgtttgttttttaaaaggcttcactaagggttgatatgtaccattgtatggggcaattttaagtcagctaaggcaataaccttatgcatgaacatttcccagactttcatgaagctgttgaggtcctaggcaattaatgcagcagttgcgataaataaaaacatctcacctaagtctccttttcttcataacatagatactgacatgataggaagctctcagcttagggaaagagaataaattttagattatagaacatggattcaaaagtgactggaacaaattggctgacaccttactggtaacctgctattcttctggtgttatccttcaggattgttccactaaaatttatttttcaaaaaatttacttcacattattctatgtaagtgatgacttgtcagtgttccaggtgtatcttagctaaaactagagaatgccctaacttagatggtttttgaagcctatacaattggtattgtttgacccttaagcttttacatctcttagcatggaggacgaagaaagctgtacattgttgcttgagagtctgtacatttagtccagatttgtatttgcactgtcagtatggcaaatgagtgaaaaatgtttaatacactattggattttttatttcctttttttgattcagcttatacccgggctgaaaacctcaatttatgttcatgacagtggggatttttttaaatgtctacattctttctaataaactgttggaagacttcttggctgtccttttaagtgtctggcttactgtaatttttatgtatttaccatttactggaatggagtttatttgaggaagaatttgggattattcctctgtttgaaaaaagaggcttgctgtaatgtcacaggaaaccttttaaaagtggatctgtaatagcatattgtagatgcactttgcagcagttggaaaagaaagtgttgtgtgatttgattgaaataaaactaaatgtgttgtcctcctaaatctttgaacttctgcattttggcagttttcattccctcacagcttctgtatttgtcataatgtagaaacactatgtattttagtgtttctttgtcagatattcaggacctgtgttgcaggcagttaaagtgctggtgatacaaagattaatatttcagatgattgctgagctcagagagctcacaggctaggggagacaaacatgagacaaaaacttgatggaaagtgcgataatagatacgcataatgtattacgatgtgtagttcttagcttcaggggggaaaacattttaaaaaaacttgtttttcttcaaaaaatttatacttcagttttgggaattaatgattcactggcttactgcccagccttgaaacgcattatacaggccggcacggtggctcccacctgcctttaatcacagcactctgggagactgaggcgggcagattgcttgagaccagcctgggcaatgtggtgaaac

SEQ ID NO: 8478 - DNA, 1290 bp, Homo sapiens
gcgtcagatagttctctgttatggaagggctatccattacatccagttttgattacccaaaaactccattgccatatatctcctgggagacctaactaccccctagttgagaaccactgctctaaacctaaacaactactctttctactgtgagggcaagcagtttaaagctgtacaataagttacctgaatgggtttacagagagttgtgaaactatatgatttatttttcaaagactgctaatctactcacatggatctgtattttctaccctgtagatcgaagatttatcccagcaagcacaactagcagctgctgagaaattcaaagttcaaggtgaagctgtctcaaacattcaagaaaacacacagactccaactgtacaagaggagagtgaagaggaagaggtatactaggaaatctttcataatttaactctcgccgtatagcattgtgttcgtgttggtgagctatattaaaaactagattcaggagactccaaagaactgctgaaattgttcttgcctttaatttactgctttttccctctcatctctcaggtcgatgaaacaggtgtagaagttaaggacattgaattggtcatgtcacaagcaaatgtgtcgagagcaaaggcagtccgagccctgaagaacaacagtaatgatattgtaaatgcgattatggtaagtgttcaagcctttgttccttgactccctctgccctgaccaattatgagtgactttattttgtcttgctaaatatcagccaattaaggaacctcattccagagcctcttctgagttgccgtataggttttagtggcctaaattctcctgatttgcctgtaagagttttagtgacctgaattctcctgatttgcctataagaaccgctaattatcttttctctgttacaggaattaacaatgtaaccatatggaagcaactttttttggtgtctcaaaggagtaactgcagcttggtttgaaatttgtactgtttctatcataaataaagttatggcttcttgttggatgaattcagtcggtgactggtctcttccccgccacccccccacaccaaaaaaaaaaaaaacttaaaaaggttctagtaatttattaattactcctaaggcctccctcatttgataaggtttagtgccacagatttcccacttagaatctcagactttatacctcttttaagaagttactggccaggcgtggtggctcacgcctgtaatcctggcactttgggaggccaaggagggggcagatcacgaggtcagga

SEQ ID NO: 8479 - DNA, 1206 bp, Homo sapiens
agggaggctgaggcaggagaatggcgtgaacccgggaggcggagcttgcagtgagccgagatcgcgccactgcactccagcctgggcaacagagcgagactctgtctcaaaaaaaaaaaaaaaaagatactggtgttatttctaaaacatccaaaaagttcacgtggagcatcctttttacttcatcttaataacctaaatcaatatgctataggtctcacatttccggagaagatcctcttcctggaatggacgcggccttctgcccacaagagcggtggccctagtgcccgaacgcgtgggcagatcgcaaactgctgcgtctcccgcagcccccgcgcgcaccaagtgggaactacaattcccggcggccccggcggactgcgggccgccgggtcagacagccgacctcggccataagcgcctgcgcagtcgcggggccgccggccgtgctgttcccgccaattcctgtggtaatccttaccgtggcgagttccgcgctcaatggagacgtttgaccccaccgagctgcccgagctgcttaaactttattaccggaggctctttccctactctcagtactatcgctggctcaactacggtggaggtgatggaggcgaggaatgggttcgggagcggagtgtgaggaggttggaggcggggtgtccttagaatgacaatatgaagcgccttctgtgcaccaggctttgtgccgcgcgccttcatttgctctctcgagcccgccccaccacttcataggtgtaaatgggccgagagaggatataataagccagcctgcggccacgctgtaaaaaaaaaaaaaaaaaaaaaaaaaacagagccgccgctcctacctctgcgtggtcaggctcacattaggtgccccgtttacctgcagcggtgcccagggggttactggggcgtagcgtgaagctgctgaggcatggtttgcatcaggagcggaagagcctctctcagaggaagagaaatactttcttccttgcagctgaatttattagtgcgaatcgaggagagaggggtggcattacatatttaaaatatttatgcatctgtttcatcttttgtaccgttccctagcaaatacggaatggtaactgctttcaaattagggactaggtcatgtggattttgttttgtttttcttttacatctaccacggtgttgagcatagggggctcattaaaa

SEQ ID NO: 8480 - DNA, 2449 bp, Homo sapiens
agaaccaggggtataactaagggaagacatgtcaagcccttaagcaaattcttcttctccagattgtctctagcataataaacccagggaacactttaggccatgggtgtatgttctataaagttcgggacagttaaattccaggcctttcatcccccttccttcctgtgatggagtagattggggacagggttgaggggaacaagtgacatgaatgacctatttgcacagtttggaagcctcctgtctttatttatattgagatgtcagacaaaccaaagctccatccttgttggacctgctgcttctccccagccctgaactgataaagcctcagagttggagtgcctggctctctggtggggtgaccattagatgaagggacttgtacagtggccagtttaaaggtccacctttgaccatctaaacccaccttgttcagtgtcctctgaggacatcctcatcaggaaagcagtgttgagactcttcattgctgactggcttctccctttcttactcacactgaccattagaatttaagaaggaaatgtgtaacagactacagtcaagtgtctgctacattttcaagcatgagcaatccctcccagactgttggtgaggactgatttttgaaatgctggtgtgagagaggtggtaattacaggaaccagccgagtggctgagagcagataaatgtgctggagaaacctttttccttaacagagggcatcatggatgctgggtggtctgtgtacttaacctgaaactgtgaagttttccctttttgccagtaaaccaaaaagcagatccttgaaacttggcccttgaaacacgaaacagaaaactgcatcccctgatcccccgggggctgatcagattgatcagggtggctcagttggtcccagtcagatacgtcataggatcagtagctcatgagatttgttgaccaaaccctctccctgttggtgacccctgtattcacacctgaacttcccgtttccccccaccccaccaaagtcatgtctgcttcctctgcctccagctcaccctcttctgaatggttttgcttgaaacactatattgtggcagagggcaccctgggatacctggtagaaggtattcattttattttgcatttttaattgttttgactttctgttcatttgattttgttgctccctctctcctggaacctagtttactactctcttctgtgttactctgaagttctgtttaagccttgaacatcctcttctcccattttcttggtatgtactcaggaccagctacatcatttgtggagccctcttattcataaattattaaaaatttcaaggtggtggtcatagagcattaaaccaaatatgaggccattcccaacttgttttccgaggggaaaatggtaatacttgtgtggcacccggggttaaacagcagaggctccatgtggccagaggcagagattagtatcctggcactccagtgacccactgggtgactcactgatgccacagcacccgctaggaagctctgctgaaccttagtatttggtcctaaattttatgactccatggagttcccgtagtccatggctagttaggaagaaaggaggtgggataagggtcaggcccaggtgacccctaagaaccaggagatgggtaaaagtttttttttatattctgcttttctgatctgtgagtacctgtttgtctccaggccaaacctttgggcttaaatatctttttcctagacaggtttttgctagtgttgaattttcttcttcctctggcctccttctgtgcccctttccccaagcccaagactgcttaacttccaaagcaaattctagatagacactgtatttattggtatgggagtgggctctatggggtggtctgcacccatctgggactcttttccctaaatcctgcaccaaatgagtcaggaggcagggtgcacagcattagtttcaatgtggttatgcatcataagcttaacatcagaatgaaaatgaaactcgattttgatgtttctttaaaacccttcccctgtccaatccactcgccgcccccaccttgaatagctaaagtctcttatgaaacagagaagagttgttgacgtctaactccttccattaaattaataagtactgacctcctaatatttaagtgtttactatctattgctgtaaagttttgtatattttgtaaacttttttccccaaatagtagatgtctaaaatcattgtacatctgattcttttatattccattgttcagcacaaagtgtggtttttatttagaataaaaaaagaaatttgaaatgagagttctcttcctacctactatgaatatgctcatacctggagttcagaatatctgggctcatcaccctttcagcagcacatttctgcccagcagatgccagaattctttcaggtagcacattt

SEQ ID NO: 8481 - DNA, 1181 bp, Homo sapiens
aagcgcggccaggccgagggctgcccctggccgaagcccgaccttcggcccggcatttatctcgctcttgctggggtccctcttgcccgctcccttcggccggacccatcctccccgcccgcgcgccgaccccggccggccccgccgcccctcgcttggccccttattcagccccatgcccccaacaggctcacccgggtgagccccgcgctgtttgtggagggactgaggcgctcgttgcctccagagggagcgccccagccgatgcagcgcccttccctcccagatgcgactccggaggggagaccgcggcgcccggggattgttggggtgtccttggaagttcccagcttccccctctcccaccctctcctctggctgcccagtgctccgacccgcccatcgttcaggggtggccaccagggcccgggagatgcttggccggtaccccacaatacttagacgcttcctgggccccagaaaaagttgggagttgttagaatctggagagatggagaaaggggctgtgttgggcagagttgtgagactgaacagggatgcaagtagctcttcttccttagtcgtgcaggagtcagaaagggcagaaagtggtagtgaacaagcctctaggagtcttacctgtataattagaagtctttcttgcggcatcaagtaaatctgttagtgcagggacaacaaaatataaaccccgaaaagggtggcgaaaaagaatacaacatattaaagtaatattaaatactaccacagttgtgttctacttttcttactgtgcattctgagtgttttaacttcacagaatacagggactgtgataaagcaatatctggaggggctctgggttatcgaaaggccagagagcgggtatgtagtataggcagagagagatggggattcaagaacgtgagatttatttggagattattgagaggttgaagacacagcaatgacaaagctaaaaaacggaaccaccttatatgttcctcagtagctagtggagctttgatagttgtgttcaagcatgtgcatggtatttggcatcatgagggaaaagaatatgctcaatgaattaggaaagcttgtatttgggaggaaattaataggagaaaaatttgatccagtggctctggtaatgaagtataagattgtgtccaagggaatgc

SEQ ID NO: 8482 - DNA, 1154 bp, Homo sapiens
tgtccctccttcctcacagtgcaagaggttccgggatcagctgtccccgaagcaggtagagatcctgagggaaaagctctgtgccagtgaactgttcaagggcaagaaggcttcatatccccagaggtgagggcctcccagaccctgcacagccagttccatcacgcagcagttctcaaacttgagcgtgccttagaatcacctggcaggattgtcacccccaggtgctgtgtccctcctcagagtctctgatccagcaggtcttggggtgaggaccaaaatttgcctttctaacaactccccaggtggtgctgatgtcttggtcctggactgtgctctgtggacactgacagaggatacgtggatgtgggggaagggcccgggaggactaggatgggaactctgggggtggggaagaggcctctgggccttgtcgcgctgcacacctcccatgtgttctcagtgtccccattccattctgtggtgactacattgggctgcaagggaaccccaagctgcagaagctgaaaggcggggaggaggggcctgttctgatggcagaggccgtgaagaaggtcaatcgtggcaatggcaaggtaagggcctgcaggctgaactcctcccgcagctagtgcagagctgtgggctggcatctggagagcagatggcaggctgtgtttgcgccctgccaggtggagtgggggcaattaatcctgcctttcctcacccttgcctgttccgtccctagacttcttctcggattctcctcctgaccaagggccatgtgattctcacagacaccaagaagtcccaggccaaaattgtcattgggctagacaatgtggctggggtgtcagtcaccagcctcaaggatgggctctttagcttgcatctgagtgaggtatcagagctgggtggggcaagccttggactggagaaggtggtatgcatcccagggctggggcaggctggaggtgatggggaccagacctttcgctctgggcctttgatgtccctcaggtgctcctgaagagaaaaaatgaatccctttcctgctatttttccctcttcctaagatgtcatcggtgggctccaagggggacttcctgctggtcagcgagcatgtgattgaactgctgaccaaaatgtaccgg

SEQ ID NO: 8483 - DNA, 3438 bp, Homo sapiens
gaaactgtctccttttcctttcccttcctttgtctacatgctctgtccattcctttcagccttttctcaccacccatactcccccaaatctgggtaatttttaagccttgaaactatgtagtttcttgatacacaatttgtagttatgcagcagccacaatttgcattgccaggaaataggctccaggttatcttcatgcctctgggtgctcattcagctgtcaagtttccatgaacttacacttatttatgattgcgtttctgacctgagatgtatgctgcctgttattgcagtagcattagtttcagattcttttgccattgcaaagtaccccttataaaccagcaatgtcatctgtgaggaagcaaattctcaagtgtctgtcatttacttggttctttttctttgtggtcttcacccttataccctggaaaagtctgtaattaccttagccaggaagatagatggtcatggcaagcgcacagcaccagacttactggctcaccaagatgatggaaaaaggcagatgattttttaaaaagccgtaatgactcctttagaccagccatttagcgtggtaattttgaaaggcctagctccattgcagacttccaaagggtcagctctgagactgccctccaggtgggcagttgattatttccaccagtgttttccagagccttaaactgtcctaagtgacaactacctcagttggcaggaaagagacatatagtagaaagtgaaaaatgagcagtatttgggcagatgctatgggttacagttgaagggtaaaaggaactttacattgggaaacctttatacccttgtgaattatgtacatggtaaaatgttctctctctacaaagaactattaaaacttctgaaatatactattttttaccttatttatagaaattgagacctagcatatttaagcataagtttattttaaaaaataattcaactcgtgcaagtggtctcaggattctctggagattttggtgcctcccctacttagggaggtgatagcttgcctataagggtgacttttcctgatcatgtctttatttcaatgagaaagcactgtgaaattgtgaaagattctcctctttctctgtttaataaacccccatgaaatatagtttccatctctagaccagttttttttccaccgtgtttagacttgaggtgaataaaatcaaactgttttttactccctatctggtagttggagacctgagctgtaggcagtggagatggcaattggttctgcagcctgagagttgctctcacacagtgaaggacggtgctgctctggtgtgctgtgtgtccttgccctgcctgcctgtggctctgcccagatgcttcagatcctctgtgttccggagattgcttgacttcaaccttctttaggagctgctcttgtctccctcttggccacttagtttgctggctcagtcactacttgaagaccccatttaatttttctctggcagttatagctcttgtgatttcagtacagtctcatctctcagaccaatctcatcaagaaggattgaagggataactatgaggtaagctggacattggagccgtgtttgctgccacgtcagcgtcttgctgggtgaatgtcaagccataaatgggctccagggctctggatctcatcagcattggaaatctattgcctctcatcagtctgaccaaattatgtagagcattaatgtagagactcccattaatgggaatacaagaggcagctggcataaaacatttctttcactttcctttcccactcagattgcttcaagagaccaacagaacacagggatcaaaaacaaggaaaatttagcaacttcattaccttctaataagtaattcctgttagccactgcatcccaccaaaactagtttatttttcccctcaaattcatgatttttacgtctgttacaaagggaattttgctgatagctctttgggtcccactgttccattttatgctaatagattccattctagggcccagccgtctcttgactgatggtgttccctttaacccttggcatgtataatagaattttggtgaatgaaagaacccaaataggccagatagtccccccaggccctgatatccataaaaggcttgggaatgcattatgtaattgtccttagtctttttgttgttttagaaaaaaaaaacaagatgggctcagatggatgcctacgtaaaaatggttcctagctgtgtactcataacttttctttgaattgagtagtgaaaggaaggaggaggaaaggaaattaaatgtccttctagtattctctggactcaagtctgacatatgagataataacctatattgaaatgccaagaattgtatctgaaacaagagaacagtttgacacatttatcatgccttcatattacatattaactgaaaccaattaataaacatatgaaatatccattgcacaaggcaaaggcacctaaaccttttgtttctttttctacatagcagaaattgattttttttttatttttttaggggaacctatataattatgacccagtgatgtcttttggtgacttaagcttatgaattcaggttacaattgagttgattctagatggttactaccttgaaaaggatgttggtgccttatgtgacacgagccagagcctgctgggaataaacaaagcagattcatgccaacaccaactcgtagctttagtggcagatgggagtggtcacagactcccaaaatgtggggctttggatttccacaccatcccacgtgtgtgtcatcttcctctttcacactcttgatgataatttgaaaatggtgaaatcacctctgaatttgcctatagcatgagcacattcttatgacaacataacaaatagttcataatgtgaatattagaaactgttacagcctgcagttaccataattttccatgtttgtggaattgatattgaaatagcagggctaaggaattactggcaagttttagcctgtgggtaataccttagggttatttaaatatttgtaattttatttaaatgttcatgaatgtttgaaaggaacaaaattatcagggatggctctttgccatgggtcttattttcaccctcttttctgtaagaaaaaagaacaatgtcttaatgtatttttaaagtttttggtatagtttctaattccaattttaataaaagttttatagatatattgtggtctttcttaatgaacataatattttcttgtttggatttcttgttttcaggtaatcagcaatttactcctcagtttcatctttctaatgagatggttttgcatgccactgatttccctttttttcttagccaccccttcctgtcccgagtctgtactggtctactttcatccttggactggatgatttcccaggatgcaa

SEQ ID NO: 8484 - DNA, 1247 bp, Homo sapiens
agatgccccccagcctgggccagatgagcctgccctttgaccagcctcacccccagtgagtgacaaagcccctcctgaccccatgtgcctcttctttcctggccttgccccgctctccttatttccattgctggttcctggcaggggcctgctgccgtgccagcctcaggagcatgctgtgtccagccctgaccccctgctctgctcagatgtgaccatggtggaagacagctgcctgagccagccagtgacagcgtttcctcagggcacttggtgagtggcagcttgggagtggaggctgggtggcatctaggggagtgggcgccatgcctactccactgcttctcccatctccttgcaggattggtgaagacatattccctcctctgctgcctcccactgaacaggacctcactaagcttctcctggaggggcaaggggagtcggggggagggtccttgggggcacagcccctcctgcagccctcccactatgggcaatctgggatctcaatgtcccacatggacctaagggccaaccccagttggtgatcccagctggagggagaacccaaagagacagctcttctactacccccacagacctgctctggacacttgctcatgccctgccaagcagcagatggggagggtgccctcctatccccacctactcctgggtcaggaggaaaagactaacaggagaatgcacagtgggtggagccaatccactccttcctttctatcattcccctgcccacctccttccagcactgactggaagggaagttcaggctctgagacacaccccaacatgcctgcacctgcagcgcgcacacgcacgcacacacacatacagagctctctgagggtgatggggctgagcaggaggggggctgggtaagagcacaggttagggcatggaaggcttctccgcccattctgacccagggcctaggacggataggcaggaacatacagacacatttacactagaggccagggatagaggatattgggtctcagccctaggggaatgggaagcagctcaagggaccctgggtgggagcataggaggggtctggacatgtggttactagtacaggttttgccctgattaaaaaatctcccaaagccccaaattcctgttagccaggtggaggcttctgatacgtgtatgagactatgcaaaagtacaagggctgagattcttcgtgtatagctgtgtgaacgtgtatgtacctagga

SEQ ID NO: 8485 - DNA, 1174 bp, Homo sapiens
ccccactgctcccatctgggggcctagtgattaggggttgggaaggatggggtgatgggtcaggggaccaggagtgtcccagaaggcagggaagcagagaggttagataagaccagctcggggcctctagtagtaggagttagaggaagacaaagagaaaacatgtcaaggcctaaatgcaccccccttcaccatcactctgtcatcaaagccagggggtgctggtgtctgatgagagtaaccaagaatagcaaaggctttgaccctgactcccaggaacaggcagcctagaggacttggaggggtgcagtaaaatgtgcttctggatcctccccacccccaccgcagatacacagtgtctaggaactacccaaagccaccccctgacacccccaggcacatagaccatggctgagggtctgggccagatggagactgatgctagggaaggaagagcagtactaggggactttgggttcacagagttggcctccatccttcatttatatccccttttctttccttgccctagcccctaagacttgcagccccaagcagtttgcctgcagagatcaaataacctgtatctcaaagggctggcggtgcgacggtgagagggactgcccagacggatctgacgaggcccctgagatttgtaagtaccttttctggattcttctccccaaacccttaacttatccctcttcctttggcagatgtttgggaggaggacagctgatccctagcctgatgtggaccttgctcagtgattgtatttgtccatgacacagctaaaactgtcctttacaccccttcaaaatgcttggcatggtgcctgttgggcttagaaatggcacctcagatttctccctcaagtgctgcaccccaagacagtgttctctgggctgacagctttgctagaagatggcccggcctccctttccttccagctcttcccttattccacctctcagcctccctgacccttgatgattggccccaggtcttgtcggatcctcagatcttcctctgtcctttggctcccaggccagaggccactggcacttgctcagccccataccagaagccccacccctgtgctcttcccgctacccccgccttcccctgcccccagtaagtggtgtaatcggaggcagctgttttaactgggaga

SEQ ID NO: 8486 - DNA, 1207 bp, Homo sapiens
ggactccagcgatgagaagagctgtgagggagtgacccacgtctgcgatcccagtgtcaagtttggctgcaaggactcaggtgaagaggatggttggagggcgtctggaacagcacaatgtgggcaggaggagaccgtgttgagagcagagtagcggcaaaggggatggcactgtgctgtgtggagtggtgctggggacagtgcaaggcaaaaggcagtccagaggaagcttgtgtgtcatgggtgggggaaggcatgaagggccagagcctgcacagaggacctgagaagccaaaaccctaccagagttgagcttcagcacctcctgctgcagattcctgccttgtttgttgcctatgtgaatttgacccaaaaagcctcggggttcctcgtggaccccacagcgttgcaatcctgaccctattagagaagcccacagggtctggaaggaagggcagggggagccccagtccccgggcctgggccctcatagtgcacctgtccctcagctcggtgcatcagcaaagcgtgggtgtgtgatggcgacaatgactgtgaggataactcggacgaggagaactgcgagtccctggcctgcaggccaccctcgcacccttgtgccaacaacacctcagtctgcctgccccctgacaagctgtgtgatggcaacgacgactgtggcgacggctcagatgagggcgagctctgcggtgaggcctggtcccaggagaagggtagggagggtggctgggtaggagtctgggccaaggacagtctttgggggacctgagtctaggagagagcagctctggcagccgggcaggcgagcagcacccagagtggtcaccagcagcctgtgtggacctggcgctccccatggcgctgtgctgagtgagccacgccattagagcagtttatccacaaggcatccctgggggccaggtgctctgttttctccgtttgacagatgggagcactgaggcatggaggggttccatagtggtcccccagacttgggccaaggtagtacagctcctaaactgctgtggagactcagaccccttgcccacatgcataccacagagagatgcggagtgctcttgtggagacaaaggcaccagggttgactgctgatggtcagggcaggcttcctggaggatgtggggattgcatggggttcccaaggacaggcagtacttgcagagtg

SEQ ID NO: 8487 - DNA, 1208 bp, Homo sapiens
ctctgttccctctgctggggctgtgtctgcccagagggaggggaaacttctttctaattggtctgcccagggagggtgcctttttcttttctttttttttttttttttttgagacagagtctcgctccgtcgcccaggctggagtgcagtggcgcgatctcggctcactgcaggctccgccccccggggttcacgctgagggtgcctttttctgactttcatcaaagccctgagtgctgacagcagccctggggagaagtgaccgaaagattcccttggggcttgggaatcggggcctgagaggtgaaacctggacctgttgggttctcacaccttggtccttctgtctgtctgctctggccagcaaggcttaggggagggaatggtcccatgctcttcgctgggagggctgtggccagggcccagagggtgggcacctgggcagagctctgagggctgagatcccagctggcatcctcattctgctccatcatgctcttaggtcagatgccatttactcagcccgttacgacggctctggccacatggaggtgcttcggggacacgagttcctgtcgcacccgtttgcagtgacgctgtacgggggggaggtctactggactgactggcgaacaaacacactggctaaggccaacaagtggaccggccacaatgtcaccgtggtacagaggaccaacacccagccctttgacctgcaggtgtaccacccctcccgccagcccatgggtaaggggctcggggcctcgagcagccggaagggagccagcagcctctttagaagctgtagaagctcttaggagaggagagggcagtgagaacaggagcaagtctgtgctgggatggcaggggtaggccggctgttgacagaggcactgtctagcagcagagaagggtctagtagtagcggctgctggaacagggggaggagagtgggcgaggaaggggtggtccatgtagggagcagcaagtcacaggatgctctggcttcttctcttctccaccctgcccccagctcccaatccctgtgaggccaatgggggccagggcccctgctcccacctgtgtctcatcaactacaaccggaccgtgtcctgcgcctgcccccacctcatgaagctccacaaggacaacaccacctgctatggtaggagcccctccctccagagccagtgagcaactgaggctgg

SEQ ID NO: 8488 - DNA, 4037 bp, Homo sapiens
acacacacattcatgtcacacccgcccctcagggctcatccatgccctcggtgcccctaccctcaccctggtcactctcctcacttggagccacacagacagccgagagcctgggtgcacgtgccctcagtgggcacgagtacatgccccagcgccccccaccacagacctgcagctttcccaggtgtctcccatgcgccctggggctcactactgcacccgtgatctcagggccctcagactcgaatctctcagaaacactcctcaaagcccacggtgccctgcctaaaagcacacacatcctcaacggcacacctgccgaaaaccccatgcacctggccctcccacagcagccatccccatgccctccccactggctgcaagccgctgtgcctgccgtgactgagcagaggcttgggagctccatgaagtcagtgaatgggtgggtgcactctgggtgcatgcacagcagagaacactctccagccctgcgcccaccctgtccctgctcaggtgaactctctccatgccgaatcaacaacggtggctgccaggacctgtgtctgctcactcaccagggccatgtcaactgctcatgccgagggggccgaatcctccaggatgacctcacctgccgaggtgagagaggcgggggggaggggctggcggggaacccaagcacacaccagggatggtgaccatctcccctacatgctccagcccagccccccaaagccttttgccaagaagacgctgatgatgacctcagctccccgggggaggaggcgtgggcactggggcccacagcgctggctcagaaagctccctccacctccctccccagcggtgaattcctcttgccgagcacaagatgagtttgagtgtgccaatggcgagtgcatcaacttcagcctgacctgcgacggcgtcccccactgcaaggacaagtccgatgagaagccatcctactgcagtaaggagccccctgcagcccctgcctcttccaggcccagagcccaggtcctcctcccccaggcccctgcaggatggagcaggatcaggacccagcttcctgaccatgagttttgggagctcatgaagggcagaaccactgttagcctggactgggcctttgggtttgggggtggccagctggacacgtgcatgacgtctcagggaggcagccctttccctgtgcctgtggctgacacgcagcctactcctccatttgcagactcccgccgctgcaagaagactttccggcagtgcagcaatgggcgctgtgtgtccaacatgctgtggtgcaacggggccgacgactgtggggatggctctgacgagatcccttgcaacagtgagtgaggcgcactggcataacccatctgtacctcagttcctgccccacccctccctggccaagctttgtccctgggccccgtggtgtctggttcaaggcactctgtgacaggccagggcaggtgctgtgggccaggagctctgtcctgcgtccttctggcccccacagagaaaactctggcctgacgatacggggcgggcactgttctagagacagcctgtggtgtgggcgagttccgctgccgggacgggacctgcatcgggaactccagccgctgcaaccagtttgtggattgtgaggacgcctcagatgagatgaactgcagtgagtgacgccctttgctggcacctcctgggctcctccccatcgctcactgcatctcccgccttcaggccctcctgcacctgcccacattcctctctgccttccctcatccccgctgacagcctccatctccctgaggccctgtccccatcccgctcctgctcctgggctctcgtggggttccgagagggggcagtgagcagatggtgcagacagtgccccaccagaagggcaccgttcaacttttggaaacacatgaaggctccatagggctggcagctgccccagtcgggggtgatccagggggaaccaggtatcaccctcacccctgcccccaccaggtgccaccgactgcagcagctacttccgcctgggcgtgaagggcgtgctcttccagccctgcgagcggacctcactctgctacgcacccagctgggtgtgtgatggcgccaatgactgtggggactacagtgatgagcgcgactgcccaggtgggcgggggcaggtgtgtggtgggtggtggcctgcggtgagcagggccctcacacctgcctcgccccccaggtgtgaaacgccccagatgccctctgaattacttcgcctgccctagtgggcgctgcatccccatgagctggacgtgtgacaaagaggatgactgtgaacatggcgaggacgagacccactgcagtgagtgaccactgcacccactcagtgctccaagagcctgctgggccccacttcttagtcccccccagcaaatgcccccttggaaaagggcatccagagccttcaaccccctgccccacaccccaactcttgaggtcagactcagagactctgcctctagctgctgctgagcccccccacagaggggtgctgtgggcatctctcctgtccttcccatggcatcagcctccccaggtgggtgacccccacccttccccatctaactgtggcttctgactgccccagacaagttctgctcagaggcccagtttgagtgccagaaccatcgctgcatctccaagcagtggctgtgtgacggcagcgatgactgtggggatggctcagacgaggctgctcactgtggtaaggaagctgggattgggccgggggaggtgccccagggagggacagaccccacccaactccaccccacacacagacacccctgcagacgacggcgaaccatcacctccactgctagacctgatctacccgctcctaagtctctcagtggccctctctccccctacagaaggcaagacgtgcggcccctcctccttctcctgccctggcacccacgtgtgcgtccccgagcgctggctctgtgacggtgacaaagactgtgctgatggtgcagacgagagcatcgcagctggttgctgtgagtggcggggccacgtggagcgggtggacagcaaatggccacagtctcactttgcagatggggaagccggggtgcaggagaggaaatgcctcagcggggtccactgggggcggagccatagctgtagcccaggtgtccagactcctcatccagtgccctgcccactctaccaggagaaccacaggaggttagagtgagggacggtcggccgctggccaggcagggctgaagggctgtgtccacctctgtccacagtgtacaacagcacttgtgacgaccgtgagttcatgtgccagaaccgccagtgcatccccaagcacttcgtgtgtgaccacgaccgtgactgtgcagatggctctgatgagtcccccgagtgtggtgagccttcggcggtggtgggaggaggccctgccctctgccgggccagggcatcagcctcacaggtccattcctcccccagagtacccgacctgcggccccagtgagttccgctgtgccaatgggcgctgtctgagctcccgccagtgggagtgtgatggcgagaatgactgccacgaccagagtgacgaggctcccaagaacccacactgcaccagccaaggtgggccccagacctggctcccctctgccccctccccagactgcctgagaccccgctgacctgccgcctccgcccctccgcagagcacaagtgcaatgcctcgtcacagttcctgtgcagcagtgggcgctgtgtggctgaggcactgctctgcaacggccaggatgactgtggcgacagctcggacgagcgtggctgccacatcaatgagtgtctcagccgcaagctcagtggctgcagccaggactgtgaggacctcaagatcggcttcaaggtatgcccagccctggggaggagcttccacaccccagacgtgccaggaacgcctttctccactgccttattcattcattcatcccctagac

SEQ ID NO: 8489 - DNA, 4037 bp, Homo sapiens; identical to SEQ ID NO: 8488

SEQ ID NO: 8490 - DNA, 1161 bp, Homo sapiens
ggcttccggctgaaggacgacggccggacgtgtgctgatgtggacgagtgcagcaccaccttcccctgcagccagcgctgcatcaacactcatggcagctataagtgtctgtgtgtggagggctatgcaccccgcggcggcgacccccacagctgcaaggctgtgactggtgagatgcgcgcttggagggcatgaggtgacccaggctgtgtgggactgcccgggtggcagagctccagacaggcaggagaccagggccgctagaatgtgccaggagctgaggcaagatcctctgtctgcagacgaggaaccgtttctgatcttcgccaaccggtactacctgcgcaagctcaacctggacgggtccaactacacgttacttaagcaggtaccaaacccaggccctcctccccgctgcccatctcccagacccagcacagcctcccttgcaagtctccccgcttaggtccaaccatccctcccccagatgcaaatgtggcccctgttgccacaaccgacttctgctgtccttcactccccaaatccagggcctgaacaacgccgttgccttggattttgactaccgagagcagatgatctactggacagatgtgaccacccagggcagcatgatccgaaggatgcaccttaacgggagcaatgtgcaggtgaggcgggcggccctcggcgaccaacactggcccgcctcagatgactgttttcagatcgtctctccttcccgccccaccaacccaaattgcttccttctcactccactagtcactatatgactgcttgttctagctgctcactctcctctgggcccagacagcaaggactgggagattcctcttgcccttcccctcgctgccagcctcatgtctccttaatcatcaggaagttccctgtgaggtctggccaagcactgtgaggcttggggcgtggtcccattcacctagagccccctctcctagagcctctgctgacacctacacagtgtcaggcccaggactgggcattttacttccatggttctcccaccagagctgtcagagggagctctaccccattttacacgaggggaggctgagcctcacagaggcttgcaggtcctcccccaggtcacccagagctctccctcccctgccccttcctgcaggt

SEQ ID NO: 8491 - DNA, 1099 bp, Homo sapiens
tgtagaaggacagaatgccctcctcccagtccccagcagtccctgtccccagaccaagaagctggtgtcctgcctgggcctgcctcctctggccctccggcctgcccacactcaccccttctccctccccaggaccatgtactggtcagactggggcaaccaccccaagattgagacggcagcgatggatgggacgcttcgggagacactggtgcaggacaacattcagtggcccacaggtttgtggggcagggtgcaggagggacgggcatggagggggcccggctcgcagagcccagctgctgctgaagtcacacaaaagcaagggatgggatggggcttggactggggcagggcagattggccgtggaggcttttcccgaaagaggtgactgtgagtggcgtatgaacagggtggagctgtcccgggcatggaggcagttctttccaccccgagcctgggttggggaggccaagctctcacagtgctctctctctccccaggcctggccgtggattatcacaatgagcggctgtactgggcagacgccaagctttcagtcatcggcagcatccggctcaatggcacggaccccattgtggctgctgacagcaaacgaggtcagagcccggcataagtcgcagtccccagccctgtccccagccttgccatcctccctactgagccaaaggcctcacttcaatgcctcccatcctttgtcactgacccccagcaatgctgcagcgccttccaggcctctccagctggcctccccctgaaccagccctgcaggcctgagacccaccctgaccctctggcctacttgtccattcattggttgggttgcacggaggcagcataggtacattaggaacgtagcaaattgggggagaaggaatagaagtcagtcatgactgaccccagaagtctgggggtgatgggaccttttgccagtagtggccacaggaggaggaaccggtgtggggagagagaatttggtctggatgtgttgagtttgaggtgtctgggaaccacaggtgccagtgtcgtggacagcatggccagggcctgagtgcccctcaggtcccctctgactcc

SEQ ID NO: 8492 - DNA, 1229 bp, Homo sapiens
ggtgagggacggaggtgggggtggggtaacctgggctacaggcccagctcctgagccctacctgaaccctctgtcaccctgcagcccaccaacttcaccaaccccgtgtatgccacactctacatggggggccatggcagtcgccactccctggccagcacggacgagaagcgagaactcctgggccggggccctgaggacgagataggggaccccttggcatagggccctgccccgtcggactgcccccagaaagcctcctgccccctgccagtgaagtccttcagtgagcccctccccagccagcccttccctggccccgccggatgtataaatgtaaaaatgaaggaattacattttatatgtgagcgagcaagccggcaagcgagcacagtattatttctccatcccctccctgcctgctccttggcacccccatgctgccttcagggagacaggcagggagggcttggggctgcacctcctaccctcccaccagaacgcaccccactgggagagctggtggtgcagccttcccctccctgtataagacactttgccaaggctctcccctctcgccccatccctgcttgcccgctcccacagcttcctgagggctaattctgggaagggagagttctttgctgcccctgtctggaagacgtggctctgggtgaggtaggcgggaaaggatggagtgttttagttcttgggggaggccaccccaaaccccagccccaactccaggggcacctatgagatggccatgctcaacccccctcccagacaggccctccctgtctccagggcccccaccgaggttcccagggctggagacttcctctggtaaacattcctccagcctcccctcccctggggacgccaaggaggtgggccacacccaggaagggaaagcgggcagccccgttttggggacgtgaacgttttaataatttttgctgaattcctttacaactaaataacacagatattgttataaataaaattgtaaaaaaaaaaaaaaaaaaaaaggccaaaaaaaaaaaaaagaaagaaaaaaagccgctggtgtctgcctgtgtgtgagagacgctgggagctggggctgcgctttcctgcttcggccaccagagggagacctgccccgtgctggaggcaggctggcgcgtggtttttagtgcccttctcccagggccctccccctctccatcttactgtgcccgggaagc

SEQ ID NO: 8493 - DNA, 2075 bp, Homo sapiens
ctcccactaggtgaacaagatctgtcttgggatttggagcaatttcctaaacaaggaaaggaagggaaacttgacttcctgagatgataagaaggaagaatctatttgagccagcctctgagtgggaagggaactatggaacatatttcagattgatacattattgttaaagaacattagcaaaagccacattttcttcatagcagtagcaccttgtgagagaactgaggtataggttcttagctcagaaacccaggattctgattccctgtcccttctttcctgtatctctgggctaggagaatagaaaggttcatttgtttttctcctagttgccctgatcagagctgggatggtggggaggggaagaaagggctaagagagaaaggccaggcttttgaagacattgtatacagacttagtcagctggacacttctctgctgggctgctgtcaagtccttcctgtcctattcctctcacaaccatgtcctctctcctccccttccagtcctggggcgggtgctggaggtgacagatctccctgagggcatcacccgtactgaggcggacaaactcttcacgcagctcgccatgtctggcgccaagatccagtggctcaaggatgctcaggggctgcctggagggggtgggggggacaacagtgggactgctgagaatggccgccactcggacctcgctgccttgtacaccattgtggctgtgttccccagccccctggctgcccaaaatgcctcccttcgtctcaacaactccgtgagtcgcttcaaacttcgaatggccaaaaagaactatgacctgaggatcctggagcgagccagctcccaataaatggaggaggggaaagggactgtcacagaaggagcaagggcagggtggagggggttgaaggatcctgacagaccatggacagaggcaggaagtaaggaaactgatgttaaactggaacctaagacagtgatgaagatggaaacacagatacctacactggcattggactccttcttgctcccctgccatgggtcctctctttttccctggttgaccccccttgcatcactcttcttcccatcctcttctttttttttttttttttttttttgagacggagtttcgctcttgtcaccccagctggagtgcagtagcacgatcttggctaactgcaacctccagctcctgggttcaggtgattctcctgcctcagcctcccaagtagctggcactacagacacgcgccaccatgcccggctaatttttgtatttttagtagagacggagtttcaccatgttggccaggctggcctcaaactcctgacctcaggtgatccacctgccttggccttccagagtgctgggattacaggcgtgagccactgtgcctggcttccatcctcttctatcatttttttaaatctcttctcctatcataaaattaatttctcattttttggtcaggtagaattgggaaagtcccacactgtcctcctattaccttaacatcccaagcttcctttccttttttggtctttatgaatatatttatatggacagaattaagataaacaaaattgattgccccattctctcacttccccatcttgtcttcctagaccccacagagttaaaacttgggattcccctggcccccccagaacacttgtatattgtttgtttgaggttcgtgccgcagtaacagacacagtatttaattgcacatacagatgtttgctgggtatattcactgtaaattttatttaatctgtttttttgtttgtttgggggttatttggggggaggttggttttgtttttaaatataaaaaaaaaaatctgtcactggacatcagtcactgtttctctgttgccgccctggtatgggtaaagggttggaggccctgggtaggtatagccctacagctgttggaggtgtttgtcgtgggttgggatggctttctctagcatacgcacactattttaacaccattccctctgtctcatcctcttccctgtacacggttctgatagatggctagatctctaatgggaccatggctttg

SEQ ID NO: 8494 - DNA, 2284 bp, Homo sapiens
atgtactttctgggtctggcatagtgaaactatgtggatttatcttctccagaacaaccagaggtcactgccttatctatagccattaccagaaaagcctgcacgtgtctgcagccctggcctgtggcccagacctggacccgtaccatgcctagacatttgagcaatctgacctgggcatttggttatagccagcgttgacagaatggagtagttttctgccaagcataccaaagtacccctcaccaggtgaaggccaggggagcactggcatctggggctcatatcccttccactcaaacttctactggtttgagaagatggagtcagaagccacatcagcagccatctcaggttcctggcaagacgtagcttgagtgaccctgaggcaatgggtggatttatttgctgctttcccactcagggctagttggaaggcaaaaatacagttggaatttgtaaccaactgctttcttcctgcccttcaggagtgtcaccttctggaccaggtgtagtggtcatgcagctgaatgtccctaatggaccccagccccctcagaacccatccatggtccagtggagtcattgtaaatactacagcatggaccagcgggggcagaagcctggagacctgtacagtcctgacagcagcccccaggtgagtgcagcactcagccttgtcttggcaaggagatgaccgtattcttcccggggcgcaatgtttgctattgactgagcagcctcttttacatgtcttttcctgggtactttctggggagaaacacaggaagtagacagcatcctcttttaaggaacctaatatataaggtggcaggtgggatacacacttgaaaatgctcagagaatacttaaatcaatatgccagaaatggatattaaaataacataaatgggccaggcatggtggcgcacaccggtaatcccagcactttgggaggacaaggcgggaggatcacttgaggtcaggagtttgagaccaacgtggtgataccccgtctctactgaaaataaaaaaattagccaggcgtgatggtgggcacctgtaatcccagctactcagaaggctgaggcaggagaattgcttgaacccaggaggtgtaggttgcagtgagccaagattgcaccactgcactccagcctgtctgggtgatagagcaagactccatctcaaaataaataaataaataaataaataaataaataaataaataaataaaatagcataaatgaattaaggactgaggttgcagtttgaaggaagagtctgactttggcagagttcagcaagagaaacttatttcctgagagaggtgaattttaagccaagccataggaatatccagagggtaatgtttgatgtttatgtgacgtgtgctcctcttttccacaggccaacacacaaatgagcagcagccctgtcacatctcctacccagtctccagcaccctctcctgtcaccagcctcagcagtgtctgcacaggactcagtcccctgcctgtcctcacacagttcccccggcctgggggtccagcacagggtagggggttagattagtgctggctgctatggaattcacctttcacatcccattcccaattgcagagattgaaagagtaacaacaggcagaggaccagtgtagatgatccaattctgggagttaactcttcctttaacatccctgtataggccttggacacttgcccctctctagtgctgtccatgcttaactttctttagccttctttacatacttagtacttacaaccaagtaggtaaaaagagctggagaaaataagttcactgaactttctaatgaccaaagagtttaacctaatatcagtaccaagtctgagggctgggaatgtgggattttgtaagaaacggtatggtcttagaaaaggaaccactagatttggtttcagaagttccagtctcaccactaactagctttgtgatgttcaacaagttacttaaactcagaagtagacctcacttcctagtctgtaaaatggggttaatcacacataagatgggaattttatctgctttctgccttagctgtcacaagcagtataaaaatgagaatgtagtttaaaaactttaaagtgctctgaaatgtaatatttatcaataataggtaacacttaatggtacttaatatgtaccaggcattgctataaatgctttacatgtcttatatttgtttaacctttccagcaacattaatgagggaaaaaaatacccaacgttagatcatatttc

SEQ ID NO: 8495 - DNA, 1127 bp, Homo sapiens
caatttaccaatagaaaaactagaaaatactgagaacctgagtatttaacactagaattcagctctaaccccctttccaaagggtttctctcttattgactactacacttgataaggactgtctgactaacttggatttgagatctcactcctactactgtagttgtcctttccctgttgtcctttctaaagctagccaaaccttgtggaaattggggtagtgagatttcccattcttggggtagaggattttccatctctctcaagtctttttttcttaggctgtcctgccctgtggttcatctgaaaaccccaggcagagaggaccttgcattgttggtggtagtagagatagatagagtcccctgcattaaaaacaaaaaacaaaaaatcaggattcctgttccacagtctacacttcggggtcatagatcatcccaggataactgtaagaaataggagttttaaaccaactcctatgtgtgaattaatgcacagtgctttacagtcaccagagtatactttatctgattcagttctctcaacatcctaatttggtcagctggattacatgtaagaaaacaaaagcagagagatttaagtggctagcccaagtttacatggctaatagaagcaaaaatggagctgattcttagtttagtgtcctcttcgctacaccacaccagctctctacagatgtcaccccttcctctcttagtagtgttacatttggagccctaatccagattcactggttagaatgatgctcttattagggctatggaccatcagactacatcaaactgtgcagataatagcttgaaggatctactgagtaggtgcagccctttcctctccagaccttttttttttatttccctgagatggagtttcgctcttgttgcccaggctggagtgcaatggcatgatctcggctcaccgcaacctccgcctcccaggttcaagcaattctcctgcctcagcctcccgagtagctgggattacaggcatgcaccaccacacctggctaattttgtgtttttagtagagacggggtttctccatgttgaggctggtctcaaactcctgacctcaggtgatccacccacctcagcctcccaaagtcc

SEQ ID NO: 8496 - DNA, 1187 bp, Homo sapiens
taatcccagctactcgggaggctgaggcaggagaatcacttgaaccccagtggcagaggttggagtgagccaagatcacgccatgcactccagcttgggcaatacagtgagactccatctcaaaaaacaaacaaaaaaaatttttttaagtattttgcagggaaggggattggggttggggttggttatataattaattcctactctttctgagccttggagatagattctagagagactgatgtttcatgaagtctggccctagcctctcttcacttcactgataggacagatataactatggaggaagagaagttatagatgtataaagtacagaccctgaagatttcattaaaacctgcatgtgactttttggattccttactccagaaattccctgagtgtgagttgtgtaatttaggagagctgtacctaataggtctgcttcctaacaaaacggtctttgtcctcctttcctttcacatttctctccaaatctcagccctgaacagaggttctcagaacatataaaggatgagaagaatacagaatttcaacagaggttcattctcaagagagatgatgccagtatggaccgagatgataaccaggtgaagaatggaaaggggtgggcctatatagagagtttgcagtaagagaaactgggaagggagaagaatttttgtgggatggagaaaactcaaaatatcttagtacggagaaatgtattgagctatacggagttggctttggcttaatgttgagaactgtttatttgttgaactggatgccaccctcttagccctagagagacatggtgctgaggtttgctaggtgatctcatttggcctggaactccttgggtctgccactgacttctaacaccacatcatttggaataaagcaaggttgatccctgcctcagccttgatccaactgttggtttcattcttttttttcctttaatagttagggatttctttgggaaccacaaaaagctactttgtcccacttcaactcttatcctagcttagggctagccttgaactggcaaagttgtgatctaatttacccaattataaaggtgtttctgatccctttctgcaaactccttaatctttttccaactccttccaccaaggtgagtgagttaatttgacatttgatgctgggaacctcagatagat

SEQ ID NO: 8497 - DNA, 1167 bp, Homo sapiens
cgaagctttaggaagaaattgttatatatactcttaggtgtgagcataacagcccaacccattttttttttttttggattgagtatctgggcttccagtcgcttttcatgcaattccattttaataccgctgatttctagagggctgcagaggtcagtttgaaaaactcagtaaactagagcctaggaaaattaagggtttacctatctgtcaatgtgtgtttaggtaacatatgtggaaaagtacctttaaaaatatgctggtttattttctgtctttattttctcttctgttctgtgctttcatttactctgaattctttgtgtgaagtgaaaagagtaataatgtctgcttctcagcttacattaggtattcttatttttctatgatagttcaattatattaatatttattacagccataaatgtttcagaccaacacaatctatttttggggggtggggtgtggtaggaggagaaaaaggaagataatcctagggcaaatggagagaattctagaagaataacctatttagatgtttgccagagacaggagctataagggttaagggaaattccaccacatccttgcatcttgatattgcagcaaatttgtggataatttcttgctagcttttcaggaaacccctgtggtggacaaccctcattaatcgttgctgggagactgctctgacgtcactgggagcagttccctgtctgcaactaggacaggaatagcctttgagggggaagaaaactgctgtgaaattaaaagatgacggttttgtttacttggttttcctttcatttgagggtagataagatagacctaaagtctttcttaaatgtttgtcattaccaagggaaaaattgccaaaagttctttttatttcaactgggagtgccttcttttgaaatcttttattttctaaccatcaaggttttggaagaggtcaaggaaaaagaaaagctattgaaagatgttagagaagtaagatttctgtttctttttatccccttttctccctactttttttgttttttgtttttggaagaaggaaagatcaagaacaacttttataaatggttgtttttagcatcaccccgtttgggataattaaaaatgtgatatatatgttggaaggacactactgtgcctaaaagttac

SEQ ID NO: 8498 - DNA, 1167 bp, Homo sapiens
gccccctagggaaaaccacacttattccgacccttacatatcccccgggaaaccgcccgccttctccctctactggaacgtaaagacctatcctagaagaccccagctctccagacccctaaaaccctcagtccccaggctctacggggtcccctttccgtaatcctgtcccgaaagctagctgcccagtgctgattgtttcggggtcatgggacctgaaagaggattcagagcggggagcaagggcaggcagggtggtctgagccagaggaggggcctcgatccccagctcccgtttgggcggggtgccaacggggatacacaggctggcagtggccagtggtcccgcccagccccggtaggggtctccctgcggctggctcccgctgccccggtggtcctgaggtcagagggtcaagacaaggtctccccggctcctcctgagctccttgcccacagcccttgggactcaggagtccaaattgcatggggtcattctagggccttcactagaccttggacagcccccccccgccccagcccccttccaagtccagaagacactcctttcccctaaagcacaagcatccactggcacatctgtcacaagacaggtcaaaggttcaagcctggctggcccctagtggctctgttgcctcccacacacccgtccccaccccacctggagctccctcctttgcagtccccacctttcagaaacactgacatcttcctaccccacgcgcagacacacacctggggttacctctctacaacgcagacctccagctagccatccctccagcctcttaaacttaaccgcatgaaagtaagatatttctaatatatgggagaggcggagacaaagacccacggttccctgagacagagatacacagactgacagaagaaaaaaagggaagaaaaagaagatacagagaaagacacaagtgaaaaatctggagtttctaatgtctcaccccaggctctcccacccctattttgcctctatgtcccgggtctgggatgagtccctaagaagctgagcatcccctcaggccccctcccccactgctcccaggtggtcccccgcctgcccccccttctcacctctgtctgggcgctgggctcgggatgcgcggtccagggctggagtctgggctgggg

SEQ ID NO: 8499 - DNA, 1229 bp, Homo sapiens
attcttctaagcaaaggttttaaaaactcatttttaaagaatgagttaagggccgggcatggtggctcacacctgtaatcccagcactttgggagaccagaggtgggtggatcacctgaggtcaggagttcaagaccagcctggccaacatggtgaaatcccatctttactaaaaatacaaaaattagccgggcatggcagtgcatgcctgtaatcccagctactccggaggctgaagcaggagaatcgcttgaacccagcaggcggaggttgcagtgagccgattgcgccactgccttccagcctgggcaaaaagagtgagacccgtctcagaaaaaaaggaatgagttaaaatttgctagtactttggattgcagggtgtgagagaagaggaatgaaggatgataccaaggtttttagcttaagcaactagagttgtcatctgagatggggatgaccttggaaggggaaaatcagcaagagtttgcctttgcacatagtcttaggtgcctattagacattgaaaaagaaatggcaagtaggcagtagacagcagagtctgaagttctggaagaggtccagactggaaatgtacatttggaggatgtcagccctgtgggaatggagttaggaaaatgctatgatttgttcccttccctgtagtttagtttttaccctggcagatttgaggcctgctttggatttagagaaagctgagttggccaggactttactattatgtaaccaggactacaaatgtcagcaactaaaaataaagaaagtcaggccctcttctgcccttcgaaatggctacagggaccaagtatgcataccccacaagaccagaagtaaggaaggaccagtaggaggctggaggtaaaagaaaaataagggcccagcacggtagctcatgcctataatcccagcactttgggaagcgatggatcacaaggttaagagatggagaccatcctggccaacatagtgaaaccctatctctgctaaaaacacaaaaattagctgggcgtggtggcacgcgcctgtagtcccagctactcgggaggccgaggcagaagaatcacttgaaccgaggaggcagaggttgcagtgagccgagatcgcaccactgcacttcagcctggcaacagagcaagacttggtctcaaaaaaaaaaaaagaaagaaaaaaagaaaaagaaaagtaagttgcctctcccccttccaaaaatg

SEQ ID NO: 8500 - DNA, 2611 bp, Homo sapiens
atggagggaggccttgcccttcatatgcctaagaattgggctagactttcttggtcccagggagctgaggttctgaccctctggtccctagggactgggcttggaaaggatggttgtagactaagccagcagatccccgagatctttataggtgcttgcctcacattgttaaggatctttcttttgagagggtgctgggctgtgctgctctttagagttgggcagactcctgacagtcccatctctctacttgcgttgcaggtgtgggctaagctggtggccccggctttagactggaccccacaatgtttgcagagatgttcaggtagctgtggtgatacggcagaggactcctcagtctccctcccagctgaggggttccccttgctcctctggggcttcccctgagttttcttgggtctccccacaacctttgccttcctggagtcctctctcaggtacttcgctcagtttaatcctcctagtgcctacatggatgtctgtgttatcaggcacgcgggagctgattacacacaatgaatgggggcaatgagagcagtggagcagacagagctgggggccctgtggccacatctgtccccatcggctggcagcgctgtgtgcgagagggtgctgtgctctacatcaggtacggatcttcacaggtccccaagctctgccactccagttgcccaggttttctttcttccgtttcttctctcagctcagctctctggtacccgattgctctcctctcttccccttccttcctcagcctttttgctttctgtagctctgggcctttgaatccattctccctttttctgtgtcttcccacattccttatcctctgttcttctaggaggatctgtaacttaagcactgtgctttaggagtattgcctgattcgctgccagctaaccccatgtcctctgaccctgtcctctcgcagtccaagtggcacagagctgtcttccttggagcaaacccggagctacctcctcagcgatgggacctgcaagtgcggtctggagtgtccacttaatgtccccaaggtcagagtggtgaggggcgcctgagagtacagagataagctaaaagtcttaatgcaaatcactgactgaggtagcccttctcacaggttccagcccctcagggtccctgtccttgctttccaccttacaggttttcaactttgaccctttggccccggtgaccccgggtggggctggggtggggccagcatcagaggaggacatgaccaagctgtgcaaccaccggcggaaagctgttgctatggcaactctgtaccgcagcatggagaccacctgctcacactcttctcctggtgagtcttctgccactttacagaagaccgaggaaaacctaagggcttggaaggctggtggtgggaggagttccttgagagggagcaaagagaaaggggagtgggtggggagctgcatgttgaaaggagggcacagggaggttgggaacttgtgggagatgggactagagaagacaaaagagtttttggaaggggagccacaggctgacccttcatttttcatttattgcaggagagggagcgagcccccaaatgttccacactgtgtccccagggcccccctctgcccgccctccctgtcgagttcctcctacaactccacttaatgggggtcctggctcccttcccccagaaccaccctcagtttcccaggcctttcccactctagcaggccctggggggcttttccccccaaggcttgctgacccagtcccttctgggggcagtagcagcccccgtttcctcccaaggggcaatgccccctctccagccccacctcctccacctgctatcagcctcaatgctccctcatacaactggggagctgccctcagatccagcctggtgccctctgacctgggctctcctccggcccctcatgcctcctcctcaccaccttcagaccctcctctcttccactgtagtgatgccttaacaccccctcccctgcccccgagcaataatctccccgcccaccctggtcctgcctctcagccaccagtgtcttcagccactatgcacctgcccctggtcctggggcccctgggaggggcccccacggtggaggggcctggggcaccccccttccttgctagcagcctactctctgcagcggccaaggcacagcatcccccactaccccctcccagcactttacagggccgaaggccccgtgcccaggcaccctcagcttcccactcctcatcacttcgtccctctcagcgtcgtccccgcagaccccctactgtatttcgattgctagaagggagaggccctcaaacccctagacggagccgtcctcgggcccctgctcctgtcccccaacccttttctctcccggagccatcccaaccaattctcccttctgtgctgtccctgctgggactccccacccctggcccttcccactctgatggaagctttaaccttttggggtcagatgcacaccttcctcctcccccaaccctctcctcagggagccctccccagcccaggcaccccatccagccctccctgcctgggaccaccagtggcagcctcagc

SEQ ID NO: 8501 - DNA, 1194 bp, Homo sapiens
gtgtgccaggtatgtgagtattgtggagcccttcctcatcctggctggaaagaggcagccaaggcatttaggggaatgttcagagagctctttgagggttttctgggttgggggcagggaggttggcttctttggatgatgggagaaagggcctcccttgagctgaatttctctcctcttttacaggtgcccctgccccaccagctgcctccaaagccccagtagtccccagccctgtgcttcaaagcccatccgaaggactggggatgggggcaggcccggcctgccctctgcctcccctggctggtggagaggctttccctttccccagccctgagcagggcctggcactgagtggagctggcttccctgggatgcttggggccttgcctctccctctgagtctggggcagcctccaccttctccattgctcaaccacagtttatttggtgtgctgactgggggaggaggacaacctccccctgagcccctgctacccccaccaggaggacctggtcctcccctagccccaggagagcctgaagggccttcgcttttggtggcttccttgcttcctccaccaccctcagaccttcttccacctccttcagcacctcccagcaacctccttgcctctttcctgcccctgttggctctgggccccacagctggggatggggagggatctgcagagggagccgggggtccaagtggggagccattttcaggcttgggagacctgtcccccctacttttccccccactttcagccccccctaccctcatagctttaaattctgcgctgctggctgccaccctggatcccccctcggggacacccccccaggtgaggatgggggtgagtaggtgggacagaacaagatgtagaataagagatgggagctgggaatcaaaagctttcagtttcattcctgagctcttccttggggcctttggggaggccttagttcttggctgggggtaggatgactgcaagaattgggtctgtatttaataagcatggcctatctcacttgaggcttcagtcagatagtggatgtgaaagcactataaatctgttgagtattttacacgcgtaagtgttagaatcattcttttttcttagccctgtgtcctgagtgccccccaacctggaccacctacctccagtgtcaccacggcaactactgacc

SEQ ID NO: 8502 - DNA, 1435 bp, Homo sapiens
ctaatgtccaaatagtggcttggttttcaaaagggcagattcttatttgaatatgaataaggatattatgcctttactatccaaatgtagaaagtttcccacccaaacttctgaaattcacctggtgcttgggagctgttcctgatcatctgtgccccttattgcagccctacccggaacagcaatagctcccgccaggacattaccttggaacccagccctacagcccgagtaagtgtgtgtttgggtggatgggtggatgggtagggtgtaagggatgaggcggcaggaggaaaggagggttagagggagtggggagaaaagaagacttcctgatacctagcaattgaccacttctatcaacttcccctctgatattaggcagctgtccctctgcctccccgggcccgccctggccgtcctgccaaaaacaagaggaggaaactggccccatagcagccatacctggagctggatctgaccctgattggggagagctgagtgctgagccttgggagcccctgccagccacctgcacctgtggacagtgggtgggggcactactccccactcagagcacaaatgcaactccttcccctacaatcccatcctgagccattgcagggggcagggaagttcacccccccccaccacccccccgcccccccgaagccatgtcactgaaaaggcctgggggggatggtatatggccctttccccaccaggcgctaaggggaacacccccttccccaggtcttttatttgtttaagttatttttgcacaaatgactcttttatatttaattcgatttcattgcctcccttcttaaagccaacaggctcagtttacaaacctgtgagctactgttggctgctgccctccttcccagtgaaaggtacaaagcaataagcatcatgcatcctccccttacccctccaacacccctctgcctctggctcaggttgctcaaagcacagatcctctcttaccccgtccccaggtttgaaacacatagcctcatttcaaggtgtagccaggttcccccgactttcctctgggatataaaaaagggggtaagggggcaaagagagccctctgggcctctcctcccatacacactacactgccccttctccccccatcaaaacgctcagagacgttgtgatgatgcgactgaggattatgcaacgtggtccaaccggagcggccagcatgaccagctgtccaggggctgcctcctgccttttcttttgtaaagacaagacccttgggagttttaattctgttttgtacttgccctgtggggcctccactgcttttctatgggagacactcttaatttaacagatgagaatattttgaaactctggctctggctctgtactcattttttatttagttctttggtaagaacaggttacaatttaaatccat

SEQ ID NO: 8503 - DNA, 1162 bp, Homo sapiens
tactctaagggtagcttgaaaattggtgctataaacatcccccctctgtggcccacaaattgtgcttccatttcttgtcttctctctcagagaattccttcaggtcctcatccagttaagcaactggacctgacaaagagtaaaacctctctaccactttgtaggtgcagacaaccatgcgtgaaaacctggccacagttgaggggaactttgccagcattgatgaacggatgaagaagctgggaaagtgagcacatttgggagctggagaacaggggttatccctacccctgtgaactctgttaacagcttacatagggtttcccctttactataactctagcatccccatcccatttgacactgggggcaagggttcttcttgcatgtggggtttatacccctcccctgatgaatacagagtggtagctaggggttggttatcatcagaaggtggtctcccctcaggcctgggggataaggacgtgggcccagccacatgccaactcatgtccaatactgctttgcctggtgtggggaaggattgggtcttgtcccccaacacagcttctgtggctgactgtaatactgtacaactgtttctgaccattaaatgctgttgtactctgtgtggcctctgctgtgtttcctggggaggaagcagcactaggatatagatattcattcgtcataacaggcaatctaagccactctatactacaagagatggatttaaattgtaacctgttcttaccaaagaactaaataaaaaatgagtacagagccagagccagagtttcaaaatattctcatctgttaaattaagagtgtctcccatagaaaagcagtggaggccccacagggcaagtacaaaacagaattaaaactcccaagggtcttgtctttacaaaagaaaaggcaggaggcagcccctggacagctggtcatgctggccgctccggttggaccacgttgcataatcctcagtcgcatcatcacaacgtctctgagcgttttgatggggggagaaggggcagtgtagtgtgtatgggaggagaggcccagagggctctctttgcccccttacccccttttttatatcccagaggaaagtcgggggaacctggctacaccttgaaatgaggctatgtgtttcaaacct

SEQ ID NO: 8504 - DNA, 1134 bp, Homo sapiens
gatggggagctctatccttgagggaacctatgccctcccccagcccccactcccatgacaatcctggcgtgtaccttccttttgtgctgccctgcctgcttctcaaggtgagggttgggacacaggaccttgagtactaaggtcctgagtcactctcaatccttgtgccagggtggtggtgtacggggcctaattggaggatagccttcaccttctttggcaatagtgattgccaaggacctgcccgcctctagatttagggtaacatcgttgctatcacttacactcaccgtttactgtcaggtcccaattgtttccgctgtcatccctaccccttgagacatgggaactgacatactgttgactcacggggcaggtggaggagaaaggacagaaccctgacatcacaccccgccttctctgttagcttattcaaatggagtgggggaaggggtgttgttggatgctgggtagtgaggttgggtggtcactgcttctacctgcaggccaggaatgagccagatgtttatgaaactagcgacctacctgaggatgatcaagcggagttcgatgcggtaagaatgtgtgctgccacagactcctccggactctgacctttctcccctagacaggtccttccctttctcgggggagctacagcaataagcgggtatgccaaccccagcctgggtggtatataggttgcagggcttgcaaagaccttgctgggcttgcagccaccaatgagcaatggcaggagggagagtcaagtcagcggaattacagctaacaacatctgtttgcaaagccctgattcttgggccttttaaataaaattgaaatatctcaaaacaggtttggagctagtgacttaggcccctgggttctaacccatggaaatgaatcatgaagcctgggcacttgtaataaactgctaccaagaactagactttgaaatatggagaaatactttttccatatgaatatccagtatccattgggcaaggaattaagaaagtgattccaagattttagagcaaaacaaatttgaggaagaatgtaaatatttcacatcagcggatgtgagactgtggttgcatttttagatccgagaattctgaggatggagtaatt

SEQ ID NO: 8505 - DNA, 1187 bp, Homo sapiens
tccagcctgcgcaacaagagtgaaactccatctcaaaaaaaaaaaaaggaatcatgtaatatgtggcaggggttaggggcaatgtggtgtttgacaagacagtttaggggaacagaggaagggccttccccaatcccagccaagcatctctgttactccatcttcttccctgttccttccttcctccgtggactgagccctggaacgaggtggtgacagccctctccatgtgcagctgctcatacacactcatctcttactgccctggtaggtcagcaagactggagcagagggagccgtgctggacgaggcaaagaatatcaacaagtcactgtcagctctgggcaatgtgatctccgcactggctgagggcactgtgagtgatccttaggtcccctcacccctcaagccacaccccatctcctcccccacctgctaatgccaccatatgatcatgccccaattcatgggttgtctgatcccggggtggcaccactatcctttctgattccctgttgaattttatttgtttatttctgattcctggtctccttcctcccccagaaaagctatgttccatatcgtgacagcaaaatgacaaggattctccaggactctctcgggggaaactgccggacgactatgttcatctgttgctcaccatccagttataatgatgcagagaccaagtccaccctgatgtttgggcagcggtcagtggcagggtccccagagggatccctggtacccagcttcccatcccagcctctgcggctctctctcctcagggtcacccaagtctcatgttgctctcatttctttgttcctcttctcctcacccagggcaaagaccattaagaacactgcctcagtaaatttggagttgactgctgagcagtggaagaagaaatatgagaaggagaaggagaagacaaaggcccagaaggagacgattgcgaagctggaggctgagctgagccggtggcgcaatggttagagagggataggtgggagtgaggggcagtgggaagaggaggaggatgtttgggagccaactctgtttgggtggtgtttctggccaggccaatctcctagaagaggggctgtgtttctggacaggtgcagtagagcagtcatgggggaagggaggggcctgactacctacctcccatactcccaaaaggtag

SEQ ID NO: 8506 - DNA, 1817 bp, Homo sapiens
agtgcagctgaagatcatggactacagccttctgctaggcatccacgacatcattcggggctctgaaccagaggaggaagcgcccgtgcgggaggatgagtcagaggtggatggggactgcagcctgactggacctcctgctcttgtgggctcctatggcacctccccagagggtatcggaggctacatccattcccatcggcccctgggcccaggagagtttgagtccttcattgatgtctatgccatccggagtgctgaaggtgagagaaccgggacaatttaagggtggagaggggatttttcctggaggacagagaccagagtgctgggggagagcctgattagcttttcagaacaaaactgactgcttcctggagaaagggaattggaactaaacctactctgaattgttggtctctctcccaggagccccccagaaggaggtctacttcatgggcctcattgatatccttacacagtatgatgctaagaagaaagcagctcatgcagccaaaactgtcaagcatggggtgagagttcgcaaaagcctttcctttcctgtcttgactattctttgggaatagagtctcttgtgccagagcaatggggtggcaaaagaatggaggtggtctggggtagattgggtgggggtgatggggacgggtgctagggtggcctgacatattgttccgtatctcctctcacaggctggggcagagatctctactgtccatccggagcagtatgctaagcgattcctggattttattaccaacatctttgcctaagagactgcctggttctctctgatgttcaaggtggtggggttctgagacacttgggggaattgtggggatattctagccaccagttctcttcttcctttgctaaattcaggctgcaggctccttccatccagataactccatcctgtcgagtaggctctttctgaccctcagaaatacattgtcctttttcctctttgcccatttttcttccctctcttcctccccatgagaagtctgcttgtagtattagaatgttattgttgactctctcccaagtgccttgatctttgtaatatctcctgttgtttctatgatataggagctaggggaagggggttgtttgccttcttcaggacctgactggacagatggacctggctcaagcaactactctggatgcactttgctgtgtgggatgaactaaaagtgtctgaattttgctgataactttataaaactcactatggcatgcttccctcctggtgggccctaggatggatgacactcaagatactacagatgtgggtgcaggcatgcacacacacgatggaatatggccattcctacacaggtggggtagagagtgggtcagcagcctggcacctcacagaggtgggacctaagaggactcatgattatgcagagaattggattgggtctctgtcatagattgagtaatctcttcccttacctcaattccatctccacccatctctacatctgggcacagcaacccagagatggccaaaagcattcaagcctgggggaagatgtttgactattgctgctcttcaccagaacctcacacctctcctgggactggaacccttcagtgggtgtgtggccagttttggaggctggaatgatgggccagggtgtaggattcattctccatgtaaagtttcctttcatcctgcctagccatccccaaggtttatttccagaagaaaggaatatctctacttggatcaattctggtcatttcaagaggatggaggcctcaagtgtgggaacttcccctactcc

SEQ ID NO: 8507 - DNA, 1224 bp, Homo sapiens
ggcagcctgtggaggcacctgcaagaacaaagtgactgtgtccaagcccgtgtgggacttcctgagcaaagagaccccagcccggctggcccggcttcgggaggagcaccgtgtgtccatcctcatagatggcgagacttctgacatctatgttctccagctttccccacagggtcctcccccggcccctccaaatgggctctacctagcccggaaggctctcaaggggctgctaaaagaggcagagaaagagctgaagaaagctcagaggcagggggagctgatgggctgcctggctctggggggtggaggggagcaccctgagatgcaccgcgcaggcccaccccctctccgagcagccccacttctgcccccaggagctcgggggctcccccctcctcctccccccctgcccccacctcttcctcctcgccttcgggaggaggcagaagagcaggagagcacctgccccatctgtctgggggagatccagaatgccaagacattggagaagtgccggcattcattctgcgagggctgcatcacccgggctctgcaggtgaaaaaggcctgccccatgtgcggccgcttctatgggcagctggtgggcaaccagccccagaatgggcggatgctggtctctaaggacgccaccctcctactgcccagctatgagaagtacggcaccattgtcatccagtacgtcttcccgcccggtgtccagggggtaagaagaccatggcctgcccttaccctttggctttccccaagctctgacctaggaaaaccgggtgagggtgagtgtgcttgttagatgtgagacagtcttgctgtcttccactgtgccctcctactcagtgccctggacctaggaggtccccgtgaggcccagcctttccatccctgtgatcccaaggcacacgtgaaaatcagatatgagctaggaaaaaaaaaagcaaatcagatatgagaggaaggaattgcatattatttccttgatgaacacaaatactgtgctgacatcttggcagaggtaaattctgtggaggtggtggcttaggggaagggaggcacaataggaagggatctgaccaacccaacagagccaggagcatcactctgtaaaaacaggagtagtcaaggcctataggtgtcttcctgctggacaaagagtaatgtgcaattctggctgcagaggggtgaagaagctgcacagaagagtga

SEQ ID NO: 8508 - DNA, 1228 bp, Homo sapiens
tggctcctcccctttgttccatttccactgagggacccaccaacccctcgctcacggagcctcctaactggagagaaccacttccaaactgttcagccatctcagtttctcctacattcaacctggtcctggtgtgcccagcttagcctacaaaaataagcagaactgggctaaattatcttggatttggaggtgtcctcccttaggggaggtggggaggtgtctgagccacctagaatgagggtgagcatggggataatagcaagttcaaacagctaacaaccctcaccctcatttctctttgctcccaggtttgggtacccagaccccacctacctgacccgggtgcaagaggagctgagagcgaagggtatcacagatgactgaaggacatcgcctttgccaaggcccctgctgtctgcctctactaggacccagcagaagcctctttctcctctctgccccctgccccccacaccacacctgtaggggacctgtctgactgggaagggagttccgagagggagggggcaatcccttcccccatcccccactggccaagtgtttcaatgcagtgtgagccactcccttctggcagaggccgacctccaaggctctgttctcccctccccgtgtacatatactcccggtttccctgcccctccattgcccttggctttttctggtatgtgctgtgctccacgaccaagccgagaaaggacctagggtggggaagggagggtctcttgattcctaaccgcccccacatactgctccaccgctgaacttcgggtgccggggaggagaaattgggctgatgtgagctccccgtcacccgccatggagccggctgtgtgtgttcatcagatacagttctcccttaaccttgtcctttctctcctgtgtctcagtctccgtcagtctgtctttctccgctcttctctgacccctgtgaggaacctccttaccctgttctggaatcgctgccagactgtagcttttaatttaataaaaataaagtaaaatatgcaactctttatgccacacccgttcttttccagggactgggtgggggtggggtggggagagggacctgctggaaaggggagaggggatgatggggtgatccctgcgtgcactcccagtccctctgcctcctgaggacctggggaaacgggatgcaccagcgggctctgtagtaacactgagaaaccctgggtcacttcga

SEQ ID NO: 8509 - DNA, 1220 bp, Homo sapiens
acctctaccctctcccaccaggtgccgggagctgaagaggcccagaaggaacgccagcggcagaaagagctggagagcaattaccgccgggtgtggggctctccaggtggggagggcacaggggacctggacgaatttgacttctgagaccaacactacacttgacccttcacggaatccagactcttcctggactggcttgcctcctccccacctccccaccctggaacccctgagggccaaacagcagagtggagctgagctgtggacctctcgggcaactctgtgggtgtgggggccctgggtgaatgctgctgcccctgctggcagccaccttgagacctcaccgggcctgtgatatttgctctcctgaactctcactcaatcctcttcctctcctctgtggcttttcctgttattgtcccctaatgataggatattccctgctgcctacctggagattcagtaggatcttttgagtggaggtgggtagagagagcaaggagggcaggacacttagcaggcactgagcaagcaggcccccacctgcccttagtgatgtttggagtcgttttaccctcttctattgaattgccttgggatttccttctccctttccctgcccaccctgtcccctacaatttgtgcttctgagttgaggagccttcacctctgttgctgaggaaatggtagaatgctgcctatcacctccagcacaatcccagtgaaaaaggtgtgaagcacccaccatgttcttgaacaatcaggtttctaaataaacaactggaccatcaatccatcaaccttttttgtggggtgggggttccagcagggagaaggctcagtgttcttttcagatcatgctctgatcctgttctttgctccccattccccaggtactataaacgggggctggggtatgcaggaagagaccagggtagctaaacaaagcctggcctggcaaggattgaaagaaacacttgcaatgctgtcatcttccttttctcatctgtctgtttctgttccttcccttttgcaccaagtctttccctattgtttccccctttataccctgaaagccaaaatgcacaccatggagctccccccggcggggatcttccttctgctgtggtctctcccatatcatgctccagattccatttgtcatccacacccctacccacctgtcctttcaacattttccaaaaagacctccacct

SEQ ID NO: 8510 - DNA, 1147 bp, Homo sapiens
atgacagggtttcaccatgttggccaggatggtctcgatctcttgacctcatgatccacccacatcagactcccaaagtgctaggattacaggcgtgagccgctgcacctggcatttctttttttttaaaaaaagagacaaggtcttgcttgcccaggctgatctagaactcctgggctcaagcagtcctctcacctcagcatcccaaagtgctggaattgttggcctttattccctatacttcctattttgagccactaagcagtaaccattcaactaagatatctttgaaaatgactgctaccttatatcccttctcaccttaggcctctcttctgtggaaactctgaagccgaccagttgggcaaaatctttgagtaagtgaccaacatgggagaaaaagattttctattctgagtcctctttctgctgaacccaggatggcaactggctctgcccatggggatgggaactggaggaccctcctgaccagagttctcctgtcccccacagcctgattgggctgcctccagaggatgactggcctcgagatgtatccctgccccgtggagcctttccccccagagggccccgcccagtgcagtcggtggtacctgagatggaggagtcgggagcacagctgctgctggtactggagatggctgtgggcacagggaaagaaatagagactggggaaagaaatagagcagtatgcagggccctggccactgtggttaatgaaacttggttggtagatgggctgtagtttttattacagctgcaaatagccacccacagagaaggatatagaagagaacccatcctggctgggcacggtggctcacgcctgtaatcccagcactttgggaggccaaggtgggcgtatcacctgaggtcaggagttcgagaccagcctggccaacatggtgaaacctcgtctctactaaaagtacaaaaataagccgggggtggtggcacacgcctgtaatctcagctacttgggaggctgagataggagaatcacttcaactcaggaggcggaggttgcagtgagctgagatcataccattgcactccagcctgggtgatagagcgagactccgtctcaaaaaaaaaaaaaaagaaaaaagaagaaagctcatcccag

SEQ ID NO: 8511 - DNA, 2657 bp, Homo sapiens
cagcatcacctctggtaccccaactcccaccccctccccaatgcagacaggctgaaagaccggtagtgagactggagttcagccttcagaccggtagtgagacaatccttcagccgggagttgggctctgggtggcctaggttgccatggcaccgcctcgggctccaccctctcttgtccccctcaccgctccccccctgcagcgggggttgtggcagccagtcacgtgcccgccgcgtagccacacctctgctcctcagagcaatgtcaagcggtcacgtgtgatagcaacagatcacgtggctgccatcgcccctccgcccccttacactcttcgccctcctcccagtcgaagcacctcctgtccgcccctcagcgcatgggtggcggtcacgtgcccagaacgtccggcgttcgccccgccctcccagtttccgcgcgcctctttggcagctggtcacatggtgagggtgggggtgagggggcctctctagcttgcggcctgtgtctatggtcgggccctctgcgtccagctgctccggaccgagctcgggtgtatggggccgtaggaaccggctccggggccccgataacgggccgcccccacagcaccccgggctggcgtgaggtaagtgcagtcccttcccaggaatgagaaccagtgcccgcccccctcacagctttccacgcgttcgtttcgcgagctggttatggaagggtcgctcaagggcgggaagtggggcctttgtggtcatgggaaagtataattttagggactgaggtgtaggatcttcgatgcaaggcatgtgtcatgtgtgatctttgtgcggggcgcgattgtcccaaaggaaaaagcgttttctattgcagggcctcacgtggctggaggggttggtattgagtcattgtgttatctctggggccggccccaaggaagactgggagcgggggatgggatgctggtggtgttctttgcgctttttttttgggagtccctttgttgctgcaggctcataccatcctaactctgtaagcgacttttggtgataggagtctgtgattgtagggtctcccttgatctgagaatggctacctctcgatatgagccagtggctgaaattggtgtcggtgcctatgggacagtgtacaaggcccgtgatccccacagtggccactttgtggccctcaagagtgtgagagtccccaatggaggaggaggtggaggaggccttcccatcagcacagttcgtgaggtggctttactgaggcgactggaggcttttgagcatcccaatgttgtccggtgagaaggtggtggagggttgggcgtggggagtaaagggaaaagacagcctataggtggggtgtgatgatctgtagagaagtggggaccctgaggaaataatgagaggccatgttgggttaaaggggattgaaaagtgagcatttactctggtcaggctgatggacgtctgtgccacatcccgaactgaccgggagatcaaggtaaccctggtgtttgagcatgtagaccaggacctaaggacatatctggacaaggcacccccaccaggcttgccagccgaaacgatcaaggtgagtggggttggtaggcattgagaggtggattgggacctttgtagtagaaccttctgggatttcaggtatggtgcctagtttccagtgcatctgtacctcccctttgaaactaggatctgatgcgccagtttctaagaggcctagatttccttcatgccaattgcatcgttcaccgagatctgaagccagagaacattctggtgacaagtggtggaacagtcaagctggctgactttggcctggccagaatctacagctaccagatggcacttacacccgtggtcagtagaaagatggtaccaaaatgggttctggttgggagtaggagagtgattgcccgtagcaattgagaagtcatgtgcttcatgtgttcagtcaagcaagttgtgtttcatggtaacccatggggtccccatccattcttcctattccctttaggttgttacactctggtaccgagctcccgaagttcttctgcagtccacatatgcaacacctgtggacatgtggagtgttggctgtatctttgcagagatgtttcgtcgaaagtatgggacccacataccctggactaccttgaattccccaaatcgcttgttcataaaccacatccataccttgcccattctttttttttgagaccagggcttgctgtgttgcccaggctggattgcaatggcatgatcacagctcactgcagcttcaacctcctgggctcaagtgatcctcccatctcagcttcccaactagctgacactacaggcacgcacctccatgcttggctagtttgttaatatttttatagagatggggtctcagtatattgcccaggctggtcttgaactcttgcactcaagcaatcctcccacccctacctcccaaagtagcataagctactgcatctggccccattcttttacttgcgtactactaacttgcccatagcagaaagctctgaaatgttctggaattaggaacttcatatccctttattctctttattttttatttatttatttatttatttatttatttatttatttatttattgagataag

SEQ ID NO: 8512 - DNA, 1705 bp, Homo sapiens
gctacggcatgtatggcttcatggatgtcgtctgcataggtgagggcacctctctctcctttacctgctctgtatcttcctcttacacacctaactcccctgcccatcccctcagtttcctggctttattttctgccactgtagcctttagtgctatcctggtgccccctcaacccacttccctgcttctccagggccctttgcaactgtatcttctcactctgaagaaatgcttgcttaagtacctctggcctagatctaggccacagttaaccctggatttcttattcctattgctcaggcctcatcatccatgaaggctcctctgtctaccgcatcttcaagcgctggcaggcagtgaaccagcagtggaaggtcctaaattatgacaagaccaaggacataggaggagatgcagggggagggacggcagggaagtcaggccccaggaactcacggacgggccccacctctggggccacgagccgccccccagctgcccagcgcatgcggacgctcttgcctcagcgctgcggttatacaatcttgcacctccttgggcagctgcggccaccagatgcccgttccagctcccattctggccgagaggttgtcatgagggtcactacagtctgaactggactccaggagcagggatcttgagtcaatgcatcagtcagagaagaactctcatggctgctggaggtaccagctggacaaggtgtttggggcatgctgcccccgtcaccgaggatctgtgtgggtagcctcaagctggagacattgtctggcctcactgcccactgggtagagacacctggatgacatttcagtacccgctggcagctcctcccactcatccagagacggccggtgggcaggcggggagagcagctttccttccctggagagaaccgtctttacctcagctcctagggcctccagccccccagctccaccacggtgacttggtgaagggggaccaatgccagaagaaaggggctgtagacccctattccccaccccatggccacagggcatctggcaataagactagtatacattgacctcccgttccctgcatgagggcggggagttccccctgctccatcccccattgcatgggggaagggcataaagaatcatttatatgcacgtggagactcctttctcatctggggcttttctggagggttgggagatgtggggaggtttctctgcacaggttgcaaatcccaaatgcagcagtgggttctgagttgtaggtgtgactcccacttgctggtgaataattcatgttggctgctaggtggcagcactccgaggtatctaaagggtagacctggacctgccacctatgagttgtgtgatatagaaaaaaatctcttagctctggttttcctgtctacttcatagggttggaataaggataaatgagggacaggttggatgccgttgcagagaaaatcagcaatgacataaagagatttctagaatagttgatggtccatttatttcaaatagtagctggtgtaacaaattctaaaatgtgtttttcatctggagttgcacagaatcatggaattttgtgttgagtgacataataggtatggaaatatgaggggaaatagacattgcaaatgtgaagcatggtggttatttgttaagaatgagaactcctctgactctaaatatttgggcctgt

SEQ ID NO: 8513 - DNA, 1151 bp, Homo sapiens
ggaggacctggtgagtaggggacctagaggaggtggaggccctttccagagtggttctgtatttggacttaactcagtgccaggaggatgggataggtgtctaagggccaggggcagtctgaacagtgggcaaggacttattggacccttccttctcccagagtgaagaccccgttgtgggacatctaggcacctcaactgaggaggggaagaaagttctacgtaatggagggaagaatttcccagccatcttccgaagaatacaagatcccgtcctccaggcagtgacctcccaaaccagcctgcctggtcactgactgcttactctaccttagctggacctcgtctcccagggattagagaaaagagcaggagtcctgggtcttcccagttgagactgctggagctgagacacagtactctcttaaagaaggtggggagctgcccagggcagaacccactggtgttcatgactacccctggctcctctcaccttgtccctccactgccaacagaaaacaaagcagctgactgagatggtcaaaggactttggaccataggggatctttggaaggctgtggggtcttgctcttccttagcactcctttctccttgtgagatctctcctcagctggaatgaggaatgtagtccatctaaactgcttgctaggctcaattaccacttctgtttgctttgtggatcctgggataacatgtatatgtgtacacatgcctattctgccatttctcaggaaagggtggagtatgtatcatatgccttctaccatcctcctgtcctctccctgcgtaagacttgacctggggaatctgtgttccctaagtgttgtctctggagagtccttgggaaggtgtgggggtggagaccctctcctttttcacattgaccttcaattccagaacttcagagctagctgactggcacagagcctgatagagttgcagtggggaatgagggagtaaggagcagagaggtaaactgtgggagattcttttattttaattttttttagagacaggccctctctctgttgcctaggctggagtgcagtggtacaatcataactcactgcagccttgacctcccgggctcatgtaatccacctcagcctctcaaggcactacaggcata

SEQ ID NO: 8514 - DNA, 1233 bp, Homo sapiens
ggctcactgcaacctccgcttcctgggttcaagtgattctcctgcctcagcctcctgattagttgggattacaggtgcacaccaccacgcccagctgatttttgtatttttagtagaaacagggtttcatccatgttggccaggctggtcttgaattcctgacctcaggtgatctacccgcttcagcctcccaaagtgctgggattacagacgtgagccactacacccggcctgtttttaagtaccagagtgcctggcacatagttggtgcttcataaaggtattcttcacttcccccactcccgctctcctgccccataccccttttcctctttctacaaaaactgaaaatggtatctcttcatcttactgcatatcctatgtaaatgcaaagggactgtcttccaaactgggcctcttctgtgcatattttggtaccatcacagacatcacaatttgttggtgtgttggttttttgtttttgctttaataggaaaactgggagaaaacatgattcttaaacgagctgcatgggtgaaggtgccatctgggttctacgttggctcttatgtccacggagcaatgcagagtccctcacttcacaagctggtgctggggaagtatggggccctggtcatctgtgagacgtctgaacagaaaacaaaccttgaagacgttggccgccgccttgggcagcatgtggtgggcatggcccccctctctgttggctccctggacgatgagcctgggggagaggcagagactaagatgctgtcccagccgtatttgctggatccctccattaccttggggcagtatgtgcagcctcagggggtgtcggtagtagactttgtgcggtttgaatgtggagaaggtgaagaggcagcagaaactgaataggttccagagacttttggcccaggaggaatatttacttttagctctggacatcattacaaaaaggaatatttcccaaacctcttcagaccgagaatgcatgggtaaaattattaaatagttgtataataaaaataattttttccttgtttgcgtaatactggatttagcttttctgtgcctttcaaaaacaacaggtgggccttattgacgtgatagtgtcgtggagaacaggcatcaacaatactgctgctcccttcaacatagatttattatggtatttctgaaatttctaacttatatgttctgtcttacaccttttatgacatagaactc

SEQ ID NO: 8515 - DNA, 3799 bp, Homo sapiens
ctcctgtcaccctaagagccactgagttgtgtagggatgaagactattgaagactccattgccaaaccatggcctttcctcagtgttgtaaggcctatgccaaggataaaggaagggtatgcctttgggtactccaggcacacacctttctgaaatccttctccagccagctgctgcagacaaaagatcacatttctgggaagatgagaacttgtttccagaccagcatccagtggccatcaggtcttgtggcccaaaggctatgcttgcctccggctgagtgcctgggataggccttttctatgtctccccaaggctggggtgctgagcctgccttcctcaccacctagccatagtctcaaacctgtggggaaggaggttttctccctgcccgggaagaggacagataactgatttccgttcttttgactgtgttttaaaattctctttctaaacacagagtgttgggcctggtttgtttctgacaaagttacagtcctgggcctgtaatgaatgtcggcggcgctggggttgcagggaaaagacaaatcctcaaagcgtggacgtgtgtccccatggcttgtggatcagctaagctcgggatcatttccataagtctgcttttcagggattctctgctggtgctggtgcaaggacttctgttccaaaggctgggaaaaactaagctgtcccagcccctcccatttcttgggcagggctcttttcctgttgtgtcttcccccagggcctgtcctgtaccgagctctgtctgttccagccttcatccttcctggctgttgcttttcctcttaagggcctcagaactcttgctcttcctgggctgagggggaatgagtgttcttgccatttgccagcctaatgcgcatgctttctgcctctggtaacaggagtgagtgagcccctcagacctgcactctgggtgtctcctgctttcaaaggttcttaatagtgaatgctttaaaattaaagtcatcacgaaatggaagttttcccagggtggaaaataagaggaagtgctgctgtaattgggagcacaaggggcctcccaaaaaggagccccacctcagcatcactgccttaatcgtggcctccctggggtgggtggggttctctcctccctccctccctcctcctggggtgggagggcgctcctgttcccatctctgtgttccctggaggcaggtatcacaaagcatttgtgaattgctttaggtgcagggacaccacccactcaggactcttccccatcatcccttccattgccacaccctagatccagcctcaggaactaacaagttttgagaaaagcaggtagtagagcagcagcttcgtgctctcagcggtggctggctggcatttttctctagcgttgtggtgccaccttcccttcttgtcccaaggttataaggccttgtctttctctttggaatcataaagtggaacagagtccccagaactcatgtggccatttccgccagcatcactccccggtgcctatggggtcccggtgtacctaaagggagaaggaccccatgtgctagccagaaatatactgtctcttgaaggaaagcaggagctcagactcttagagccagctgtggcttcggacccaaggcctgacctaggctgctatcctaatattgcaggaggggcctctcttccaagccccaccctaagggttagcccttggccaaatcttttgccgtctaggcccagccaggcttttctgactaaataagcaataagaggctctaagctgactgagttgcaaggaccctttccgccctcccttggatctccatgtttttccagatggcggaagagcatgtgccaccccctttcctaacagacttgtccaagtgcttggcgtgggacccatgaccaaagcccaggatggcttggtgggagtgtccctgctgcatctgcatgaagcccctgctttttaggcctcactcccatcagaaccctgcctgcccacctgcaactcccccccaacaatgccattcccacttgccccagagaagctactcggccaaacctagccagggtctgttcttgtggaccagagccagcctagtcattatttgctgtcgggtttccagtttcaccgtgtgttagggtgagggatgattgtaaaatttgctcctcaaaggaatcaggccagactcaattttggagggcaagacagggaggaggccgcttcatcccagactctcttctagggcttcccaccatcagcccctcccacttgagactggtctttgggaggcaataggccaccatgcctggtcagcaccaattcaagccatgccaggaatctgcctacctgccaggttcagttcttttaaggtgcctcttcagggacacagtgtgtctctctgattgggcttctaaatcaaaagcctgatgttcgtgtccctctcatagggggagctttggacacaggaccagtttggaaaagggtcaggtaagggtttccactctgcacattgtagagggaacactctgtaggcccatgggtcccttactagagaggttgagtgaatttgccttcagttaacatgggaccttctgtttagcttcctcttgcttcccaaagattttaagcattttgtaaatgtataaactcacctctggtaacagtggcccagacgctgctttgtgctaaaagcatgggaaatgtaaaggcagtctttctctgggaaatggatgctattctattctgctgcccctacctgttcctgaggcctcatttagaaagaaaatcccctcagaaggctgtctggcacccagtgtcctagccaggccaagtatatgagaaaggtaagtccattttccccttcaggtcctcagtggattacttaaccactgctgtccctcggtccctttttcctaaacgggtttagttctgtcttttttctccttttttctaaatgctggtaaatatttacattcagccagggaagaggaggccagaggtcgggccagctgccccattcttttaacgttgtagggcctgcccatggagcggaccctcctctttgggcctcgtgagcttttttgcttatcatgttccatttcgtgccgctttcccccttcaagatgccatttggagggtaggggatctgcttcccactgtgactgggctatgggattctgactaccttgcttacagattcatggtttgataaatttgttgtattcaaaaacttgaaatgcaggacgccattaagtgtctgtttatatttttggaatatttgtattacttacaattaattaataaaagtgggtttaaaaaacctttccaggaatgtgagctgccaccaaccttcattggcccttaagtgttcactgggcccatggcaagcaccgcctttcttctcgcaaccccttccatcatgaagcagctgcacccccgggctgagtggggtgttgcacccaccgggaggccagctgcagatgccacacagggcttccgctcaaggttacacaagttctgctgtgatcaaccccattgcagtcaggtgcttagcacgtgtatatgcttgatgtcctattgacttctgggcatgaaccagaagccctaagggaatggattattatttttttttttttttttgaaatggagtcttgctctgttgcccaggctagaggcagtggcatgatctcagctcactgcaacctccacctcccaggttcaagcgattctcctgcctcagtctcctgagtagctgggattacaggcgcctgccagcacgcccggctcatttttgtattt

SEQ ID NO: 8516 - DNA, 1253 bp, Homo sapiens
acttccctgaagttctcctaaatacctccaactccgagaactagcccagtatttgctcacttccttttgcctttcaactccatttgatatatgtttcccacgacgtagtggagacttctggctggagaggctggaaaatataactctgaatttcctacaatctcagctccactttctcccgcgcgtaggcccccggctggagcggtgttattgtcacgtggccacggggacgcccgcagccgagtcggccaatgggcgcgcgtcggcctctacccgcccgccttgctactccgccgcgcggggacttggcgcagtgccgcggggtggaggcgaaaaagtttcttttgcagacaagaaggggcttcggcgagccgacgctgctcaagctgcaactctgttgcagttggcagttcttttcggtttccctcctgctgtttgggggcatgaaagggcttcgccgccgggagtaaaagaaggaattgaccgggcagcgcgagggaggagcgcgcacgcgaccgcgagggcgggcgtgcaccctcggctggaagtttgtgccgggccccgagcgcgcgccggctgggagcttcgggtagagacctaggccgctggaccgcgatgagcgcgccgagcctccgtgcgcgcgccgcggggttggggctgctgctgtgcgcggtgctggggcgcgctggccggtcagacagcggcggtcgcggggaactcgggcagccctctggggtagccgccgagcgcccatgccccactacctgccgctgcctcggggacctgctggactgcagtcgtaagcggctagcgcgtcttcccgagccactcccgtcctgggtcgctcggctgtaagtattcttcccgcggggggagggggcccgggccgctggagattcgagaaaacaggagccggcggggaatggggttcggcgtgcagtcccctttttgccgtatagctccttctggcccaggccgcgatcggcgctccgtgggcgtggaaaaagaactgtccgggcctcagtttccctcccacgtgctttgcgggcggcgcaggtgggctcttggcgcgtcctaactggctgcaggtagaccagggttgggggccagtaacgacgccagagattggggatgaagtcctgcgccctaagctagccaaggggttcaaatgcttgctcctgccaggcccaggggagataagcggcaacctgcacacatcaggagtttgcagttctcgctgagttatgagtctg

SEQ ID NO: 8517 - DNA, 1313 bp, Homo sapiens
gtactcttctaccagagacaagacactttcagtggaactggcttttttcctcttgaccgagaaactaaaggtgcttcagctgccactggcatcccattagaaagtgatgaagatagcaatgataatgacaatgatatagaaaatgaaaactgtatgcacactaactaatgaaagtcctagaagccataaaagagacactttcctgctggtggtatctatggaaatgatgaagttacccaccacattaaaacaaaagtctgagatggggagtttcagataaccgaatgtaaatcctttatcagattttaacttgtgcagtacttgaagtgaaacacaatgaaaactttaacagaaattgtctcttaatacatttacagtcttgtatttacaagctaaatatatataggaaatcacaaataaatcccttttaagtttgctgctgttttgattaattatgtttcctttaattttttggatgtgagttgatgacaaatgttaaatttgtggatgttggtcatttattttgctctaataatactgcaagaaaactatggctgaacttagtttttggataatctagttcatgtgcattaggctgccgtatatactactatgatatttagctgcagtatcaatgtggcataaatactgcggcagcattcttcgaaaaccgcattttcaaatttatccccgtaatcaatgtgggcctattaaaaaaccaaatcatgatacaagaaacaaccttggaaaagttatttccctttgtaatacctttaaaaatccagagtattatattcattttactgccactgtggaaacaggttctagatttcatactccatctaaagtcatttttcagttacatgtaagtattatttactgctattgggatctattcttcagatattcaaaaacattttttgctttaaaatgcatatctttaattgggtgttggtccaaaattaaaatttttgctgtctgtttttctctaccccattttgtggtaatttggcaacttgagctctcccaattattgtaatataaggacagacataatagtattctgtacccatagtaataattgcatcaagcttagatgagaaatttttttcatatactggcctttaaatcattaatggacaattggctataaaggtaggtctgttaactttctttgtgtgttcctgatggaattcaccatagccttacagcttttctcagaaggtaacttgttataagagaaatggcatttgcatgttccagagtcagaacctgtacagtatataaagcataaacaccttgaatttgatttt

SEQ ID NO: 8518 - DNA, 1234 bp, Homo sapiens
acagtactggattctctacattttaaccattggcataattatcattaatataagatatgtttggaaacagtaattgctcgtgtatgaaattacaaacttattaaacaatattaaggaattgttaacattgttagggtgataatgatattatagtttttttttatagttaacagttgttatatttaggtggtagatacatcaatatgttcaagttccttatactattcttggttttttgtatgttcttgacattttttataataaaaaagtaaaaaaaaaaaagttagctcaagattgtttccccactttctcctgaaataatgtagagacactgacagaagaagagatgttttcattgaatctattctactaggaaagagatttttgaagtaatgtttttaaagttttactctgaaaggtaaaacagccacatgttgcatatttatgtgtttaaaacaaaaccttggatgaactaatatttttctactttgctttttagtggaatatttcagattattttttccaaagaggggaaactattgaaaaagaactaaataaggaagaggcagcacagcaaaagcaggcagaagagaaaggagttgttttaaatcggccattccaccctgcaccgccatttgattgcttgtggttatgtctttatgcaaaattgggtgaactatgtgtggatccccgtcctgctgtcaggaagagtgcagggcaaactctgttttctacaattggtgcgcatggaactttattacagcattcaacctggcacactgttatctggaaggtattgtaaaatagattggactatcagcttttaatgagtcatgcttatatattaatactttttcagttaaacttatttcttttaatttttaaagaatttccatgcatttgtgtatttgacaaaacaggaaataactgtgtcatattgtaaattgtacctcataaagagcaaattaaatattaacagccttatctctgtttctgtcttcatctcttattattatatctctcgtgatttctgcctttgcctttctgtctcctttttttcccccagttttcccaaatggtaaaaaccaggagttactaaacaacaaagggtaatcaatcccttaccatagagtagaaagcttttggggtttttgtttgttttacttttgaggtctacttatagatatgtaatttaaatataatcaaaagagaattttattaacagatgaatatc

SEQ ID NO: 8519 - DNA, 1222 bp, Homo sapiens
ttcaacctcgttgatttaattttctgttatcctttggcagaagttctgggaaatggtataaatatgtataagtacatacatattttggggtttttaattttttttatttcagtagcttttggggtacaagtggttattggttacatggatgaattgtatagtggtgaagtctgagattttagtgcactcgtcacctacctgagttttgtttttaagattgaaacattatttgatatatccatcatcctcctcttggtgccctttgttcctatatctgaaaaatttttttactgaatttctaggttgtgataattttaattcccattgttagtaccttagtacctagtcatatattttccagttctgtaggattttaagcagaaaaattaagcaaatatgctttcaagtgtctaatatgaagagaaaatttgatcgcttttatgataatagtttttttttctcttcctaatataggagatttttcaagagcttgggatgttcttcttgaccatatacagtcagcagcactcagcaaaaacaatgaagtatctctggctgctctgaaaagcttccaggaaattttacagattgtgtcccctgtcagagactcagataagcctgagacaccacctgtagttaatgtacctgtgcctgttcttatagggcccatatcaggcatgagcaggccatttgtaagaacagattccattggagaaaaactaggaagatatagtagctctgagccacccattgttactgatgagcttgaagatttgaatctatggtgggctgcgtggaatacctggtatagaattggatctgaaagtactaagcctcctattacttttgataaactaacttttattcctagccagccttttcttacagctttaattcagatatttccagctctctaccaacacataaaaactggtttcaatatggatgacttgcaaaagttgggagtcatattgcacagtgctatttcagtcccaataagttcagatgcatccccttttattcttccatcttataccgaagcagttttgacaagtttacaggaagctgtacttacagctttagatgttctccaaaaggtaatataattttagtggctaagtaatactgcatatagttctctgaaattttttttattttgctatatatttgcggggataaattttagatcatcaagattgttttatatgtatactttgggata

SEQ ID NO: 8520 - DNA, 1311 bp, Homo sapiens
tctattttcagtaagttagtgcttctgggacacttggagaaagctgtgagagtcattgtctacgcaaagaacaacgaagctgatcctaaaagtgatccaatctaagaaaatggtaaaacgagctctggccacagcacagaattttatgtgaggaactcagatttttgaagacttaacaattgcagagaaaggttgcagcctgcacaccatagcccacctctctgagcagactttggttttgtgtggtgacgtggcacatgtttgtacactgggatttttcaaaggacgctacgcgagcagactgacttgcctcttctgtgagcactgtggcttttgtcagatggagtgccggtctgcagaggactgctctttcgaatccacagtgttatctgtgtaaatagctttaatttttcttctgtgtcttaggtgaagttttgttcatgtagcaaccaggtagacagtgaccaaataaggctgtaaatgtgctgtagttttctactgtgatgtacttgaaggagaacctgtgtcctctacttttctgatctcccacaagtattttgtgtttgtttcctgagtcctgaggttattattttactcctgttttgcccccagttttctttgttttttttctggagacccagggaggcccatggtggagatcatttgtaaggaatggatcatggtctgggtttccaaaactaccctagtacagtgaatgagagaaatctgcctggaaattgtttcagaaccatgtacctttatgctttgtgattgtgaaacattgacttttttgtaaccccaaaatgaaaactgtttagtaaaggggatctattttgtgtgttttgaaacttaggtgcaatgtcccctggaaaaagctaaagaaatgtatatgttcaatgacattttaaaataaaatattatatatatgtatatacgacatattcagcaaaacttttttctgtcttttctatgaattcactgtgaagtttctttgtatcaggtaatggtctgtctggtttctttatatcaggtaatgataatgatacaaagagtatcatggctcaatgtgagattatcaactgtgaacacagactcgaaatccagagggaatggatgccaacactataagccttcacaggaataacagtaaaggctaatacatttcaactatgcctttggataccattattaccatggataccattagtaaacacatgaataattcagagaaaagaattactcccaagaggtattcttaagtgagagggctagagcctaatcttgctgaagacagtaagaatccagacttcc

SEQ ID NO: 8521 - DNA, 1102 bp, Homo sapiens
tactttgctctgccaagcttctggggccttgggcagatcctggcctaggtctctcgtaaatacttcctctgaccattgctgcgaacctctaagtgtggtggcggcagggggtaggctttgctctgcttttagagctgctggaaaagacagatcccattagaaagattccagagatggcagtgttttattttgtcccttagagcccctaactttttataattctaacttgatgatacatcacgataattttccctcctctgtttcccttaaaactatgagcaaataggggattttccactgggagcagagtggagttagcccattttctcctttcagcactttctacttttattgaggcaaagagaaatttccattctctgtgctctcgagcacagtagccactagccacatgtggccatttaaattagctaaattacataaaattaaaaatttatttcccgagttgccctagccacatctcagttgctcagtagccacatgtggctagtggctgctgaattggaccatgcagatatagaacgtctccatcatcacagaaagttctacggcatggtgctgtggtctacatagtagaagagcgtgggtatagttgggaatggtgtggtgcaaggagctctctgtaactcagcatcccaacagcaaagagttttttgttttggtttgttttttttgttttttttaaagacagggtctcactctgtcactcaggctggaaggcggtcacatgaccatggctcactgcagcctcaacctcccgggctcaagtgatctcccacctcagcctcttgagtagctggtactacaggtgtgtgacaccacaccctgctaatttttgtgtattttgtagagacagggttttgccatgttgcctagactggtctcaaactcctgggctcaagcagtcctcctgcctcagcctcccaaagcgctgggattacagggatgagccaccaaacctggccccaaagagttttttaaaaggtgggatgggtactgataactgtggacagggaatggtgtagccacaccggcctctggtgcctctgatgccagactctgagtcagcagaggggtgggcttc

SEQ ID NO: 8522 - DNA, 1450 bp, Homo sapiens
gaggagttcaggtgtaaattttgttactataaatcacttgctcatctaacaggaattgtttacatgtagctgatggtctaatttttaaatgttcagagtcctaaaattatgaacagattatatgtcaaaaattaatttgtaatatacaaggtatattatggttgaactagtttttgtggtcttaggctggaaattaaacacctagtatatagaagcaataatatttcaagtatacatattcatttatagcattatttctatgggaaaatgcacccagaattctaactaggatcttcaagaacaactctccccaggtcagtgcatggagcagaaagagaagggaaagggatagaatgtcttcatgactttaatcctagtatttgaaaaaaaaaaatcaaaccttgcacctacaaatttctgtcttgatccagaaagtcattagcataaaaaagataatagtggccttctcacctaacgccaccaacatggtgttcaggcgcttcgtggaggttggccgggtggcctatgtctcctttggacctcatgccggaaaattggtcgcgattgtagatgttattgatcagaacagggctttggtcgatggaccttgcactcaagtgaggagacaggccatgcctttcaagtgcatgcagctcactgatttcatcctcaagtttccgcacagtgcccgccaaaagtatgtccaacaagcctggcagaaggcagacatcaatacaaaatgggcagccacacgatgggccaagaagattgaagccagagaaaggaaagccaagatgacagattttgatcgttttaaagttatgaaggcaaagaaaacgaggaacagaataatcaagaatgaagttaagaagcttcaaaaggcagctctcctgaaagcttctcccaaaaaagcacctggtactaagggtactgctgctgctgctgctgctgctgctgctgctaaagttccagcaaaaaagatgacggccgcgagtaaaaaggcttcagcccagaaggttcctgcccagaaagccacaggccagaaagcagcacctgctccaaaagctcagaagggtcaaaaagctccagcccagaaagcacctgctccaaaggcatctggcaagaaagcataagtggcaatcataaaaagtaataaaggttctttttgacctgttggcaaatgtaaaaaaaaaaaaaaagataatagtgagtattttattatttcaggaaggtaaaacagatcttttaaaatggctcgttgtatcattatgttctcatttagttattttcagtatttactttttctttgtaaaataaacgtgaaagtggcttgttaaattttttttagagaaatctgagtaatcttcccagaggctcctgaagaagatttaacttttttctcatctgattttcatataatgtattcaattctacaagttctattgctaaa

SEQ ID NO: 8523 - DNA, 1168 bp, Homo sapiens
cccgccagatctacgtggcttgctccttcatccccaactctgtgctcagatgctgccgcagtaagacagtccctcatcacttatttaagattgcaaccctacccccttagaaactcctgctctacttactcctttgctcttttctcacagtattctaccccatctaaataatttactgacttcacttggtcactatccatctccaccactagaactagaatatatgctccatgagggcaaggtagggaagagaggacctagcactcccaaagtatcggttgaattattattatccattcagaagtgttacggtgactcctagattttataaatgtacaactgtaaaatgttccaattcttcaacatttttaagaaatctgtttgggccaggattttggatatctcttatgcctatcatctctataaagtttcaccatttcctgaaactgattttattaaaagataaggtatttttgttcacaaactatatacttagtaaagtgaaaactacagttgtttttctgattttctagctggcagcctcaggaaacaaatgaaagtcttaagaattaccaagatgccttgcttcagagtgatctcacattgtgcccggtcggagtaaacacagaatgctatcgaatctatgaggcttgctcctatggctccattcctgtggtggaagacgtgatgacagctggcaactgtgggaatacatctgtgcaccacggtgctcctctgcagttactcaagtccatgggtgctccctttatctttatcaagaactggaaggaactccctgctgttttagaaaaagagaaaactataattttacaagaaaaaattgaaagaagaaaaatgttacttcagtggtatcagcacttcaagacagagcttaaaatgaaatttactaatattttagaaagctcatttttaatgaataataaaagttaattatctttttgagctaacatgtgatttttaaaatcattttgactactgggtgtataaatgtgtttgtgtgtgtatgtatttatagatgttctttaaggtacccttgaaaactctacattatgtatgccacataatgacatttcagtcagtggtagactacatatatgatagtggtcccataagattataatggagctgaaaaatttctatcgcctag

SEQ ID NO: 8524 - DNA, 1578 bp, Homo sapiens
tgatttttgtccctctgcgcttgcgcttgcgcttgcccccgctcaccttcccccagctccggcccctagccccagcattcgctctcctcctctcacggaaaggtcgcggcctgtggccctgcgagcagcagtgccgagatgaaccccagtgcccccagctacgtcctcgctgtacgtgggggacctccatcccgacgtgaccgaggcgatgctctacaagaagttcagcgcggccgggctcatcctctccatccgggtctgcagggacatgatcacccacggctccttgggctacgcgtatgtgaacttccagtagcccgcggacgcggagcatgctgtgaacactatgaattttgatgttataaagggcaagccagtacgcatcgtgtagtctcagcgtgatccatcacttcgcaaaagtggagtgggctacatattcattaaaaatctggacaaatccattgataataaagcactgtatgatacatttttctgcttttggtaacatcctttcatgtaaggtgggctgtgatgaaaatgattccaagggctatggatctgtacactttgagacacaggaagcagctgaaagagctatggaaaaaatgaatggaatgctcctaaatgatcgcaaagtatttgttggacgatttatgtctcataaagaacgagaagctgaacttggagctacgtgaaagagttcaccaatgtttacatcaagaatttcggagaagacatggatgatgagcgccttaagaatctctttggcaagtttgggcctgccttaaatgtgaaagtaatgactggtgaaagtggaaaatctaaaggatttggatttgtaagctttgaaaggcttgaagatgcacagaaagctgtggatgaaatgaaaggagctcaatggaaaacaaatttatgtaggtagagctcagaaaaaagtggaacggcagacagaacttaagcgcaaatttgaacaggtgaggcaagataggatcaccagataccaccgtgttaatctttatgtgaaaaatcttgatgatggcattaataattaacgtctccggaaagagttttctccatttggtacaatcaccagtgcaaaggttatgatggagggtggtcgctgcaaagggtttggttttgtatgtttctcctcaccagaagaagccactaaagcagttacagaaatgaatggtagaattgtggccacaaagccattgtatgttgctttagctcagcgcaaagaagagtgccaggctcacctcactaaccagtatatgcaaagaatggcaagtgtacgagctgtgcccaatcttgaaatcaacccctaccagccagcacctccttcaggttacttcatggcagctatcccacagactcagaacggtgctgcatactatcctcctagccaaattgctcaactaagaccaagtcctcgctggactgctgagggtgccagaccccatccattccaaaataggcccagtgctatccgcccggctgctcctagaccaccatttagtactatgagaccagcttcttcacaggttccatgagttatgtcaacacagcgtgttgcta

SEQ ID NO: 8525 - DNA, 1482 bp, Homo sapiens
tccctccttcttggaagagtaatagggatgagatattaaatggcctttttagaattaagaactatatgttttctgtctcataaattagcaaatgaatatggagttagtagatttatgattctgatctacaaattaacatttttgatgccaaaattagggtcttggtaagaaatttctatcagttattgaaactgaaagtgagtcagattggtagcatgacgtaaggttttaacagttcagaagatcctcatggcagctttaatagccatgggttcttttggggtaatgtacacacctaactgcatttgttttgacttctttaatgtttgaatgtttcactctgttgtaaagtcagcataagccatcatgtgggctttcttcattcttcagcatattatccgcttcgctttctgtttatcacttttctgctgaaatgtacatgtttggctctactccttggttatttttaggcttaaaagcatgcagtcggtttttcagccacttttagatactcatgcaacatagcctacttttataaaatcaaaatgaaggtcttcatacgctgtacttgctaaaaatcaactgtgcgcttgaaagacctcttcatagttgagtaatcacctcagtacttaagcacttctgaacttgggtttcatgcctgccccccacaaattatgtttagaagcagcactgcatcttagcacatgctgccttatttctttccttcggcaggtgttcatgggaagtaggtggatcagtgaaggcataatgggctgtggagaccttcacttctagattattgattcaaaataaaaagaagccacaaagagtaattgagttgttactggtttgatggttcctttgaagcttgtgtgaaatgtaatggtcatattcgtcttttttcccatgattgtgtggagccactgttttactgggtgtccacagcaggtatgccagcaacatcagcagagaccagagagcccctcagagtccatgtaggaagcctgcccacctagggtggactgcctggcagaagaaagaagaaccggccaggcacggtggcacacgcctgtaatcccagtactttgggaggctgagacgcgtggatcacttgaggtcaggagttcgagatcagcgtggccaacatggtgaaaccccatctctactaaaaatacaaaagttggccggttgtagtgacgggtgactgtaatcccagttactctggaggctgaggcaggagaattgcttgaacctgggaggtggaggatgcagtgagctgagactgtgcagctgcactccagcctgggtgaaagagcgagacctgtctcaaaaaaaaaaaaagaagaagaagaaccaagaatctactggcctattttttattttctgggaagaacatgtgtttttcctttttttttttttttttttttgagacagggtcttgtctgttttccaggctggagtacagtggcacaatcacaactc

SEQ ID NO: 8526 - DNA, 1157 bp, Homo sapiens
gacagggtttcaccacgttgaccaggctggtcacgaactcctgacctcaagtgatctgccggcctcggcctcccaaagtgctaggattacaggcatgaaccaccacatgcagcctagcctcataacaatcttatataaataagatctttacaaaagaaaacaagttagaaagctaactttaataattatcttacatgatcatttatagagtcttgtcagggctggaattagaaccgtgatctgttgacctctaatttagttttcttttcattctatggtcctgggagaaaatttgtctttataagtatttgacatatgagttggtgtgatagattacatttcctgttcctaatgcactttttctcattaaatgaagggaactcaaaaaataaaagctttaataagactgaatttcattctaggagaatggccaccagtccttactgagcagcgatgatcaactttttatttatgagacagctggagtgctgattgttaatagtgaatatccggcagaaaggaaacaagccttaatgaggaatctgttgactccactaatggagaagtttaaaattctgttagaaaagttgatgctggcacaagatgaagaaaggcaagcctctctagcagactgtcttaaccatgctgttggatttgcaaggtaagtgtgatcacagttaaaattataaagtgcatgtatctacacagacagaaccacttgtttggtgggcacacacatttgtgtttccacagttggataatccagagaattgtctaaatctttgtcctccaaatccagtcagttagatttggttgaagaaggggataggttacataccatttacatttttgccttgacaactgtaaatctttaactcctctgacttctctgatataaatgggttgtgtgtttaagaggatcagctgaagtgttaatataccaaatatatattgggacgggacatctttggttagtcttggttaccttaaagagaagagcgtgaggtttctcttcagttgtattgtgtcctgaagatcacccaagcagctgttttttccgcctctagccatactttttgttgacaaacaacagcatgaaagttgtaaagattgctaatttagaagttaaattgttctataatatatttaagaacaag

SEQ ID NO: 8527 - DNA, 1236 bp, Homo sapiens
tttagaacacagtatacctatagtatacctatgtgtttattatgtttgtaaatggtaactgacatttaattattagaagtacttacccctgccttcctccatttttattcatggctacttgagaaagcaaaaggaaaaaataatagttatcagtagtgtcactggaaagaagagaggagggacaaaactgagcagcagaattcgtatagacatttacgtttaaattctaaaagcccaattgagatgttcagggagggtttgttttgccctttggcctcatgaatgggtttcatgaatgggcttcagtggcttataaactctgtaaaattctattctaaattttgtacatttattttgttccggttaattccagaagacatttcaaacatttttcttacaccatataataaaaatacttaactaaattgacagttataaaaataaatcagtgaaatgtaccttatactttaataaaaaatgttttcagaaatagataagtgaaagctgagtgtttctttgataggttcccctgtactataggagtgataattgcagctattgcaatagtagtaattgttaaatggatactaatgaatagcatagcatagtgggtaagagtttatatagcacaggctctagaatcagattaagtaggttcaaataccagttctgccagtaactggttttagaaccttgggcaagttaaagaatgtctcccagcctcagtttccctatttgtaaaatggaaataatggtagctacctcaaacctcattacgaattcaatgagttaaacttgaaaagacttattacagtagctggcacataaagacttgatagtagtttatatggatgctatctcatattagcatatatggaattaatagtgtatcactatactttttttttcttttttttttttgaatagagatcagtctatcacccaggctggagtgcagtggtgacatcatagctcactgtaacttctcccatactctaccaatcctcctgcctcagcatccagactagctgtgattacaggtgtgcaccaccacacccagctacatttttttttggtagagacagggtctcactatgttacccagtctggtctcaaactcccggcctcaagcaatcctcccactggcctcacaatgttgggattacaggtataagccactgcacacggccttactatgctatcaattccatatatggaaaggtgttttccctttca

SEQ ID NO: 8528 - DNA, 1112 bp, Homo sapiens
aaaagtgctgagattacaggcatgagccactgctcccagctgaaacttagattttttttgtcatattattgtattttattatagtatgtatagtgtatactaacttacagggaaaaaatgtaaacaaaatgaaggtcatggggaaaatggcatcttgctttaatcttcaacttaaagttactcttaataatccatttataccattatgtcaaattttagtcatccctgcagaattttagacgaatgaaaacagacaaggtaacaccaaagagttaagcacagaaagtgatattgattaaaaagttgaaagtaaaaatctacattggctagaactgaacattcagatccgtctctccagaggaaaatctaacttgaatcataatggttcatattttgacttgttcataccatatcagttagcaacttatgacttgaaaatactttgaaacttaagatatttatattgaactgtttatacacttcatgtcagtaacagataatgggtgatcttacttgagactaaaaacagctaacatttgtttcttagctgtgttactcccttaaaacatagttgcaaattttttttttctcttagtataacaagaggattgcctgatccagccaagatgcagagcacttctaatcatctgtggcttttatctgatattttaggccaaggagctactgcaaatgtctttcgtggaagacataaggttagtacagagaaaactttgaagaccttttatcactgtatgtattttgttctaagatgcatgttgacactaaagtgtgtgacttggtgattttgatccctttgtctgaagaaattgttttaatgattttcgtggtcatttaaggcatagctgtgtcaggcagtgaacatatctacccagtggtggcacaggttaagtgttagtgagtggaggaaaacagattggttgaaaatggactgggaaagattagtgttgtgccttttgatgctttccccagcccagctccctaatggtagagtgatttcactgacagaagttcagtgtaatgagttgaggtagcatttgatgtggcattttggttggtagggaggcagatgtgtattgggaggggaactcaca

SEQ ID NO: 8529 - DNA, 1204 bp, Homo sapiens
ttaccaaccaaagagatgcatgtgcaatagaagccttccttaaaaacaggctaaataacctcattttatgcagcagtttaatctgagaacagagggaaaggtgtgcagtggttccagaggggccttatattctatttttagtctagatattttttgtttataaattcccaaggaattgttaacactttggtgacacctaatggattctttttgaaattccaaggtgcttcagttctttgcccaagtgaactgtgccttttattgcatttctgttcgtctcttggtggctcttctgactttttggagaatacccatcttgttggaggcagacttaagttgttatgctgtgccacacaatttactgagacaatcatatcttcctaagcatttaaggaaagttgaaaaaaatagaattagctataaaatatgtatggcacatcttgtttaattttgcatgtaacttctcttttgtacattgatgaggttttagtgacattgtcatccaacactttacctttattgttcagggaatgccttcgtgattttttgtactggttttattattcagactatggcctggatttgagtatattgttattaccacctggttttttaattattcatcccagtaaacttatattttgtgaagcatttgtttctcagattaagacactgttagaacctaaagtagtagctgatgggtatctgtgaattttttttttttttttttttttacttgaagtagattgtctgaataggcatcctcatctatatttacccaaaacctcgcttactgtcatgtgcactacaaattgcaatttggaaacctactgtattgaaattctgtcagtttatggttcttgaagactgatgtcctttcccaaacactggttactgcagcagcatttttaatgtgtaagtgaagaaaaaaggccactaaggccaaagattttttaagaatcattgtacaaatcattatgttaaactatctaagctttgctgtaatactgttttctcttcaatatgtgatggtacaggaaggatgttaaatgaaggggtggtattgcaggagagcattttaaatggcagaagtaaaaagttataatatttataattttgatgggtttaagtttatttttgtagggaagatttttctcccctaaaatagtttctagaatggcaaaattgtttccattattaaaaa

SEQ ID NO: 8530 - DNA, 2205 bp, Homo sapiens
gagctgtggtttgtaacttgttcaactcaggcaataagcgattttagctttatttaaagtcttctgtccagctttaagcactttgtaagacatggctgaaagtagcttttctatcagaattgcagatagtcatgttgggctaacagtcaattggatatattcctttacctcacatgaccccagcaactgtggtggtatctagaggtgaaacaggcaagtgaaatggacacctctgctgtgaatgttttagagaaggaaattcaaaaaatgttgtaactgaaagcactgttgaatatgggtatcggctttctttttcactttgactcttaacattatcagtcaacttccacattaatgaaagttgaccatagttatttccaaataaaaagaaaccaactcttaccaggtcttggactgtgatgtcatattattcagttttatgcttgttcctgagcagaactcataagagtgacatagtcagctgctgacggcacctcagccacgccactcttactcagttcagtgggtgtgcttgcgtggtaggatgtggtgcagccctctctacgctcttctatttttggtatatttcctatctaaccttcaaatagcttccaattctttttttcttggactggcttcattctgaatttgtgctaaaataatctttcataaagagacctcagtttatagcgtaacagactacacaatgcactgatgttttcataatgtttaagggacccactgcaagaagcttgctgcctccttttaattgtattcatttagattttgattttccatgttaagaaggtgaggtccatgttggtgcccttcagagtagagaaccatgtaaacattaggaatgaacagaggccttaggaatgaatagagagtttgccttatacaatttcctgttacaaagctctccctctcatgcaaagtagggaacaccttttgagcatctttgaatttgacaaatggtgctgttgcaaacactttttttttgagatgaagtctcgcggttgtcacccgggctggagtgcagtggcgtgatctcggctcactgcaacttccacctcctgggttccagcagttctcctgcctcagcctcccaagtagctgagattacaggcgcctgccaccccacctggctgatttttgtaattttagtagagacggggtttcaccatgttggccaggctgattaactcctgacctcaggtgatccacctttctcggcctcccaaagtgctgggattacgggtgtgagccaccgtgcccggcctgcaaacacattttaattgacaacactagggctgttgtacaaaatagtaatgatagccatggaagttttaccttattctgtgagaagtgttcttaaacttattaagtgtctaaactaaggtttagtgcttttttaaaggaaagttgtcccaggattcatcctaaagaaagcaaaagttaattcaactgatccaccaatggaattagatgggtagagttgggttcttgagttttaccaccacttagttcccactgaattttgtaacttcctgtgtttgcatcctctgttcctattctgcccttgctctgtgtcatctcagtcatttgacttagaaagtgcccttcaaaaggaccctgttcactgctgcacttttcaatgaattaaaatttatttctgttctagtgggaatgtgtcctttgttttagttcacaagtagtaattttgacaagatgctttcttctgatgcagtttgttttaatcactcacctagtactggaaatgggctttctagtcagatcctatagtctctacctgtatagctcttacatacatggcccctactgataacccctgaatgaagcaccatgtagaaaatatttcctgataaatctgtatgtatttacagctttggagaaaaagtcttatcttggctggctttcaaacagactaggctcgccttcaaaggtgctttgccatgtgatccattgctctagatgaggaatgacttcttacggggtcaacaaacttcttatagggatagacggccagtattttaggctgccaggccatgtgttcactgtcacagctatttacctctgctgttataacacaaaagtagccatagaaaatggataagtgtgtggctgtgttccaatacaattttattttcaaaaacaagtaggtcataatttgccaaccccaga

SEQ ID NO: 8531 - DNA, 1988 bp, Homo sapiens
ttagcagtcttgctgtatgatttttttctttccttattaagtcaagagcgttcactttttcacttaaaggaagcactttatggcttctctttggcatttctgaattggcagcaccactactcttgtggtttggagccattgttaaataaaatcagggtgacttgaacacaagcactgtaataatgtaacagttgatccacccctactccctcaaaagaaaaaaatctcaaatcttgctgccttctgacacctttcaagactaacctacttgtttttctcctcttgacttgcactgtgtgactttgtgtgtgctgactggtgatagaaatgttcggaactgtcgagggctcatgttttgtaccatagactttctcactagagtcccttctggtgatttgtttcttttacaccccttcctgctatcctttccactgaataatattctgagtgagaagctagtgagagctaatgttacatttggtttttcctccccagatacaggtttgacccccgtctcatgttcagcaatcgcggcagtgtcaggactcgaagattttccaaacatcttctgtagcgacctcacacagcctctgcagatggatccctgcacgcctctttctgatgaagtgattgtagtaggtgtctgtagctagtcttcaagaccacacctggaagagtttctgggctggctttaagtcctgtttgaaaaagcaacccagtcagctgacttcctcgtgcaatgtgttaaactgtgaactctgcccatgtgtcaggagtggctgtctctggtctcttcctttagctgacaaggacactcctgaggtctttgttctcactgtattctttttatcctggggccacagttcttgattattcctcttgtggttaaagactgaatttgtaaacccattcagataaatggcagtactttaggacacacacaaacacacagacacaccttttgatatgtaagcttgacctaaagtcaaaggacctgtgtagcatttcagattgagcacttcactatcaaaaatactaacatcacatggcttgaagagtaaccatcagagctgaatcatccaagtaagaacaagtaccattgttgattgataagtagagatacattttttatgatgttcatcacagtgtggtaaggttgcaaattcaaaacatgtcacccaagctctgttcatgtttttgtgaattctaggctggtgctgcactgaaatagagcagtaagcttgtgataaaggccaattccaggtagctcttgaaggtgatagccatctactttccagtggctgccaaccacagggagtgccagttaacactggaaggattaaggcaaggtcccttctcttgagactcccctctgagatctgaaaaatgaagtggcttaggaacatcagcagtgaagaactgccaagagttggtgaaggttgtctcttccgagggccttctgaagacagggctcttgaacagacaagtggaagggctgtaccagggataaaggaaagaagtgcctgtccagcagggagcttgaatttaagttccatgtatgaagtcattggctctatctgcatttttctgtcattctcttcatttgttttaaggtggaaaattttcttacagttgatgcaaagtatcaactactttaccctaccttctccccttttagatgggttcttcctgagttttggagtcttgtatgattatcagtattcccctgtcaaaatcaaatctattcaggtttcttcactgttgagaacacctaaatgtttttatttttgagaagtggggacagagtctcactatgtcacccaggctggagtgcaatggcatgatctcagctcactgcaaccttcgcctcctgggttcaagcgattctcctgcctccgcctcctgagtagctgggattataggcacgcaccaccacgcccagctaattttttgtatttttagtagagacagagtttcaccatgttggc

SEQ ID NO: 8532 - DNA, 1144 bp, Homo sapiens
agcaaagaggaactatgtcagggttaatgcatgtatagagaagtaccagtcacttttttgactttataaataaattggaaaaaaaagtttctgcgttgtatttgtaggtttgtgtagtaattgagaacaaagtttcaaaaatcagaactaaatttggatataccttttcaccggttttgggtactccatgtacagtatttgttagaaaggactatatgctcatcgtttggggattaatgttttgtgtgattttctttgtgactgtgggtactaactgtaatgtatgtaaactgccatagcaactaatggtacatataaagttatttaggaagttactctgagttcttgtctgttttaacagttttgaacagagttgaggagcatatttttaatatatttaaatttaattgcttcttagagtttagatttaattgtttcttatttaatcaataaactttaaaatagctctaagtaaccttgttatttaaaaatggcaatatataatctggtatttttaatatgaatactttacatttgtttcattttatctcatttataaattaactaaaatggactgattttaccaaggagtttttctatgttgtgtaagtgtggagtttacctaatttacttttattctaaggagatgcacaaatgaatatcttgttagatagctgacacgcatttaagctgtggtataattcctctgaaaaacacatcatgataatatctcctaggaagaaatctttaaatttcaccataaataagtaatttgaaatttaatactaaaaaggaaaatgaattgtctcccatattttactatatttcatgttttttggatgaatagatagaaacgctcccatcgcctccgcttcattttaaaaagcttaccactgactaacaaaatttgtattgagaaaagggaagctgaagctagtgcctagtttaccacctaaagcaaaatttttaaagttgatctattcctaagtaagggttgatttatttttagtgactctagtgacaggcatttgtaaatgacccccctacgccgctcatctttctgaaaattcttcatgtgtatgcatacattattccaatttccaaaacagaagtaggctttcttttttctaaagattccttctcc

SEQ ID NO: 8533 - DNA, 1183 bp, Homo sapiens
gagaatctccaaggttatgcaatactataaaatggtggtttgagtagaagttctgtagttcatccttatcagactaatggttttggggtttttgaaaaggaatgtttcaaggaggtctttgaaaaccattttcttcaaatgttcattgcatctgagatcccatttttgtccctttatttgctccagaataccgcccaactgccaacaaagaagggcttgtgctcccaggaattttctgcattcctctctggagtaggcatttttctcagctacaaaggccctttggcgaattccctctaatcattggatttgccctgggctctgataggtgccattcatggacttggtctgctgtttgatggggctgaggcattaatgggatcttttcatgataaacaaaactgggtaacattaccagagggatcacaaagctgctgttgtagggggagtgtggtgctttctctctctttctctttctctctctctgctttttccttcttcctcctcttctccctgttctttttatgaacgcacatttgtgtgcgtgtgcagcatggccatttctagaagcagatcttctgacctttgctgctactcgtaagtcaatggccaatggcaaggcctttgttgaacataagatgattctatatactgatctgatctacagtagcttcacagcctgcggggaggtctgtgttttcttaattgattaaacgttggaagaatactgcatgaagaatctgattttgagatctttcttacatgctggcatttaattactgaaagtatctggtagttgagatgaatgagtctgggggaataaatacttaacacaagaattcaacttcatgtggctgctgtggtggtatatccctggctgtgttatcaatgccagactgaatggggtaactcgtcactgttgttgtatcctatttgcttctcaaaagaatgcaaaaatggttagttgaaacctgattcctgcaatagtgaagaagtgaaattagaattattttaggtgatgaacactatttttttaaagtttttatttttgtgggtatgtaggtgtgcatatttgtggtgtatgtgagagattttgatgcgggcatacaatgcttaataatcacatcagggtaaatgaggtattcatcacctcaagcatttatcctttgtgttgcaaacaatt

SEQ ID NO: 8534 - DNA, 1183 bp, Homo sapiens
ttttttaaccaagtcgctcctaggttcttaaggataattttcctcaatcacactacacatcacacaagatttgactgtaatatttaaatattaccctccaagtctgtacctcaaatgaattctttaaggagatggactaattgacttgcaaagacctacctccagacttcaaaaggaatgaacttgttacttgcagcattcatttgttttttcaatgtttgaaatagttcaaactgcagctaaccctagtcaaaactatttttgtaaaagacatttgatagaaaggaacacgtttttacatacttttgcaaaataagtaaataataaataaaataaaagccaaccttcaaagaaacttgaagctttgtaggtgagatgcaacaagccctgcttttgcataatgcaatcaaaaatatgtgtttttaagattagttgaatataagaaaatgcttgacaaatattttcatgtattttacacaaatgtgatttttgtaatatgtctcaaccagatttattttaaacgcttcttatgtagagtttttatgcctttctctcctagtgagtgtgctgactttttaacatggtattatcaactgggccaggaggtagtttctcatgacggcttttgtcagtatggcttttagtactgaagccaaatgaaactcaaaaccatctctcttccagctgcttcagggaggtagtttcaaaggccacatacctctctgagactggcagatcgctcactgttgtgaatcaccaaaggagctatggagagaattaaaactcaacattactgttaactgtgcgttaaataagcaaataaacagtggctcataaaaataaaagtcgcattccatatctttggatgggccttttagaaacctcattggccagctcataaaatggaagcaattgctcatgttggccaaacatggtgcaccgagtgatttccatctctggtaaagttacacttttatttcctgtatgttgtacaatcaaaacacactactacctcttaagtcccagtatacctcatttttcatactgaaaaaaaaagcttgtggccaatggaacagtaagaacatcataaaatttttatatatatagtttatttttgtgggagataaattttataggactgttctttgctgttgttggtcgcagctacataagactggacatt

SEQ ID NO: 8535 - DNA, 1266 bp, Homo sapiens
atttaaaaattatatagatctctaattacggtgcagccagttagaaaattagtgatgttctatggtattttctgtaaattttgttgaagttcatgtcttctgggatttaaaaaattattaataaagaacatattcataaacacttatgatgtttataaaccaacctgaactttatttcttaaagataacctacagagagtggaaactcctgcgatgtgaggcaagttggatagcattttgtcagtgtgagtctcttctccagctgatgactgatttggagaagaatgcattaataatgtattccagactgaagcagatatgtagagaagatgggcacacatatgttgaagtgaatgacttaactttgacattgtcaaatcatatgtcatttcatgctgcttcagagtctctgaagtttttgaaggatattggtgtggtgacatatgagaagtcctgtgtcttcccttatgacctttaccatgctgaaagagccatcgccttttcaatttgtgacctgatgaagaaacctccttggcatttatgtgtcgatgtcgaaaaggtgcttgcctctattcacaccacaaaacctgagaattcaagcgatgatgcattgaatgagagcaaacctgatgaagtaagattagaaaatcctgtggatgttgtggacacacaggacaatggtgaccatatttggactaatggtgaaaatgaaattaatgcagaaataagtgaagttcagctggatcaggatcaggttgaagttccactggatcgggatcaggtggctgctttggaaatgatttgctccaatcctgtgacagtcataagtgggaaaggtggatgtgggaagaccacaatcgttagccgtctttttaagcatatagagcagttggaagaaagagaagtaaaaaaagcctgtgaagattttgaacaagaccagaatgcttcagaagaatggattacctttactgagcaaagtcaactagaggcggacaaggctatagaagttttgctcacagcacctacagggaaagcagctggcttactaagacagaaaactggtcttcatgcctacacactgtgtcaggtaaaacctttgacatttcatctgtagataaaacatttgtcggccgggcacagtggctcacgcctgtaatcccagaacttttgggagactgaggcgggcagatcacaaggtcaggagatggagaccatcctggctaacatggtggaaccctgtctctactaaaatacaaaaaattagcc

SEQ ID NO: 8536 - DNA, 1414 bp, Homo sapiens
tttatagttgttcttagacatgtgataatcataatattattattattgcctgtgcatgcacttacttggttgcagttcctggtgatatcattggataaatgtaacttcttgaagtttcaggaaataaacctgaaactgagtagaacctgaaataaacctgaggagggaatatgtactgttgtctaaactgttctgttgatactttcccataagctcaagaagcacaagtatcaaaacttgccaaatgaggatccaatcaagtggagaaggaaaaggggtgctcggaagcagcccccagccccctctctatcctggaggcacagagtgtgggggtcttgcaaattactttcttgctggacacttgtggagtgagtacaccctgagggtctgggagaggcctaacctccacccctgagtcccatggtccctggtgcctgcccagggccaggctatgggctcagatgtcacactttccttgcctccttccttgtcacctccagagatttggattcaggatttgttcctagtgtccaaaactttgacaggaaagttaacttcttttttttttcagacgaagtctcactctgtcacccaggctggagtgtagtggggcaatcttggctcacggcaacctctgtcccctgggttcaagcgattctcctgcctcagcttccccagtagctgggattgcaggcgcctgccaccgcacccagctaatttttgtatttttagcagagacgggatttcactgtcttggccaggctggtcttgaactcctgacctcgtgttccacccacctcagcctcccaaagtgctgggattacagacgtgagccaccgctccagagactgatgcccacctacaaatcttgatagaacaattaaagttttttgatcacaagcttcaaaactgcaaagataataagcagagaaagaaaactgaaactctcaaagagaagcaaatagcatggtggaatcaatgaaacactgcactgtgttgatgcagactgctgaagaccagaataatgctgagaagcacgcagatagaattataagtactattaatcttgtagatgcagtgtatcaacctagtccctgggaacctgtgatcagcacaatgccttcccagactgtctcacctccctctggaacctactcaactgcataagacagagcagagttcatcttcctgaccagttggacctgtactaattgccttgggacatcattagactccaacaccaaatagtagaggcagtgcccattcaccacctagtagcggtctaacttctccaagccatgtcaatggcttctctaaatacaatcccagaattctcttattccagcagtgaagatgaattctacaatgctgatgaatgtcatcaacatggctcatccccaaagcacttaataga

SEQ ID NO: 8537 - DNA, 1200 bp, Homo sapiens
gagaaaggtaatatacatttttttttcaaatttgaattaagtacttttcctgcataacagttcagtactgtggtccgtcaccttctccccagcacactgggcatgggaaataccatgtatgagttttttttttttttttttttgtagatgaccctcttggtatcttatttttggactagtatccatttaggctttgggcttgtacttaagagcaagtatattttaggttaacaatttatatcttctgtgggtaacttacctttaagaaaaggatgtatatttcacatatatttttgaaatttgagcttttttggacagataattataattcttgtaaactcaggagattgctatggatctttagtaacagaaattgtaaatataaacttaagcaataaatgatgcatttttcaaccattgttcctgctcctagaatttttaagtaagctacatacacacaattcaaatattaagacatttgcaattatagctatttatgaaacaatttgcaggattctaaaaccactactagccattagtgatagatactattttatagtagaaattcagagtggtggagctgtttatgacgctaggaaatgtttgtgctttttaaattttacggtaaaataaaaaccattagtatggcataaatttattggaaagtagattaaaatagaactactaataggtgtaataatttcatagttcagtcattttacagctatcaagtggctattatatatgagtcagtctgctgtatgctggttttgcgaagcattggagacagagttttctgaatattcacttaaatagaagataagacaaggaagaattataaaaataaagacaaatatgtaattttctagttatcgctatgatgcatacaattttccttaagatatatgctatagtaaagcagtgattaagcttgagtcttatagtcagagaggcttaagtatgtattctggggctgggtgcggtggctcactcttgtaatcccagcactttgggaggccgaggtgggtggattacgaggtcaggagatcgagaccatgctggctaacacggggaaaccccgtctctactaaaaaatacaaaaaattagctgggcgtggtggcgggcacctgaggtcccagctactggggaggctgaggcaggagaatggcatgaacccaggaggcagagcttgaagtaag

SEQ ID NO: 8538 - DNA, 1154 bp, Homo sapiens
ctaagaaaatgaatacctctgtattttgactcttgtttccttctttaaagtacagttcagaggggtgattttaatttttaagccctaatcaatctgagctgttgttactgtagaaaccacatttctcatcctgaaacatgacagcagtgatcgcccctgacagttcatagacctgaatttcagacaatcaaaggcaaagcaatttggaggtctgatcatttagaattttcacagtttcaaggaagcacagtacaggttctcttccaatttgtcagaagcaaggaaaagcgcatagttggagagctgagtgccagctttcagccctaggtatcagtgccaaacacatttttattattctctggaaaataaggttgtaaaaaagtaattgctgacacaaccttaatgatagcactttaaggatgctgctgtaattaaaataggaattttattaaactagacctctgagagcctaacatacgtagcattccgatctcaggatttacaaagcaagcaactttgattcctgctgcttttgctgtgtgggccccacatttcctttttgcctctcctagttgcagcgtacgtagaaaaccacctctctcctgaaaaaagcaataagcatccatgtttagaataatgccctgtggtgatagtgccacagctttagcacacttacctctgaaatgtcatgaaaggagctcctctctcctttgatttcccttgaaataaaactgtcatgtgttatgcagtgaggttaaaatcctacaggatgttttggttaaaatttgaagaaggctgtcttacttcagtgggatgtcatatccattttattcctattttactgatggatgggttagatattgtacacagctgctagatataaagacctaaaaatagtggctttaaaaatttagttgattatttttcatctgtgatgagaattttacaggttggtggcccacgtgtagtgatgctacagtcaccagtgggacccaggagccttccatttttcctgcttggacatccttaacatgtggttgttacctcaggccccaagatggctgcctgagctgtagccatctcatccaagttccatggaggaagaagggcaaaggaaagagttacatcccagctacatcagccctctgctttaa

SEQ ID NO: 8539 - DNA, 1199 bp, Homo sapiens
ttttcacccatccccccaactccctttttttagcagatcttaccacccacaatcctagtgaggttcttgggctccatctgctccttcctttgtgcactcagttctcttaaacacatcggtcctttgctccttcccttctttgcatggctggtcattctacatctggctgtcatgggctgacctctgctgaacctcaagctatctggtcttgtacaaattacctactctctgtgcctcatcatcagctaccctcatttccttctcgcccctgcacaatattaatcacttgcatttctcccagtaggccttagcatgaacactgcctactgtgtgtagacacctcaacctctgcttaattgggttcactctttcttacactgcagttgactctggcatctggaccttagacatgccggccataggctcccataccctccttgcatacctttattatagtgctagttatactgtatttcaattgcccataagctctgccttatctactcttatactgttgtacctacagcagtgactggcacatacggtttaagaaatttaaaaaatatgcactgcaagttgagccgtgaaaaaataaggagtgaatgaatgaatcttataactagttgccattcaattcattctgccttgacagtgcctcttaactctgttactatctttgtcttccctcctttgctgttcagcttcctccagctgaagcttttgtttatttttggagaggcgattctgagtgctgtttggagagtggcttcacatatggtctttggagtcttgctgccttggtttgtagcctatgtggcttggtttgctcagtatgtggccttgtccaaattacgtagtctctgtgccttatttatttatttatttaacctataaatgaatgatagaaataatacccccttccacagggttgttgtgtggattcatcgagggagttcctgtgtagcactaagcacctggtatgtagtaaattataattatatgtaaactatttaaactgttgcctccacttttttttttcctttttgcaagctacttcagacttgcaaataaaaatagagattaacacagcaaacacctatgagtgcagccccagtttaagaacaaaaataacaagatagtaaaagccacctgaggacactttcctatattacctttttcactttccttccctcctttca

SEQ ID NO: 8540 - DNA, 1135 bp, Homo sapiens
atttttagtagagacgggatttcaccctgttagccaggatggtctcgtctcctgacctcgtgatccgcctgcctcggtctcccgaagtgctgggattacagatagtttgtccttttttctttcttttttttttttttgcgacggagtttagctcttgttgcccaggctggagcgtaatggcgctatctcggctcaccgcgacctctgcctcccgggttcaagcctcccaagtagctgggattacaggcatgtgccaacacgcccggctaattttgtatttttagtagagacagggttcctccatgttggtcagaatggtctcgaattcttgacttcaggtcatccactcacctcagcctcctaaagtgctgggattacaggcctgagccaccgcgccctgccaagtagtttgtcctttaagcagacctccctcctagactgttgtatgttacagttagatacatttgattgcttagtgagaagaacagatatgtgtatgtaaaacggggaataaattgccttcctcaggttgttgtgagtattacatgagcctcacggctagaaagcgactagtaatgtgcttggtacacagaatactcaacacttgtttgcttccttcttccctcttttctctcttttccattggtagatgagtgccttaatgttagtagctttatattaattacctatgtatttttcaaatctgagccagagctggaacctagtcagtgttaaatacattaaatacattactacttaattaaatgtctcttgaataactggataaatgaacaaaccatactatttatcagaatttgaaacaagaaccaaaatttctaaaacatagaaccaaactcaagcagataccatttaaaaatgtaagttctagaacatcagagaagtagcagaaagctatgcgtatagtgagtgcctagtaacaacctttgcctgatcatcagaacaaatcccacctccctagatctctaactttttggaatttgagacagtattttcttcatccttcttatgtaccatcccttttaatgaattatatctaatatgttgctagtcaggaatatccgccttctaggaatcttagaactagcattaacactttcatttattttaattctgt

SEQ ID NO: 8541 - DNA, 1189 bp, Homo sapiens
gacatacctcattgtaaaaatactcaagaggaggattttgtaattttgtattaaattcttagagaaatgtcactcttacgctgcagatttggtcagaagtttcgttttttaaaactgttcagtaaatgtagaactcaccaggtccggttttggagaatagctgaaacttaagcatgacccttttctctattagtctttctgtccagtggttgccaaatgcatcttctgaggtcttcagctcgatgctgtgtggggaactcatgccccagttcctgagaaatgacaagtcagtgctggttctcccttcttccttttaagtgagcagcctctggcagatctttctggaagtgtagaaggttttcctcaggtttggactgagatgtggggatggtaagaacttctttcagtaggtagattttcatgtgaataagtgaaagggtgagggggatccacataattcctaaatattcaggaaagtggaaacaatggggtatggtttttggtaaaattccaatctcacatcactctgtcttccaggatgggtcaatctctatcttcctggcaccagttgctccattttctctacatgccatttttacccctgtggtttgggagaggggattcaatgggtttggcctgggtttctctattcccttgtgtagcaaaggagcaattgatgaagtgaagataattgtgatgtagaagaggtgattctctggcactgctctttagactccaaggcccttaggcaatggagacagtcagagtgtctcagttctgctgtgttggctcaggtgttggctacctctagaacctctttgtgcagtcaggtactttgtctttttttttttttaattgtgaaagagtttcaaattgttagttcgcatttttaatagctttattgaaatataatctacgtaacacacaattcagtcatttaaagtgtgcaagccagtgacttcattatattcacagaattgtgcaatcattatcacatcaattttagaacattttcatcattctaaaaagaaaaccttgtatccattaagtagtcactccttattttcccctccccactctaaaagtctctacccctagacaactactgatctactttctgtctcggtagatatgcctattctgagcatgtcatataaatggattcatacaatatgtggtcttttttaac

SEQ ID NO: 8542 - DNA, 1141 bp, Homo sapiens
tcttcagtgtggactccaaatgcagcttatactatcttaaagagggtagctattggtttcccacactcatgtatctgtccttttactatatttaaaaatgcacagactttattgagtagctctaattgagtcctatgatttgtcttggatgaggattaacaggttgtagtctatttgaataatatgttcaggaggaatgaaggactttcacagtgttgagcagtctatggtcagtctttgaatccacaaacagaaaccattttggggccaattataattcagcatggactgcaggtgttaatacttctttaaagtctgcatcatgctaaatcactctgagaatgatagtgggtaaaaatgtgctctttgtagataaaattttattcctaaatgataaaagatagtactgcttcctagctgttttgctttttaacagcaccaaataactcaatacagccttcagatgagttgaatgcgtggcctcctgtcaaagttaatcgaaagataagcatcttcctccatgttgttagcaaagcaggtgaaaccagtggctaattaccctcaaaaagaaagctaaataatcccctcttaaaatcttcagcaattacatatacaatatcaaatacattactttttttgcttgattcccaggggaaacaatctttagctaattcagttgggggacacaagaggatgcggttttctaaaataaaaatcatgattaaaatagccagctggtcttgatcctgcacttaaaatatttcagaccaaagtcattgctatcctattttgatataaaactccagtgtctcaattgcttaggcccttgaaacaaatacaagattaattcttgaaacacattttacctcacatttgcaggttttcttatagtgtacttttgtgtcaaggtgaaatgactttttttttcctggagaaaggaagggatcagatactttaatttttatgactataatatgcacatattgttagtgaaagcatatggatttttaaaaaaattattactaaggacaatctacatttgtagattcttctagaatcttttgctgttattagttacaaaattaatagcatctatagtttctttagcacttactgtttgaacactgtgctagcacttcct

SEQ ID NO: 8543 - DNA, 1174 bp, Homo sapiens
tggctgggtgcggtggctcacgcctgtaatcccagcactttgggaggcagaggcaggcagatcacttgaggtcaggagttcgaagccagcctggccaacatgatgaaaccctgtctctaataaaaatacaagaaaaaaaagccaggcatagtggtgggcacctgtaatcccagctacttgggaggctgaggtaggagaatctcttgaacttgggaggcagaggttgcagtgagccgagatctcattgcactccagcctgggtgacagagtgagactcagtctaaaaaaaaaaaaagacatccttattctgtattattatttatgattatactcatttagaagcagttaaggtaagtaggaaagaactgtgatctattctcagaatggttaccctcataaaagtaaaagttatcgtgaaatgcaaactcggctactaagtttttttgtcgatgagttcaagctaattttaagactctggatatatcacctacccaacccaagcctctggttgcaatggtgaaacaatggtgatgaacctgatgtcatcccactgtaaatattaaacaattttgatgtaaattttagatgaagagaagtcatatttacatcaaccttccagtgcatgttgcaactgatttatttattcagcgatacttttttagaatgtattctgtgggggaactgggtgctgctctagtgctgagggtgtagcatttttcctcactttttagtgcttactctttgggaaggaggtacagcactaagaagttaaaaatgcacgtaaatagatagtttgtcaggatgagataaatgatgtgtagaatataaagactaggttagggaataataatggaggagaggctattttagatatggtagttagagaagttagtttccaatttccaagtggaatctaatttattctctctctcttttgtttttatgtatttttgatgtcttcttggcagcctcatatcattgctaacctctccactccatggaatcacattttcctgcaaacgcatcatgagcacttatttaaatacctaatcattggcagaaatgcagctgtgttcatcattgtcaattctgatttgtatgatgttcccatccaaacatacctcagggtacatttgcacatctaattacaacattaaaactaataatagcctga

SEQ ID NO: 8544 - DNA, 1123 bp, Homo sapiens
atttttgttcctttagttgagaaacacaaagtattcttttatttgctggccctgtgggcatttatatgttctgtcctctcattacatcggtagaagaccaagcctaggtgaatatgcactggcatttccacaaataatcctagttactgaagagcacattcatctgggtttggttttctaataacatgttgattatataccgatttctgtctatactgccatacattaaccataacatagttaaaatcgggattaggggagttcatcttaaaattgattaaataagtacaatttgaaaggtaaaccttttaaaatagtaagtccatgggagagaaagagcaagaatcattggtgctagatagtctgggaactactgtcctatgttattgctggtaataaagcaaaatgtggcaggtaatgaatcaaggagtaaaatgcagctcttcaaggcagcttttgtttttgtctttagatgtcctaaggaagtatatcctcatgtttctaccattataaatatttgtcttaaatatcttacctatgatccaaattataattacgatgatgaagatgaagatgaaaatgcaatggatgctgatggtggtgatgatgatgatcaaggtattgcaaattaaatagaatcttttgagtttttgtgaaagacacttatagatggagatgattcttagtccaaattgtactgtttgttttatttagttataatagtgaaaagggaaatgatctcaatatttgacaacagcaaattaagttagagggcatccatgtattgaactgttatgcaacacattaaaaaatcatgtctaaaaatcattcattaatgctgttaataaggtgagtgaaaagtatgtagcaaaaattgctcaccatagcccaattttatttctttaagtatacagaaaaaaatctgtatatttacaactagtactattaccacttgttttctcttggctaggaactatgtatgatttttggttttaagtactattcaaattttctacaaagcatttttgtaaggagataaaccaaggttttagaaagaattgaatctgtagatatacatatttagggcagcttggcttgaaagaatattagtttgtttattcat

SEQ ID NO: 8545 - DNA, 2435 bp, Homo sapiens
gttaaagctcttcacaaacagatgaaagaaaaaagtgtgaagacccgacagtgttgttttaacatgttaactgagctggtaaatgtattacctggggccctaactcaacacattcctgtacttgtaccaggtatgaaagaaacataaatctcttttgggacttattgtagcctttttgttaggacttagataagcttaaataattgtttccttttaaaggaatatatgtgacaacttaatatgcacatagagctaactttttaatctaacaatcttgaatacctgaagttagaaatttgtaagtaaaaggttaaaagtctcaccctaaaatatttggctgtaatatttattgtagatggtgaaaatttctacttatagaaataatataatgaagtgggaacattagcagtactataggggttgatttttaatttttctttcttaaaagtctgcacagcaatgattggattttttgttggctttttaggaatcattttctcactgaatgataaatcaagctcatcgaatttgaagatcgatgctttgtcatgtctatacgtaatcctctgtaaccattctcctcaagtcttccatcctcacgttcaggctttggttcctccagtggtggcttgtgttggagacccattttacaaaattacatctgaagcacttcttgttactcaacagcttgtcaaagtaattcgtcctttagatcagccttcctcgtttgatgcaactccttatatcaaagatctatttacctgtaccattaagagattaaaagcagctgacattgatcaggaagtcaaggaaagggctatttcctgtatgggacaaattatttgcaaccttggagacaatttgggttctgacttgcctaatacacttcagattttcttggagagactaaagaatgaaattaccaggttaactacagtaaaggcattgacactgattgctgggtcacctttgaagatagatttgaggcctgttctgggagaaggggttcctatccttgcttcatttcttagaaaaaaccagagagctttgaaactgggtactctttctgcccttgatattctaataaaaaactatagtgacagcttgacagctgccatgattgatgcagttctagatgagctcccacctcttatcagcgaaagtgatatgcatgtttcacaaatggccatcagttttcttaccactttggcaaaagtatatccctcctccctttcaaagataagtggatccattctcaatgaacttattggacttgtgagatcacccttattgcaggggggagctcttagtgccatgctagactttttccaagctctggttgtcactggaacaaataatttaggatacatggatttgttgcgcatgctgactggtccagtttactctcagagcacagctcttactcataagcagtcttattattccattgccaaatgtgtagctgcccttactcgagcatgccctaaagagggaccagctgtagtaggtcagtttattcaagatgtcaagaactcaaggtctacagattccattcgtctcttagctctactttctcttggagaagttgggcatcatattgacttaagtggacagttggaactaaaatctgtaatactagaagctttctcatctcctagtgaagaagtcaaatcagctgcatcctatgcattaggcagcattagtgtgggcaaccttcctgaatatctgccgtttgtcctgcaagaaataactagtcaacccaaaaggcagtatcttttacttcattccttgaaggaaattattagctctgcatcagtggtgggccttaaaccatatgttgaaaacatctgggccttattactaaagcactgtgagtgtgcagaggaaggaaccagaaatgttgttgctgaatgtctaggaaaactcactctaattgatccagaaactctccttccacggcttaaggggtacttgatatcaggtaggtatctagattttcttacttaaaaagttttttattgatagttggttgccttaaaagacacctaataaagaagttaagccatgtctatattttcttaaacctaaaagctaagtatgtgatgaagaaaaactgtctttcgtagtatggagtgatattcaaatgacattttgttgttttaaaggatagtgtggtaattagataatggttaaatctgttctaattcctcatgataactacattttaatgttactatattgtgttaaaatgtggaaaagatgtatctaatgaattaacataatctgaagagcttgttgatactaattacaataagtataattggtgacagtacttttttcaaatggaagattctggaagagttttcagatttaccagtgtcatccccattagaacaagtaaaaggtagtaatattaatagcagtaatagccattc

SEQ ID NO: 8546 - DNA, 1169 bp, Homo sapiens
tcagaaatgatagttgcgttgctgctgaaagaaacgttatggttcacttagtgtttcatcaggttcttccctgaccgtcactgaagaaataacaatgacaccagcaaaaataaattatatcaacttagagaaaatataatgtatattgtattttaagtttatcatgtctgtctgttgcttttcttgtaatatttcaggtgatttcctaaaaactttggaagacccagatttgaatgtgagaagagtagccttggtcacatttaattcagcagcacataacaagccatcattaataagggatctattggatactgttcttccacatctttacaatgaaacaaaagttagaaaggagcttataagagaggtaagttagatcacactgtttatttgagcttgtctttgacttaagtattgtatatccacacgttcttttttgctttaacaggtagaaatgggtccatttaaacatacggttgatgatggtctggatattagaaaggcagcatttgagtgtatgtacacacttctagacagttgtcttgatagacttgatatctttgaatttctaaatcatgttgaagatggtttgaaggaccattatgatattaaggtaagatgtttgtgcctatttatacaatgttttagaagaagactttgctagagcaactttcacccttgtaatttactcatgtgtctgagaaaaatcaggttgtctgtgaagattttgataagcatattgtaaactataaagtgcaaaagtaataggcagtgtaacaccagttgacgtgtaagaaagatccagagccctttttattggaggaggaagtggcagtggatgcaaaatgctgtgtgcccacttgcttagtgaatagtccctagatcctttccctcaaaaaagtcccgacagattttgctgtttaaagtataaatctgtaactttttggcctgtcttaacattggaccatagttgctacccatggagggttttcttagcattgtcttgattaagtctcctgagctacctttggggctagtctgaattgtaactgtatcatttacctgaatgaggaatttttgtttttcaatataatatactgtgtttaatatcaagaattttgttataggacatggaacttttcagatatacaaaacaatctgtagaagct

SEQ ID NO: 8547 - DNA, 2639 bp, Homo sapiens
ataatggggctttgtgtaaaatattcccttaaaagaaaaggagacagctactttaaaaataagtttaaaaacagttgttcttagaatgtaatatgccttatggacctacgagagtagcttttagcaggaagatcttatgtgcttaaattttgttcatgtaagagctgtcttttatagcatgtaatctaagtttactccatcttacaggtaaaggcaaactcagtaaagcaggagtttgaaaaacaagatgaattaaagcgatctgccatgagagcagtagcagcactgctaaccattccagaagcagagaagagtccactgatgagtgaattccagtcacagatcagttctaaccctgagctggcggctatctttgaaagtatccagaaagattcatcatctactaacttggaatcaatggacactagttagatgtttgttcaccatggggaccattacatatgaccatacaatgcactgaattgacaggttaatcataagacatggaaagagaagtgtctaaaagcttcaaaatgttccacttttttttccttcatggagactgtttgtttggctttcttccattgttgtttttgtagcatttatttcagaaatgtgtatttccataatccagaggttgtaaaaccactagtgttttagtggttacagcaacatttgaaatggaaactaaaagttaggattttatggagtatggagatagggtccagtatctatttaccctgtaatgtttaggattaaaatgttaaaattttgtgaccatgaatttctttcttttataaattttctcatttaaaaatcaaaaatcttgcaaaacaaaaaccatgtttctttttcttgtataactttttgttttcagcaacataaattgatttttagctggcagacaagaatatccatataagatttgttaaccatttcagagagtttggcaatttttaaaagataataaggtatcatttttaagtatgaaaattaacaatatccctgttgcgcacactaattttgcatgagtaagtttacaaatatgtatcgtctgtaaagcagcatgtgcagattattcataatatagaagttaaaataagtattagtgcaattttcagatatttatttttgcacagaaaacacattatctggagagaaagaaaggagaatttttgagacttgggttttcttaatgccagtgtgaatttgcagatgttttcagaaaatcaagtcacagtaacaatttgccacttttttctattataaatcttcttacttaaattttgaatatttagtttttctcagttacccatttgtgtgtgtgtgattccacttagaaattcttaaaaccagatttttctttcattccgtttggatgtctacattccttatcaaaggatataaatactgtgtatgcttttgaattttatttttaggaaaattctgaagccagctatcacaggtttgttagctaataatagtattttcttttagttgagttaggtttttccccatctcctgtagagcgaatttacatattgtattgggtaagtgttcactacttttcctgattaagggatctgtgctggggaacaaagcttttgcagtaccttatattgtagttaaaattttatttaacatatccttcagtgagctcatttcacactgtagcctcttccttaaaatttgtggtgctcctgtaacagtaagaactaattctgaaataaaagacatctcctaatgctgtgcaaacatagtttacatgtattgaaggaggcagttgttaaattgagtgaccaatttaagcaatcagatatttgaaaactgcaccctttagttttgaaactgtgaattagaaacacttttcctgctgtattactacctgctttaacatccaaatatacagtgattttaaatgataacatactgtggttattagattaacagcttgattttgaatgttcagatgataatgcagaagacatcacttctagtaaggattttgactagtgcattgatgttgaagttggtgccatttcaaaatgtggcaggtgataatcttttaccataatttgcataaaactgtaatagaagtttattttgagatgttagtatattatgtactatgcatttctgtggtatagatgttgtggatatatttaagtatttggttacatggttttacaataaattacaatactgcaggctctaggactgaacaggagactgacatgcatatgttgtgtgaatgtcttagttgggtaaagttaaatccaaatacttcaactggctttttcttcagtttgtttgtttttaactttcaagatgcatgttttgttttgttttgctttgtttttgtctcttaagccaattcatttttctaacagttgaaattcttttagtactaaagaaatagatactgctcttttatggctttagtgtttatatacctgtttatatgcatacattaacaaaattagtaacagcagtgcttagaatttcaatgctgtgtcatactgatgattaactccatactcctagtggtgatgtggtccagatactggaatggaagtggcaggatgtggagtccagacatagtctaccactcatgctacttactagtaatattaaggtgt

SEQ ID NO: 8548 - DNA, 1807 bp, Homo sapiens
tcctaagattttcatttaactgactttcaagagggcagcagaatagacttcatctttttggaatgaaaaggtctgccgtgaattgtggtatgttgccactaatgtaatgcctagaacaagagcctagattatattcatttctaacacttttaagactgttttcttaactgtttgcttttgggtctttactttttctagcccatgtttttaattaatttttttccttttgacaggtctgaagaactgttgcccaattcaacagtgccagcattccaactttgttaaacctaccaacatcttaaatggactttcctgtggtggtaccctttaagaggcggatgaaagctactatatcagtttgcacattctaatcactttccagtatcacaagagagatttttacttatataatagtcctagagtttgcagctggtaaaaccagaggctacatccagtattactgctaagagacattcttcatccaccaatgttgtacatgtatgaaaatggtgtactgtatactttaacatgccccatactttgtattggagagtacaataatgtaaatcctaaaagcaccactattttagcataataaaagaaagtccaaagagctcctatatagactactccagataacttcgcttctttgatacttgtagcttattgtaattttttttaagaaattcaaggtcattattattgtacaaaataagcgctttgattaacacagctatatagtttttttaatttttaaaaaacctgtggagacggtgatcttgtctttaaaacatgatagtcctttcagtataatgtcttagattaaagacgttgcctttaatatctgttgggaaggaaatgtccagacttttcaaatctcttattatatgtttcctttttttgtttacatagggaacaatgtttatagtcgtgtgtacagtgggggtctacaacaagaagtgtatattttcaaacaattttttaatgatttaacaatttttgtaaatcattttcaggcttctgcagctgtagattctcactgtgaatcccttgcttgctcatgcataagtgtatttgcaataccaaatatacaggtttagtatttttgcctgttagtgattgtttcacatgtgtaacgttttggttgagatgttaaatggtggacgagtactgtggatgtgaatgtgggaagtaattttaatcatatgtaattggtcacaaggcctaatttgcagtaactattgctgttttatttaacaatgccttgttgctttgtatgcattaatgtttggatgtaaagattgtgtgtctatccaacagggagccacagtatttaaattgaccaacctaatgttacaactactttgaggtggccaaatgtaaactaaaagccttaattaaagtggtgcaattttgtataacttagcatcagtagttcaataaatttggattgccatgcaagggcttgcattataattacttgccacttgaatgtgttttgtgtaatgttttaacagtgctagtaaataaatacgggtttaccctggttttaattgtaataggtgcattttacacagcatggtttcataatttaacatctgggcaagccagactcattaattacaggaataaggaagtagcgagttttctggtattgtttgaatatccacataaccaccttttgaacttttccttgagaaataattttgtaaatcaagcagtattacttacgaataaatgcctttgggtaatgttcagtagctatttgatgaggtaggtaaaagaggaacgatttaacatactttca

SEQ ID NO: 8549 - DNA, 1246 bp, Homo sapiens
cttgattatactactttaggagtggctttggagagatatcatcccctgtaatccgggaggcagaggtgacacggactgcacggaaacagagtgctcagaaaagagttttacgtatcctttgcgatttaagcatcattataaaaattgtaacatgtttggaatcagtgttgtagaattttctttttataagagtattaaatggtagctataataaaatcctgtagaaactttttttcactccacagagctgtcatttggtaaatataatgcaaaaatttaatgagatcgtatttccctaaaaataaagatatttcttactgctgacagcttctgctgagattagatttctttttattatttgaaaactgactaaaaacatttagttcagtgtgtagttatctaagactgacatctgatcatttaaatggcagaagcaatgaattatttaccctttgcattgaaaaatggtagccctaaaatacttgttcttgaaaaatgtattcacataatttgtatagtaaaaagatggttaattctcattttagtgatctcttttctacatggaaaacttttcttaactcgttgtacagttcaggcatctcaagatgaaaattttggtaatactacaccaagaaaccaggttatccctcgaactcctagctcatttcgacagccttgtaagattttttgcttttaaagcatttaataataacggtaattataatagcaactaacatttattgtaacataattagtatagtatttggttacgatatcaataagcactaataataatgattgcagttattattcgtttgaactcttgccatgtacaaggtactgtactttccataaacacacggtaactatgacatgggtattgttggccctgttttaccaaaactgaaagtgagacttagagaagttaactaatatatacaataagtatgtaaataggctggatgcagtggcccatgcctataatctcaacactttgggaggccaaggtgggtggatcacttaaggccaggagttcaagactagcttggccaacatggcaaaaccctatctctactaaaaatacaaaaattagctggcgtggtggcacatgcctgtaatcccagctactccggagggtgaggcaggagaattgcttgaacccggaaggcagaggttgcagtgagctgagattgtgccactgtactccagctggggcgacagagcaaaaaaaaaaaaaatcccagtt

SEQ ID NO: 8550 - DNA, 1175 bp, Homo sapiens
aacttctattgtatcatgtgtaaaatgggtataataatagtgcttatatggttgttataagagttagttgatacataaagtatatggtagatattaaatacatgttagttttttcttatctgcattttaattcaaaaacaagatgaaattcaaaatactttcctttaatgggaggaagtgaaattggttttattcacaatttaaaatcatagcagtttaaagctgtaagggaccagaaactcttgagagtcaaatcttattgtaaccccaagggtatataccttctagtttctgaaatacttatcagggaatgaagttaggttcccagatggtttttgtgctgtttaaaaattggagtctgactggccataactagacttagatttgcactcagcatttattttctcttttatgtctcaaatttccccttaaaaactagactgggataataaaaatcttggttttattttaatggttaatgagggggaaaatatcttgcagtggacaacagatgaagacttaactgaagcagttcattctttgggagtaaatgatattttggagataaaattttttgaaaatcgggcaaatggccagtcaaaggggtaagttttttttttctttctttttgatttagtagctagtgatacagtttttacaagttaactttcctttaagttaatgttaattacacatgtatacacatgtatacaaacaacacatgattgtttacattggaaggaggttcttgggcaaagattgatacttttcattttacgtaccctattacctaacacactaaaaccagtagagtggaaatgtggacagatttattttctatttttcccaagttttctctatctgtggttgaaatggttgttgaaatgacagtttaagaaccattactctccctgtgattaagagatgggagaagatgggcaactgaataatgtgttacatggatattttgctttatttcactactaaactatacaagtgggatagcctcagcatgagaacattataaatacagatatctaaaagtaagaaaataaaataccactgtcctaccattcattgatgtttacttttaacattttagtgaagattcttttgggctttttcctaaaaataaataaataaataaataatggaattataattcatgtgtttta

SEQ ID NO: 8551 - DNA, 1156 bp, Homo sapiens
aaggagagctatgtggatgtgtattatggtgggggagagatcactgataaccagaaaatgttcattgatttttctgcttggcaacaagacctttcaccacttggtaaactgaatatagaaaagatttgtcattatacatttaagtacattatctttaaagagatgagatggatgattatgtaattaacagaaattcaagtggttccttttcttttaatgttttagcacttaagacttaactgaagaagtgtgttacaaaatttaaatgatgtaatactgaaattaagatatctgttgaagaatttcggtcttggctgctgcagagtgctggtattttgaaagtaactcacgattacctatggaaaatatatttaaacctggatattttgagtctttaaaagtacccaaatagatgtgaatgttttcctaaaccatactttcttatgtagtttgcataggcacaaggcatttgcaagttaatatattagaaatagagttgtttttaataatagtggttacatttcagaaaactatttttaataagtgctatttatgagtatttggatatttgcagctacacaatcaggacaaatgtctggggaaggtaaagctggtcctccaggaggcagttcccgtgcagcatttccacaaggtggtagaggacggggccgttttccaggggctgttcctggtggggacagatttcctgggccagcaggaccaggagggccacccccaccttttccaggtaaaacttttcttaaattaccatggataaaacatgtctacctaatacctcttttccttttctctctttttcaagtaatgcattattaatgtgacttactctccttgttatgctatttttggaatccaggaaatttgatcaagcatcttgttaaaggaactcggcctttgttcctggaaactaggattccatggcatatggggcacagcatagaggaaatacccatttttggcctaaaaggtctttatttttctccaaacttgcttgacttatatatagaatatttacatccgtcttactttcttacctcttaaaaaaatcctttcaagatcatttttccttgtttcactttctagcttggcatcagagtagaatataaggtgggtgatttcactgtaagaagtgtgt

SEQ ID NO: 8552 - DNA, 1182 bp, Homo sapiens
tgggccaccccttacactagctcctcctccgcatcttcctggaccacctccaggtgccccaccgccagctccgcatgtgaacccagctttctttcctccaccaactaacagtggcatgcctacatcagatagccgaggtccaccaccaacagatccatatgggcgacctccaccatatgataggggtgactatggcccccctggaaggtaagttagtgtgtatctgtgaaagtacttgatgataaaagataggaacaatgactgtaaatattagattgtaggtatataaatatgttatttctgccttccaagaagatgaggtgtttaagctgctaccctgttttagctgaaagatactggtataggagaatttttagatttgttctctttgttggaaaagtagcatgcttcaatatggaaaagtaactactatctctaaagcacatgtcagaagcagctagtatgaattgctatacactgttgtgactaactgaggaaatctgttgagtatgagttaaggtttatgtttttgttttacagggaaatggatactgcaagaacgccattgagtgaagctgaatttgaagaaatcatgaatagaaatagggcaatctcaagcagtgctatttcgagagctgtgtctgatgccagtgctggtttgtgtatttcttgtattaatatttcttatttatgttattaggaatgacctaaaaatgtaagtacaatctagaagataggtcatttacatgtagtagttctttttatattcccaaatcattacctacgatttatttaaaaagcattgaaaaaagttgtgtgtcacagtgtagtggggaaaatccaaattttaagttatttggtatagatttaagtcttacccttgacatttaatggttcaggggcctcatgacaccttatttattcttatatttgcaaaatgataatgtgcttcacacacgtataataagttgagtcaatatcatgagcatgaaaggcttttgcaaatggtgaaacactgaaagaagacattgtcttgcatagttattttatagcacagtacttttgtaaaatgccttatcactcttatcccaagtggtttgatggtgttttgaaaacaaaatttgtttgacttcaaaccctttcctttccctcacaggtgattatgggagtgctattgagaca

SEQ ID NO: 8553 - DNA, 2264 bp, Homo sapiens
actggtcataattgttagccctctcccatgcctcttctcctcccctgaatataacatgcgtattagaaggtttctttgtgttggatgctgctcatgaaccatatgttaagaggttgtcatattcatgtatttaagccccattgtgtgttgtgatttcatgacttttatatctaaaaaaaccatattgtagatgttctttagcttgaaacacgagtgctttgaaattttccctttacctttctatttgtgcattcagtaaatactacacatctgttttaggctactagtttaatagatgatgtgatgcatttctgtgatgtgtctggttgctgatttttttgttaatgtttttaatagtgaaatttctggttcatgcttacctggtgagttggtaagtcgttattggcagctcaggatagtaagtttaaaccagatttacaaagaatttttgctgcctaagtttttttagacatcaaaaaattgaatatttttaggctatctaattatggagagcattaatccagtaatttcttttagaagacgtgaacgatcaagagagagggaccatagtagatcacgagaaaagagtcgacgtcataaatcccgtagtagagaccgtcatgacgattattacagagagagaagcagagaacgagagaggcaccgggatcgtgaccgagaccgtgaccgagagcgtgaccgagagcgcgaatatcgtcatcgttagaaggtgggtattccttgttccctgttaaatgtgtgtgtattcttaacagtaactataactccaaggctactgtttatacagtatatacctacattttaaatggtccaactacttgtgaatttaatcttctggaaacatctgaaacaaattataggtaagtaatgacaggtaaaaattttgaccctttatcttatgaatattttattgctgagttatcactttcaggtttcaaatagttaatggtcttaacaaagcaaggaaataatcaagaggactcattgtgtacttctaaaatctaaaaattggggttcttgtatcacatacataggttgcatgcaatttaaaatacaaaacacagggagttatttcacatatatgttatgtgtttggatttttaaaaataaatggaaagttactatttttgaactagttttatttgtccctaaaaatttatgagaaaatctaacacaataatagtttataatacaggagggtgttttctcaacattcaaagagaattttcctttaaaaaaaaaatttttttttttagaagagacactatcctgacatctgctttttgtttttaaaagaaacagtatcctttaatttgcaaagaagatgtaaaagttaatcaattaaaatgggtttagggtgcactgatttatatctaaaaattttaaattgtgtcaagccatatacccaagtttagaataccttgaaataattttctttgatgtttcattcataaatcataatcattgtctttttttctgtattttaaaactttcttgtgtacatttttcatgaagtgggaagagttgtctgtttatgcttcattttcacatgtaattttattttttatatttgttaatagcatttattcatgtgaagagctgggggagggcactataaggcttatgcatgtgacacaaaggttattctgtaaattaaaatattttttctttatatgttggttggcatattcaaattaaattaaggctaaacaaacccctcataggtaaatactctttatgtgattattttcagtaatcatgggaaacttactgaaaattcagtcatggtaattgttagtatttaaattgttatgggcaaaattaaaggttttatcaagtgtatgtaattctgtgacagaataccaatttctttaaccataacagatacgcaaatgaagtccttaaatgcctagaaaataagcatgctatttttatggaacacagatataagctcctacactatttacaattttaagggctttttgagttaaaaggctggttttgatactttgcattttgaatatgcagattgaatatcaaaactttaatttgtagttttccatgtattacaaaatttaatataaatctcaaaacattcttttaatatgaggcaaaaaaaccttttacttttaaaactaagcttattgaaattgatattgtttttgaatgtaaaaattgaatgttgtattatgtaaatctaaacactaaattttaaagatgtagcacttttttcccctgagtta

SEQ ID NO: 8554 - DNA, 1114 bp, Homo sapiens
gctgttaaataaattaatttgtaaaataattttgcattttatatttagttcagcatttaattgttaaatgagtttatagacttgatatgtgggtgaatgaaaaatatttacataaaaatcatccaagcattttccatttatttttgtagtatgcatattttagaaaatgacttatgaatgtttccatcatcacagaaacagtagctgctatgttttcattactgcttcagtcattaaatttataaggcaataatatttaagaagaatgaaatcagaatgtctcagtttaatcatcaggtaaattggaacatttcaccaccacaaaggcagctactgtttcagttaattcttattttgtgttagaatacataacagtgaagtagatgcacgacttgtgtatgtatagttaagccagcgtttttctgtgtattttggggaatagcaaaatctacatcacaaattttgacacattacagctgaaggaagaggatcaccttccaagacaaaacagtcttcatgggggaaaaatgacgcttgtccagcagtttgcttcttgtgattgaactgaacctgtaaggattcatggataaaatgaacaggaatagatctgaataaagcaaatctgcataaatggtaaccagtagctctacttttattttttatgttgcttaactgttttatttgaaggaaacctgtgtgatttaaaaagttatagcttttgcaactttattactggttatatacatttggccattatgatgtgcaagcaattggaaaaaaagtcaagtaaatgcttgtttttgtagtagtttgttcttgttaaaaatgtttatatgataatgtctgtaaacagcatcactttgattacaatagatgtagtgttgtaataaactgtttaatggggctgatgtgtaaagctgttcaagttatttgatgtttacacctcagggaaagtcttgtgttcagcaatatctaaagataatgttactatgacaacatttttactgtcctttaaagcattgcaatagcgtttttggatatgcctcaatctaatcttgcgttcagtgaattaaacatagtaattaagtgtcttttgcccttgattttgatatta

SEQ ID NO: 8555 - DNA, 1090 bp, Homo sapiens
tttgtaatgggaaattacagataaaccgtgtctgcacagtttaaggaatactatgtatattcatgcaccgtattgattcatgctatagttacttaatcaaagatttttttcaaacctgccttacatataggcccactttaaaagcacctgactagcatgtgttcttgattgcaaaattggcagaggcagggtgtcaacttgattaggtgtttttatgggaatgtaatttgaaatcactacttcagaaatttgacttaaaattcttgagcacgttaatatgtttttaagatctgattatctttgagagatcttctgttaatacacattggttgttaaagagtacccaaattctaggacaatgcttaaagtgttaaaataccctagatactgtgttatgtgcaactgtagaaaccctccagaaatttccactgctgttcttcactttcatcttgtctgctatcaaaccacttctgacaaaattagctgttttgaattacccatatcactgccagttttattttaaaatattttgtgtttgaagtatctgtgcatgggatcgttgatgtttatcagaactgttcactttcagaaatgattttttaaagcattttgttgaaaatgcggttgcttttttaacattattttagagttgtatcaaaattttcctgttttctgtatattgttgtgtcatttcttggctttttaatattttgactacaatgccctaatgcgaagaagtatggacatataaatattacaagagaaattagttaatagtaaagggttaaaaggtaagtaaaatgtccatgaaaataaaattttctttgaacagtttaaaaatggaatcacaaaaatctaactgcacttgaaatgaaactggaaattttatactaattaaatcctttatttaccttttcatattttatcaatggaaccttttaattgctccttctatatcactcttctccttgcttggctgatctcattacatgactttcgttacagacagtgtgagtgtactagatttgtttgctgctaatccgttattttaagtgttgtcagaaggaaataacttcttggtttgaccaag

SEQ ID NO: 8556 - DNA, 1524 bp, Homo sapiens
ttaagtgggatttttgtagcaaagcattctatttttctgttcttacagtgtgtgtgtgtgtgtgtgtgtgtgtgtatgcgtttttttaaccttaacttcagtttaaacactggtgtatttatttttttaagcaacttgactcttagaagccttagactgattttttcaataaatattcaaccaaaaattataaatttattaagatgtggccttacatatggcattccttgtgttcgtaatgtgagatttttgatttagataaatcaagattcaggattaaagtttcattgtaagttgaaatagaaaatgtattaaaatgtctaggcttctgggaggaagttcttatactcttctttcttggcattagaaagaagcaatatgaatttttgtgaatattctaaatattcaggcaacactgttcagattgatttaggtttgtcttaaccaatgttctttttttagaatttcaggttgtggcattcactgagtatgcagctactatggtttttgtatgggacgtataaatacttgattatatacgacagattttaatgtctttaaagacttcctgctgtattaacatattgtaatggagtcttttaaatactaggttgaatttaattgaagtcacacacatcttgaagtggtaactgcatagtaaatactaccaagagtttttttcacgtgggagtatcctaaaactctgccatgggtgtaaatgttttacattaatttcataattggacagaccctgcatttagcgaaaacattttgttttgaaagtgtgttctttttgtcgcactgttactgcgtaacacttctcaacattctgtaagttaaattattttaaaataactatggtgaattcatgtttatttttttactttgaaaattgtagtactcaggtggtatttaatgggaaaggatcctttgggtataaatcataatgtattttaaggaatgcatctataacattgataactttagccttaaaaaaaaggtctattattccttcctctgcatcccatggtatattagcaaagtagtttacagccctgtacagccttacaaagttgttttacaatttttaatggaaagcccttaacaacaacaacaaaaaattgtatcattttaccaatatccacgaattactgatcacagtttgtaaataatttgtttaatatcagaaggccaaagaaagtcttaaaattttagctattgactctatggtgacttcacaataagatttctgtgcaaaaaggtaaggtgataattgatctaatagacttttttttttttttttttgctgtccatgagaattagacttcatattagcttcaattaaaaagctcattccattttattaaaatgtttgtaattgcaattttgtgtttaatgtttactttgtctttcctttctttagcatttaggtgactgttcggcagtttgatatatggccattgtcggccttaaactgcactagtaacaagcatggtatttatcttgtattgaaaataaaacaaa

SEQ ID NO: 8557 - DNA, 1128 bp, Homo sapiens
ttagatcctctcttgggaattcagacattcttcccctcccccaacctgcacccatgtttaatgttgtaattcttaagttatccacatttcatcatggaaacattgtcgtcaggaaatgccatatttattaccctgtcatatatcttaaacatgtgagaaaaatactttagtaaaagtatttgttttctttagttgcagagcttgaagtgaaaaccagagaaaaattagaagctgctaagaaaaaaacaagctttgagattgcagagcttaaggagagattaaaagcaagtcgtgaaactataaattgtttaaaaaatgaaatcagaaaacttgaagaagatgaccaagcaaaagacatataaacagttctcatgagaacttggtagtaagctaaactgaaaataaggtgggcttcactggagaaatggacttactgcaaatgctgtgatgtttcttagaggaacttcatatacagctgttgaccatgaatttcttagcaataggaatttgtactatttaagcaatctttaatggaaaatatgtgtgtaagaatggatgctatataggtattttaccaacccattttaagaaaattctatgatattaagcacagtttttaaaaatgtttattgtagtatatgtatagcttattacccttttgacaggcatcaaaatttcattataaagtattacttgtacaaattttgtacttctttagtggctagaattagtgaagaaacttaatgtgtatatttaatttcttcaagttcttacctgcccccatccttttttgtatatgatgtgtccagtaagtattcaataaatgtagtttacagatcctatttctccctcctgatgtgtttcttcctctttgaagactttctggaactccctcaatacagttaaagtatctttatagtattgtgacatcacatctcttattggcactcattgtcgcatgtagaagctctttgatggtaaagattatatcttaagttttgttctgcctatatcatagtgtcattattcttcacatacaaatatattaattcttaggggccaggcatggcggcttacgcctgtaataccagcactttgggagtccaaggcaggtggatcacctgaagt

SEQ ID NO: 8558 - DNA, 2833 bp, Homo sapiens
cagcattcccgttttcacagtgcctatttaaaatgagagttgaagtaaatgacatgctggttgatttttatcaatattctggacttaacgcatacctttcatgtctaagtcatggttggcttttaaaactttttataaagcctcttgacaatgtacattgctaacaggtaactataggctttgaaagtaatgctcgtagattcagtgttcacagtatgtggcctccagcatgtaacatgaggaatcctttatttcattaattaatggctttttgacttgagccaaaacatatgtaaaggaaacagaagtaccgcacctcctcttacaccagtcagctcctttgccttcagtgttactagaaagcggcctgtgtccatgagtgtgctttgctgttggtgcactgaaaggcaggaaggagacaagattttctatttactcatctcatgatgtcatttgaagggcatgtccagatatcttaaaattataataggctcaagaatcagtctcaggtcactttacccaaaaacatttgaaaatctgaaccacaatctcctgaaagtttttctcctatagattgttgacaacacattgttttctggaggcatttgtgccattaggtttccatttatcttcagtttttttctttggtgtttgggatgtcttattttgttgccttatgtccttttcaatttaaaatgtttgagtttgtatatagttttgaaattggattatgtgttcattgttgtttagtttgcatttttgtcaaattatggttttgaaggttcatttggaacttactgttagtctgtaacagggttgcccttgtccagtatttatttataagctgtttacttttcaagttgataaaaacattctccaattctaaatttgcttgtgtccataggtgatctctttagcaaactgagaaaaaaaggaagctacttttaacatgcaaagttccctcaaggtgtaccgtgttgtctctgtgggcactcttccccagcactttagcagtaattcccccagctacacgctgcagttgtactctgcccactctagtgttcctcagctctgctgtccttttacttgtagctggatctttgattatccttcgatttccatgaaatattaatattgttgccagcatagcaggtacagtggaagtcttgtagcagtgagattgtatcataatttaggatttaaaatgaattaaagtttatataaactgaagagtctccatatgtcaaactcttggaaaatcaaagatgttccaatttcctaaacactagagaatacgagagaaggtagagtggaaaaggttaggtaaccttgcaaaatattttactattttctctaaatatgaggaagtttgagattatgatctggatctaccagatataactaaggttaatttagcatgaaaaagttttagtcatattggcatccaacctattcagtaaccgaatcataggacaatgatggattaggagaacaatagagtgggatcattataaagaaaataaattattaaaggtgtctttatcgttttagtgccatttttagtgtctttactataaatcaatatcagtgtattttatcattctatgtgcatagcagaattttcttttctcccttttgttcccctgtgaacttggtgcttattaaagtgctcactgttctcttaaaagagagcagtggtataggtgtgcagtttccatgatgcaggttccatttttaatatattgttccacttatcctttcttctgagtaaattgctaattgtgccaaatttatgtaatagtttttgtaatgtggaataagaattatgatggaaccattgcacatttttttctgaaacagccagtcaaggcagaacattaatctccaaatgcaagggctgatctatttattcattttggaggttgggtactttattctttctttccgtcatccttttcattgtttcccccggattctaattagtttttattttttttagataactccaatataatcattacagtttatgctttaaatactatgtgctttaaaaaggaaaatgggaccaatttgtctgctaagaatttgattttaggtactataagagtattaggaaaatatatacaactggtgttaatttctagatattttctagaaatcacttgtgttcctatttaataaaaggtaatttagaatactacttgtcctttgcagtagtttagtaatgggcattaagctgtgtcctcgaaggatgtacctattactaggtgcattttagaatgaaatattgatattttattagcatataattgtggccatatatctcagattttctgaggcagatctaattttagataattctgttggtagaccatgtgatccttctttttggttttggaaatataatcattgttaatgttttccctccaaatagaatactgttttatccatacaaatcataacagcatctatcccatgctagggttggaaactgatattggtattacttgtgttttttcttagtgtgttttatttcccagtttcatcttcttctaaaaatgaaaatatggtgccttccctccctccaggaagactggcaaatatttccttttatttactgctgctgtggagtgatgagatatgcactttactctttaagattcagcaaaaagcttttcacttctcagtatatccagaatacatcatatctgggacttaggaaaatttgccaagcaatctttgtttttatagatactaatgttgaccctctccagcgttcaatgttataaatagaacaagtcaagctagtgtttatctcctccccctccccaaa

SEQ ID NO: 8559 - DNA, 1248 bp, Homo sapiens
caccctatctatctttcctgttctttacatccctgttccccatccctacttcctcatttttggtataacacagttcttttgtagcatcattataattgcagttctatggcaattggacagttatagcatggaaacagactggtataagtagtacagtagtcaccagtgtgccacatttgcattagtaatgcaaaatatacattttataaaggacaaactttgtgttatgttttattttcattacattgtataatattgtaagactattgtatgtcctaatttgcattataaatgtttttttcctacgtaaaggcataaatatagcaactttgtataaaggtagcttattagatttttaattttttcttttataaaaaattgtccaacagtgggactaccattgccaaattgtatatgaaatatgaattttacccccatggttaatttcttttataaacattccatatttctctaataaaaagacataagtgatactgtactatgcatacattgtatcttaatgctgtttcagatcagcattttaaattttggtttgcatttttaatattggcaaaacgtaaccactgttaattaaaataaaaccttgttgtatatgtaacaacataattttccctctatcccttcccaccctttgttctctatttctccctatcagtgccaacttcatacattttgtagcatggcaataaaatataacttttacactgaggccgagtgtggctttttggaggaagtggggatgggacgattgccctctagttgtcctttgcatatgactgttttttgccatataagccatgtcatcaggcatgaaaagttttctcatatatgatgtaaacttgcttttaaggacaagtgtgaatgtgctttttaagcttaatttttgtcatgacaactaattttttttatctttggagaagtcagagttctttacaatcaaacgtttattaactggagtacttagaataagctagtaattgaatttagttcaagggctaagcaacacatttttaaatccttatttattgtagagtattagtatactgtcctacaaattatgtaaaatatggtttaatattagatgactttggattttgcaatgccttactgttgtcattctagcataaatatccataatgaggtactcaagttgatactggaagctgagctgatcatacactgacctgaagcattcatgaaaagctgctttattgaataaagtctgat

SEQ ID NO: 8560 - DNA, 1096 bp, Homo sapiens
aagtactgttatcatttgcacgtacatcttctaatattctgtttatgtagaagtatgtgtacttcattatgtattttatactcatgtaacatactgttttataaaacagatactatttatcaatacttttttgtagcttgctcttttaaattcctttcagtgtaagtagataacactgcccctttaactgtcaaatattatcctgtaccttaattattttataatttaattatggctgtattgatagtttctttccattgtttttgcagttacggtgttgaaacaaaaactagtgtctacctgtgcttctagtgtttctaggggtagatacatggtttggttacgtggtgtatgtattgaaaacatttgatgaatggataccacaaaatagctatccagagtgtttatacactagcactgtgtgagaatactgattgatccatgcattcttcaagatgtgcttatgtcttaacttgaaccaattatgttccctttaggacaaaattcttctaagcagtggacgagatgcctctcttatggtaaccaatgatggtgccactattctaaaaaacattggtgttgacaatccagcagctaaagttttagttggtaagtctgaatatactttttcaccaacctaataatactgtttgttaacatttttgaaataactttataaataggctgtgttgaccaatcgtactgtcaattgatgtccactagttgttaattatcgttgttaaaatacaagcttcaggagtgcccgtatgttggtggtaaaactgttgcatttcagacctcagagttccaaataatttgttgaatgaggaaccctggtaagtttagattggtagtgaatatttttggagaatttagtaagcaaagaagcaattttgagttaataactaatttctttttctagatatgtcaagggttcaagatgatgaagttggtgatggcactacctctgttaccgttttagcagcagaattattaagggtaagagcaactaagcaactcttttttcctactgtgtttttgagtatcagaggtaatctagtccttacttcctctgtctttactattgaggagtgct

SEQ ID NO: 8561 - DNA, 1666 bp, Homo sapiens
gggcaacaagagtgaaactccgtctcaaaagtctcaaaaaaaaaaaaattgctggattctataaactcaggaatcaattgcactaaaaagcttggaataggtatgaatctattgtgtatatacacatatatatacgttggtaaaaatgttgaaatatgctatgggactctttaaaaagagtaatgaggcctggcgtggtggttcacgcctgtaatcccagtactttgggaggccaggcgggcggatcacaaggtcaggagttcaaggccagactgaccaatgtgagatggtgaaaccctgtctttactaaaaatacaaaaattagctgggtgtggtggcgcacacctgtaatcccagctgcttggaaggctgaggcaggagaatcacttgaacccagcgggtggaggttgcagtgagccgagattgccccactgcactccagcctgggcaacagagcgagactcaatctcaaaaaaaataatgaaactgatgctctctttatgcttcgtttgtcttagatatttggttcccgggtaagagttgactctacagcaaaggttgcagaaatagaacatgcggaaaaggaaaaaatgaaggagaaagttgaacgtattcttaagcatggaataaattgctttattaacaggtctgtgtttgcttttaagaaaggatttttttccatgaaagtttatggaatacttcatatttacttatattgaattagattttttacctaggaactgtcttagataacttcacttaaattatggatttttgtaatcagtaaattgtgatttatgcacacttacagtgaccagaattacgggattgatttatacagttactataataaagaacacttcttttcaatactagtaatggatgcattagtactatagttgataaactctaattatataggtaagaaatgcaatcttgttctaatttgcatttcttttacttgtggtaaaaatgtttacatgttttttagtctaatgtagtttatcttgtaacagttgtgagcataatgttttcatgtattttatttacaggcaattaatttataattatcctgaacagctctttggtgctgctggtgtcatggctattgagcatgcagattttgcaggtgtggaacgcctagctcttgtcacaggtatggaaaaaaggtattgttttctaacaaacacaatagtcactcttgaatttgttatttgttactatatgcaactacctttaaggagtttagaatttcagcagttattctgaaatctattctcttggatacctttaatttagatacatagatacattacatttacgataccaagttatataccacatttgccgtaggtatagatttctttcattgtgtcactgttttaaaggtagatttttggccaggtgcagtggcttgtgcctgtaatcccagcactttgggaggccgaggcagccagatcgcttgagctcaggagtttcagaccaactttggcaacattgcgaacccacatccctacaaaaaaaaaaaattggccaggtgtggtggcaagcgcctgtgatcctagccacttggggggaggctgagggaagagaatcgcttgagcctgggaggcagaggttgcagtcagcggagatcgtgccactgcgctccagccttggcgacaca

SEQ ID NO: 8562 - DNA, 1500 bp, Homo sapiens
aattttaagcctgctgtgcatttaactaatacatgtttatgtttataggtggtgaaattgcctctacctttgatcacccagaactggtgaagcttggaagttgcaaacttatcgaggaagtcatgattggagaagacaaactcattcacttttctggggttgcccttggtgagtgattatgtagatcctggttagggtgtctaaattcttgctaggctctgttgaagtaaaggttattgtagttactagaatagcatatcttacaagtcttaactcttcagaagcatgatacatactttgtttcagtctcttgagtcaacctcatatttaccgtgtctttgtgaacagtgcatgttcaacagttttttttccttgataacttagaaccattatgagccttgattgttggagaatgtataatacaggaagacaggtcagctttcagaacccagtaatataaccaacaccggcataaataatagaaggcaaactttttatccctaagtggtcactgtgtcttttaattttaggtgaggcttgtaccattgttttgcgtggtgccactcaacaaattttagatgaagcagaaagatcattgcatgatgctctttgtgttcttgcgcaaactgtaaaggactctagaacagtttatggaggaggtaagcatttagaaaatgttgaatatatttttaatttcttaaagtacaatataagtcataagtggttttaatggttcttacagaaatcttatattgcttttgcactaaattttaaaatgcttggcatatcttaaagtcagtaattcagtatcttggagacaactaagcattgcaatattttattggaattttaatctttaggctgttctgagatgttgatggctcatgctgtgacacagcttgccaatagaacaccaggcaaagaagctgttgcaatggagtcttatgctaaagcactgagaatggtaagttaatcaaaatgagagatccgaacttaagttttgtggttattgatagttttaaaatgagtagaaaatgaactggttaatactgcttttaaatttgattctggagtttctcctcttcgtgagcagtaactgaagcagattttacattgttcctaaatgtataattttaaaaagctatcctagttaggagtaaatcagtggttcttacagtagagtgagtagttacttgttttcttcattttcatagttgccaaccatcatagctgacaatgcaggctatgacagtgcagacctggtggcacagctcagggctgctcacagtgaaggcaataccactgctggattgggtaagcaatcaaggggaactttgtggccgttgttaaaagtaactcttttcactaagctttttttttcttttggaacataaagagttacaataaccgtataaaagactcttttggactttgtcctcataatcattacatgtgctgggaaaatgtgtgtgactttatatgctcagcatttcccaaact

SEQ ID NO: 8563 - DNA, 1192 bp, Homo sapiens
tcactatgttgttcaggctggcctcaagcaatcctcctgcctcagcctcccaaagtgctaggattataggtgtgagccactgatcctggccccttttattttatttatttattttttgagatagagtttcactgttgttactcaggctggagtgcagaggcatgatctcagctcactgccacctctgcctcctgggttcaagtgattatcctgcctcagcctcctgagtagctgggattacaggtgcccaccaccatgcccggctaattttttatatttttagtagacggggtttcaccatgtttgccaggctggtctccaactcctgaccttaggtgatctacctgcctcagcctcccaaagtgctgggagtacagatgtgagccgctgcacccggccccttttaatttttttaaaggctttctttgagctcatttgtaggcttatctacctactgagtaaagtagttgggtgtcctaattttattaataggattaatttttattataaatcattagagatgttttgatactttagttaaaactgctttttagtaaatttgtttttctttgcagatatgagggaaggcaccattggagatatggctatcctgggtataacagaaagttttcaagtgaagcgacaggttcttctgagtgcagctgaagcagcagaggtgattctgcgtgtggacaacatcatcaaagcggcacccaggtaccctaacacttttctcagaaaaaattactaacagcaaaacaaaatagggagctgtatttattttataattagagttaatgaaaagcagagacagttttgcctggataaaagtatgtaagttatttaaaatatcacaactcttaacacttaagccagaaaaacttaaggggaaagagggatgggcagctgaggtagctcttaggattgaaaaggcacagaaagagccatgcttggaaaggtcaagtactgaggacagtagatgctgtgatgctttctattgtctttaaacagaatgatagcaaaaggaaactgagttctgtaactaaagtgttctagggcaaggtcatatagccacacctactcccagaaatcttcacaagaagtcagtgccctcacccacagttgaaataacgcttaaaaaatgtataataccttgtttggtctgatactgttttagagatcaggtatcttt

SEQ ID NO: 8564 - DNA, 1238 bp, Homo sapiens
aagattcgtaagttagagaatagctcgaataattgagtattgagtatattcacttaatgaaggtaacagcattgacatttactcaggatgctgaatgtctaccttttcttgggctaaaatgatagtctctgatgtatttaacaaataattgtgacaaaactggtgacttttgctttattgataaaactgggatggtcacaagtctgtggaaaagtttatgtgaattattgaaaaaatgtaggtacatctttaggaaatgcacaattgacatttcagctaaggttttcagcgaaacattaaaaataatgaagatggtattttatgatttaaatatctctcttttctgtttgtatagttgatcagatgttttgggaggttatgcagttgagaaaagagatgtcattggcaaagctgggttatttcaaagaggaactctgatgctctgcgtgggaccatgcctgaactccccgaataactgaaaaatggctgaatatttttatggttacttgatatttatttccaaggagtgagcctaagacttttttccccttttgcaaattgctctaagaagtaccatgatttcttttaaactgatctatgctgtgtttgcttattctttagttgaacacactatgaagaattccaggtgtactagtgaatgtaatttatagttgccaaaaaaaaaaaaaacctgaaataaataaatgttagattgaatgtgtgtacattttctcttctagctctgacatggcatttagggttagcagaatgtattaaatagtaattttcaaactacacagtagcttccttccttgtgagaggcaagaaagaagtctgagtggatagtactcactttccaaggcccccacctctagaatggctttatttttatctgttttctatattgggtttcaaaaaagattttatttgaagaaatacttctgctgctacaaagtttgaaagttactattttaattattctgctctctgtaactgaaagaatccctttattttggttattcattaaaatataatagaaggcagtcagattttatcccagagatgtattcctgagtgtcttgatatagtgtattcatgttttatatgtgttgaccactatattgtcattggagggacatagatgtaaatgagtttgacgtgtgtcaaaggggtttaaaggggtgtggattgaatgaatggtacgtgcgaagtatatgctgattatagaaccacttgat

SEQ ID NO: 8565 - DNA, 1244 bp, Homo sapiens
gtgttaagaatatatgttgcattctcattttgttgcatgggaataaacctacacagaatgaatcggtagctgtgtgaataacttgtatttctatctatcatatataatcatttggaggggaaggatttatagttaaatgattgaatgtgaattgtatatttttgagataactggagaagattcatgtaaaagaaaaaaatatgtcagttgtgggaggggtaaacttttttgtccacttcattttttattcactgtaaatttctcccttgtgtgtgatgtctggcagacagtcttaattgaagaaagtagaagtgggtaggaagaatgtttcatatttaataatttctgttgcaaataaagtatgccagtctagcccgcgaaaatggttacgaggaagactagagtatagaacaattactttttgttttttgttttctgtgtatcatattgaatatttttgctgctgttgatatatttacatgttagtaattttgatggcttttggataattccactctagagggagacgtggtgggcggtccttcctgtgacacgacccttgagtgacagttctatttgattgcctccggtactgtgaggaaaggacacgactctatggtgaggactgatggacatacattatctgagaaaagaaactaccaggtaagaccagtctttcttcttttttctctattggtcttatagctacattgaaactgttcaaatgtgttatatgtaattggaaccagcaaattggttacacctcaatttgaaaatttgggtttataattttaaattaagtactggatttgatagttgaaatagttgggaacacttttcaaaataaagcatattcataatgtatattttttagtgtcaaatcaggttttctgagatatttgtcaaaacttagattatttgatatacaagttatgacttcatgactgaattcaaaatggtaaaaacaaaagtgttgattgcttttacgtatattattcctggaagactaaacccgaagtcttgtgctatattttggataacaaagtatatatcacagaaatgtagacaaaattgagtagagtatagaagaaatagaaatgagaaacccagggtgcttagagacccaaattctattgaatttgttattagtttgctgtccttaaatgctagattcttgttttctcatttaataaggtggttaataatattcattccttattcagtgtgtaggaaggctggaagaa

SEQ ID NO: 8566 - DNA, 1212 bp, Homo sapiens
catatcttttttttttttttttgagatagagttttgctcttatcacccaggctggagtgcagtggcacgatctaaactcaatgcaccctctacctcctgggttcaagagattctcctgcctccgcctcccgagtagctggggttacaggcatgtgccaccatgcccggctaattttgtatttttaatagagaagggtttctccatgttggtcaggctggtctcaaactcccgacctcaggtgatctgcccgcctcagcctcccaaagtgctgggattacaggcatgagccactgtgtctggcctggatttcatatcttatttaaatcctatattcagattgttttgttttaaaatcttaaaatttttctctttattatcttgtttggttaaagtgccaggttttttttgatggaggggtccttatttgtttttatcagcatggagcagttaagaaattcactttttcccaaggattgtacttatatcagagttatgtgtaggttttaaaagttcactggtccacctttacgaattttaagtacatccatatagtacaactttaattctgcttgttgatggtgttaatgtgtatgagagccttagatttaatgttgagtactcaagagagcaagagagtgtacaaggagtggataggcacaaagtatttgaacacactgtcttacatgttttcataatggccaggtaagctctgtctttgcattttctggaaaagtgtgcaagtttgtggtgagcactgcttttttttttttttttttttttttttaaacttagtactttgaattagtctgaaagatgaatctgggtttggccagtaatgaagaggtgaacagggagtcataatgttgaaactggacattcagatctttatagcatgatttccttatttttcaaagagcggaagaatcccatcgtttatcatgttctggttggactttcttactgtttgctggagttgaacttcagagctatggcgtcaaccctgctgtaatatctcaggggagctcctagggtggggctggtgccatggctcaccctccaacctttccttcttcacttcagcctccagctctgagctttccaatccccagagtagcaaatgttgaaagaagttgcacaggtaagtatgtggtggggaaagccgggggaaaaatggtactgtcatcagtattttgagggtggatgttgggcca

SEQ ID NO: 8567 - DNA, 1240 bp, Homo sapiens
acaaatgaataagcaggttatatcattgaaataataactttataccagtatgatcaatgaaagattgtacttcagttacatgagtgggtacttgcttgagataaaattctagtatgccactatatatgcactgattcaaaaaacggtatatttcagtaaacttagattgtaaggaaagatgaatgcttgggaaaacagataactgagaaaataaggtgatgacagatacacaaatgtggaagatgcatgtgaagattttgaataattaaacctaaacttaatttttaaaaaatctatgtatgggaaaatgatattggccatttttgaagagtaaggtatacttagttttttaaaaggaaatggaattgttaagataggctttatgtgattctcctacttttagggtctggaaataaacatctaacactttattgttataatcagatttatgactttatcacatgcgccactagccattagttgatcaatttctgtatcttagcaatgctcccttcatgttctgttttccacataggagtaaggtaacactgaacattttccaaagtattacccctgataaaagtaatatttttgtttaggtgacaaacagcatgtttggtgcttcaagaaagaagtttgtagagggggtcgacagtgactaccatgacgaaaacatgtactacagccagtcttctatgtttccacatcggtcagaaaaagatgtaagttaatcaattatgttgtattttttcagcaatgtaagtctgtgtctgggttcctgaaaaacagcatatcaagtgcagaatactgtctgtggttgagtgacaatcttttcagcacagtgctagtccctttggtgcttgtatccttttgggatacaaagacaatgaatttgtattctaatggggaaaataaatatcccatgattctcaaattgggatatggtaatactgtgatagaagtactcaaagacatggagtaaacatggtataacttctagatcactgattttttttgtttgttcaatatgggaaataacttgtttgatattaaaacaaatgcagatatagaacagaaagcagatttacgcagacttgaagatataatggcaagctgtaataaaactttatgcttattgtgtcatctagctgtaattctggacctcaggtgtatctctcctctgttcagccatagggatactataataggaaaaatttggaagaactgtattcaaaatgtg

SEQ ID NO: 8568 - DNA, 1595 bp, Homo sapiens
cggcctcacctgccatccaccttcaactacaaccctgctcagcaagccttctaaaaaaaaaaaaaaaaaaaaaaaaagacttcccttttcttggggtatggctgtctcagcacaatactcaacataactgcagaactgatgtggctcaggcaccctggttttaattccttgaggatctggcaattggcttacgcaaaaggtcaccatttgaggtcctgccttactaattatgtgctgcccaacaactaaatttgtaatttgtttttctctagtttgagcagggtctgaattttttcatttatttccttttttgccagcagacagacttgagtctgtaaagacaagcaaatacactgacagaagtttaccatagtttctaaaatgtaaaaaagaaaacccccaaaagactcaagaaaattagaccacaaattttgcattgttcattgtagcactattggtaataaaataacaaatgtttgtgcatttttatgtgaagatccttctcgtatttcatttggaaagatgagcaagaggtctgcttccttcattttacttccccttctgtttttgaaaggcagtttcgccaagcttaatgcaagaatatctgactgtttagaagaaagatattgccacaatctctggatggttttccagggttgtgttattactgagcttcatctttccagaatgagcaaaacactgtccagtctttgttacgattttgtaataaatgtgtacattttttttaaatttttggacatcacatgaataaaggtatgtatgtacgaatgtgtatatattatatatatgacatctattttggaaaatgtttgccctgctgtacctcatttttaggaggtgtgcatggatgcaatatatgaaaatgggacattctggaactgctggtcaggggactttgtcgccctgtgcactaaaagggccagattttcagcagccaaggacatccatacccaagtgaatgtgatgggacttaaaagaagtgaactgagacaattcactctggctgtttgaacagcagcgtttcataggaagagaaaaaaagatcaatcttgtattttctgaccacataaaggcttcttctctttgtaataaagtagaaaagctctcctcactgcagtgttggctttgatttgaaattgcgaaattatttcttcaacatgaaaaatagaggaaacaaactgaagttttacagatatcaaactgaatggtgtgactcaaatgtctttttcagcttccaacaagtaatttaatggaaatatagtgaaccgtttcacttgtaggttaaaaatgtagacagtattaatcagagaaaacttttttaaatgggttgtggcagcattagaaataaaacattctgaatactcttggaacccaaccaaagtacttctgtgaaaaatttatgagaaatttcttgatagacctttaaatttatctttaagaagtaatgtgcaaatgaaggtaagccataaggtgggaatgggtagactttaccttcagtttgctggcctagatatctcatatttacaagttagtggattcttttcccatctaaatacaaatactgtattttaaaa

SEQ ID NO: 8569 - DNA, 1159 bp, Homo sapiens
aattgccaaaattatttgaatgattcttcaagattaggctgatccctggctaaggtctgtgtaaggcagacaagcgttattgatcatatcaagttccctacaatatcctgtcctcaaaaccggaagcaatgaacatgatcctcttcggttggataaatgaacttcctgtttggcctgcttctaggccctgccagattctcataacatcatatacgtaagtatagttcctcaaagtgactgacatttattttaattttgctttgtttttttttattttctcccccattcctttattttgtgttattcctgactcacttgacactctctgatgcctgagagattcctgtttgggatttaatatccagggctgtgtttacagtaaaaaaagcaggcagtcccttttagtttttcctttttaaatttttttgagattcttcatttcaggatttaaaactatagcagtccatcttaaggaaagtgtaactgccatggccacaagtctgctagttgcacttgaatgctctatcagggttgtttattaccctttctacgttctggactccttgccgagactgtttaacttgaagattaaagaaactattgcaaatgccagtgcatcagaacctaagagtggtcaaatattatgtgcaatttttttgtaaagaaattttaatttataataaagtttaacagtttaaagaacagttaatatttgaactgctttgtattgaaatactactttgtagtattgaaattgtttatatacttttttaatataagttaactttctaaaaactcttgctgtctttattcacttttcacactggtgggaaagggttgaagtcggagatacggatattcaccataacttatagcaatacttttttatcttgaaactgctttcccattaaaaaaaaaaaaattaatgactttttaattcatgagaagatggatactgttgtgaggacagtgaacagagaggtttgcactaccattaaattccttgttctcaaattctcagtgtttagaaagtgcctcccaaccgtagtttgaatgatttgcctagtgacatgccatcttatgttgaatatcagtgtgattgaatgcaaaggagaccttgctttttattttgttttcagtttatatttggttgttttaa

SEQ ID NO: 8570 - DNA, 3512 bp, Homo sapiens
tgtcacccaggctggagtgcactggcttgatctcggctcactgcaagctccacctcccaggttcacgccattctcctgcctcagcctcccgagtagctgggactataggcgcccaccacgacgcccggctaattttttgtatttttagtagagacggggtttcaccaggttagccaggatggtctcgatctcctgaccttgtgatccgcccgcctcggcctcccaaagtgctgggattacaggcgtgagccaccgtgcccggcctacaaatgttaacaaagcaattaccaatggcctttttacatattttttctttaatgaggaataatatgcatgtagaaaagacctacttaaagtcttcatttatattctttcaaatcaaatctttatttaataacttatatatgttgttggaatggttacatttttgcagccctttgtattttgtggtagttgaaattgtatcacttctaaacagcaaactgtttttgtttttaattagcagatatctgaagtactatttttgcagggtttgcacaggcccgtaactgtctactactttgatataatctgtatacatcctgtatgctgagctggtaaaatacattgtaaattacatattaaatattttatctgcttttacaagcgcaaggtgcaaaaatatatacaatagtctcattgatgactgtaaagtgaattaacatttggtgattatgcctagcttttttgactaatataaagatcatagctccccttcacttctgtcttaacttgaacatggcgtgtttaaattttcatacatactttacttgaattattgctgttgtcacatatttttgcctctgtgagttcatctgatgattgagcagtagcatttgccttttgggttttttgtttgttattatagaagagatgacttctgctgattttgctttagaatggttaccttagaagaatttgggtggctcatgttgaatttcacttctgcaatagctttcattttctcataggctttataagagatgggttcagtggtatgagcagaggaagagatcccagatagtagccagttaaccaagactcattcatatagcacgtagtttatgttcctgaggcagcacttttagatcctttgtgagcaagttctatttgttcattgcttgccagagatgaacacagaatgttctgtttcattttacaagaactatcctgagtttctgtggatggaaacattacatgtaatgcagatatagtgaacactggaaagatttattaaagaattatatttgtgtatactttataaattagtccctcattagatttttttttcttaagcataagactgaacttaaatgtgttaattttagtagaatcaggcactgctcgcagaaggaacacagattgtagagattaacataaattgttcttgttctaatatatatattttttcatttctgtcgtgcttggaaaactagtaaatattatgtctaagataaaatggaatggcccctggatttacttcttataagaagcagtagtatgtaataaagctattagcatgagcaattaagaggctataaagagattatagttacaaaagaaatactgccatatttttaagttaataacttaaaccttctcaaatgggttaaaagttgaatgaattgacaccctgatgttatgatgttggaattttaacttaaactgggaggcattctgtgagccttcactttaccttctttaattattgtccttgctaaactcaacacagacttttctgttatgtgtttttgaggaagttggggtgggaagagtcagggagataagctaaaattgtcttcttttatggggtaattgtactctgtagtctcttggtttcctgtgaagttagtatttatgtgggggtgggggaaggtagcaagaatcatgggtatcacggtactttgtttttgacctcctggctctttcagacagagtgaagaaagcttttccattcttactgttgtagaagtagataggaaataagcttttctcattacagtgaaatatgttttaaaaactagagtagctgggcacagaggcatgcatttgtagggccagctacttgggagagtgaggcaggaggatcacttgaggccaggatttcaaatccagcctaggtaacactgagacctccatctcgtaaaaggcacaaaaactagttagagatgaaattgagctttattttaaaaaaacgttctaaagcctgataattggagagctatacttcagcttttcatcctactttaatgaaacagctagataggaacctctgctccagaattgccagataattattggtgggtcataactattcttcatattttttttttcttttttctcctttggtttctgtgttatctttcttaacctcacgtatttctttatcctttttagtgggggcctgtaattgaggctaattcaatagcaacaatagacaacatgatatggctgctgtcactttgaaacccaaaaggtctttgggtaggaatagagtaatgaaagaggaccagtcaacttcagtatatatacaaaggaaagacaaagagatgataaaccaaggctgaggaaatttttctgatgctttcttcatttctctaatataccttttgcattctttttctgataattgtgctattaggcagaagacacaagttaccacgttgtgtattaaaagcagtaggtaggttgtgccagtattttttcagccagtaagcatatacagttaacttatataattaaaaattggtttaagatagtgattaaaaatacctgaatattatgttaaaagtatacaatcattgtttctgtaatgatgatgggtattctgcttcttgtttttcattgtaattacaggggaagattgtttttgaaaatgtatattgccatgcttttggggtaagcagtaatgtgaaaagaaaaaagcattatgttattgtatgaaatataagtgttcagatttgttttgtctggggtgttgcctaagaataccctaaagctatggctgttactgcattgaaatcttttttttttttaatagtagccatatgttattagtggagtactttatatttgacattaaagtgaagaagaagagtagtacttcacttttaggtttttagtagtgaaagataaaattggaaaaatagggaaagagcatagggaggaatagaatggaagtcaagtaaataaaaaactacaacctgacagttttttaaatcactttgaaaagtacattacttttatcaaagagtttctaattaaggcaaactatgcattatgccaaatattaagaacattttaaaaatggattgtgatactgtttatttctttaattatataatttgcaattttctgtattataagtgctaccaggattctagatagttgatcttacatattcagatagtatagtttactcttataattacccgttacgttatctctaaaagtagtttgatctgtgcctttaa

SEQ ID NO: 8571 - DNA, 1198 bp, Homo sapiens
ttgaggaaattgaggctgaagtttattgaaacaccaccaagattacatagctataaaacatgtaaatttggatttgactgcaaaccccatacttttctagtaactttttcttccttttaaacataatagtaagctgcatttaccctttctatattttgattattttccatagaggaatttttaagtaatattttgaatatctacccactgtagtagttttattggaaagcagtgaatagaaaaatagttaattgctatgtgcctgaagtgttatgtgtaagacaaatatataataattgacacagtttttcccttcctttcttgattttcttatcttctcatgctgttatgataagcctatgttagcctagaaatttcacaactgtttcatgcactattaagggaatcagttgttggtgctttgatgctgagcttacgtgttttttctgcatatgaatgtctggctgcctgtatctattgattttcccaagcaactttcctctctctttttacttaaatctcagttaattcttaacagtgtctcatttgtagaattatatcaatgtagttgcctgttgtgataacttctctatcaaatgtaaaagggagataaaacacatctctatgtccgtcacaattttcctgttttcttggatacatacctaacgttggatgccaaaatgctgctacattattgtatttccttactttataaattaaaatataacacatatacagcaaaatgcacatgaaaataaatgtaaagcttattgtaggatctaaaactaaatacctgtataaccacgatgagaatgctactagcatcccagacatcacctgttggccctggccaataatacctctcacacaagatgacataaatcttgacttttaatgttgagtccatttttgccttcggttgagaatcatgaatggtgctaccttatgtgttctttaactcagaattgtctttgtaagccccatccatgtgtggcatgatactgtattttattcattttcattgttgcatatcattttttgaataatataaaagcatttaaccattctatttatgatggacatttggagtctttccagttgtgcattctatataacgctgcttggaacaatcttaaataaatctcttcatgcaaatagttctgttggaaacagacctaggaatggaagtactgattca

SEQ ID NO: 8572 - DNA, 2448 bp, Homo sapiens
agtgcctgttgatctctaaacacaccaggatgtgcgcaagatcctgtagtgcccccagtgcacaggtgagcagttgtgtgcccagcatataaaatttttggttcctcagcctttctgtctgcctgatgtcaagggcttcttggacagtttggacgttacagttcgtcaggccgtgatcagtggcctgcagtgggactgctcctttgatatctgaacctctgttatgggcttctctgagacaagtaaatgtcaggtgcaagatctggatactaacagtttcagtttgggaaatccaagaaaaagaattatcaagtttgatagggaagctctgtagccttgactccagcaagaagaaaaggtcaaaaccacgtgtttcccaaaagtccagactacaatgattcagctgacttgaggacaaggcctagcatttggctgagcagagccctcttccttgccctccaacctggtggcataggcttggcaaatggacaacttggttgtccagacaggttgaggattcggttatgatcccctggggaggtagcagggacctctgcaactatgcatgatttctcaaacttcaagattcatgtctggatgtattatgctgtggatataagtttagtagggcggtcatttcctactctgagttactggttacctagccagtccatgggtgtgacttggtccttaagtcaggtcactatctgcctcccaccctgggggcaggactgaagtatggaagagcatcatggctgtgcaggaggctgtggtttgaaaactgagcccagagggcactttcagctgccctcaataatgtgaatggattagtgctaggagccaaggagcaggactggattatctcatctgactgtgtgcagaatcctgttgaatgtccctgttttctttggttgggcagtcagagctctgctatggtgaacatccagactgtcaccactttctgtctgccgctcgaaagggatagtcctttccactcggtcccctttggatcttcttgacaacaggagcagtccttttattgttagaagtcagagaaagacctccagaatctcctgactttagggaatggtataggggaagatgggaagtaagagtcacatatcaaaactaccctccactttattccctgagcgagggtttatgaagtataaaggggtgggagccccgaggtgagcgggaacggtgctgctttatttgaaatgttttcttacctcattctgtgccccagtagggggtccagcctcatctgtctggcttggccctgtgttcctcctgtcccctgctccactgcctatctggtgccccaggtgctgcttgccactccagctgtcacattgaacagtttcaattcagctcttaatgctcctgcttccgaagcctgcccaatttcttttttcttggcctctgttttttttttttctttctttttcccttgtttttgtagaagactcagaggagaatctttcttatggctccctctgttgagattggaattggaagagaacttaattttttgtatttaaaatgcagtgtcatgcctataagcatttctcctatataggactgctttgctagtgtgccctcttgctgtgtcttacttcataaggagttgtatcttcccacctccatttcaatactgccggttaggacctaagtagaagagcagtaaaggctgattgacacacagggggatggagttggtccttgtccattctctcacccttgctgtgcatgtatcaatccttatcccagaaggtactatttagactgtatagactgatttagattacatactttagaggattaaggaaaccatagagtttgggccttggaactgttactgccttgtcctagagttgtcctgatcaggcttggggcctagttacagattagtcttaaagaattgcattaacttaaaaaaaatcaaaccttggcaagagctaaaataatttggagatatctttgcccttgacttgtagacgacatctaagaggatgaagaaaggagagtctaagtgagactctggcctacttcctaacaatgtcttggaagtgggatgatggtaaaggagaaaggccacagtccaatccctctgccttcagatagggaactcaaatcctgaaattactgttttctttctggccttttctcctggttagaggaggaagcggaaagtagttttgagtagtattttgttcatattaccccccttttgttttttgtttctggcccctctaccaatagggcagtagcctcctgccctggatgggtataaggtgggcttggtccaacaggtgcccagagggtacatactcctttctggggagagaatgctccctaccatatagttgacagtggttaggaactctccctttccctacctaccttccttttaatagcagaattcctatttttcccttgattatg

SEQ ID NO: 8573 - DNA, 1222 bp, Homo sapiens
tggtggtggttgttcatagaagagtgttctttataaattatattattattgtattttttgaaaaatttatacgagaaagtggtatataagtctttgtatacattacgaccattgtgattatccattaaatccagtgtctgatgctattggttagtaatgatgtcccagcatttgatgttccctctctaatgataacaagtaaatatttaggtttatcccttttgaaagtttggttttacttttaacagtccatgaacagaaaattaaggcctctaaaatcagatcccctagttactcctctgttctgaatctggggaagtagtaaaccaaaaagacagggaaaaccagatatttagagtcgaagcagcatgcaaaaaataataatgtttttaactaatgaaggctactggagttactaagaatcacctaaaaatgtgctactgtaccttgctcattttgcagatttagaagctgaaacatgggttaggttacttactaaaagtccacctgtggcaacctgcaaataatgcttatttatactaaagatgagtttatctgatagagttaggaaatttcttcttttgagtaagagtattgctataacatatatttttttctgaaatgttttaaaatagaagtacacctaattgttattggttaaaaaaaaagccatatgtgaatgaggttggtttttgggttttttctttcctgaattgtattagtccaaaagaactaaattagggtacttgtgctgtaccaaaatggtaattataacagacagtattagaattactgaattaacaatgagaaagagagaagtgtatctgttacgtggatatatgggccagcctggatatacaacagagtagtaacctgtgaaacaaacatagaatatcctcttagacattgttcctcataatgcactgacagaattcacatagctcttaatgaaacaatttaagattgatgtacgtacgtttgacttggtctcgctgtcggttaactgtaaagttagggggaagaaagaaaaaaaattaaaagggtagacacagttgagagttttattttaaaaagctaagtcttataattatgaccattaacttgctttggctttattgcagtgactttccaagtttaattattcaaaactttttgaactgactgaattaacttggtatttttaagttgactttttacataaactttataaaccttttataaa

SEQ ID NO: 8574 - DNA, 2491 bp, Homo sapiens
tctattttaatgggacgatttgtaacagtttttaagcattagaaaataaaggtttttaaaagatctggttgtaggagtgttcgggaactggggagcagtgcagtttgttagatccttccaactactcttactcagtccctgagagtcctagtctattattcctgagaatttgttatattaggattagcaaaaacaaagctgattggtaatataactaacataaattgcttggtaactttatttttttaagattatggtttagcgtgtgtcacattttatggagttaattctacagtgtaaagtttgagcttgattttagcatttcagtgacttgctaataaaataaataatttaccaccattgtcctataccatttcttttgacaacagtgagctactgttataattaaggcagtaattactattgagaaattcactgaagcaggtagaagaagatagattgacttgttgttttcctttaacagaaggatcaaaacccagcagagtgcaagcagcagtgaagcaggatgtatgtggccttgaggataacctgcactgtaatagcctaaacacaactcttatttacttacagccttatgtttttgtattttcttggtagactaggtaatttttttttaaaggacaggaaactgatattttaaagaccaatttgttctacctagcattttaactagtttttctgccagctatgttgaatgcacaaattctgtcacgcatgttcattcattgctacataatttggttcttctggaatatttttatgtagctcttggagtacagctatgaaaattaacaactgttaaaggaaataccttttttttttttttgtaattttttccttgaagaaccaaagtattttttcagctggttgttgaatagggttaagtccgcttggattagctgtgcctttcattactttgttacagaaatgcagtgacttatactaagacaatttattgtttaaaaaaaaaattggcaagacaactatatggttaagaatttccagtatgaccacacccaataactgttattagagtgttaatggattattgtgttttaggtgacatagttaactgtaaagtaacctgactcagtatagttactggtaccacagtgaggtgaataaaacgggattttcagaagttagcctgaatttaactgtatttttaaatttaacctccattaactaagcatcttttctttgtggtagggtctaccttctgcttccctggaaaggatgaatttacatcatttgacaagcctattttcaagttatttgttgtttgtttgcttgtttttgtttttgcagctaaaataaaaatttcaaatacaattttagttcttacaagataatgtcttaattttgtaccaattcaggtagaagtagaggcctaccttgaattaagggttatactcagtttttaacacattgttgaagaaaaggtaccagctttggaacgagatgctatactaataagcaagtgtaaaaaaaaaaaaaaaagaggaagaaaatcttaagtgattgatgctgttttcttttaaaaaaaaaaaaaaaaattcattttctttgggttagagctagagagaaggccccaagcttctatggtttcttctaattcttattgcttaaagtatgagtatgtcacttacccgtgcttctgtttactgtgtaattaaaatgggtagtactgtttacctaactacctcatggatgtgttaaggcatattgagttaaatctcatataatgtttctcaatcttgttaaaagctcaaaattttgggcctatttgtaatgccagtgtgacactaagcattttgttcacaccacgctttgataactaaactggaaaacaaaggtgttaagtacctctgttctggatctgggcagtcagcactctttttagatctttgtgtggctcctatttttatagaagtggagggatgcactatttcacaaggtccaagatttgttttcagatatttttgatgactgtattgtaaatactacagggatagcactatagtattgtagtcatgagacttaaagtggaaataagactatttttgacaaaagatgccattaaatttcagactgtagagccacatttacaatacctcaggctaattactgttaattttggggttgaacttttttttgacagtgagggtggattattggattgtcattagaggaaggtctagatttcctgctcttaataaaattacattgaattgatttttagaggtaatgaaaacttcctttctgagaagttagtgttaaggtcttggaatgtgaacacattgtttgtagtgctatccattcctctcctgagattttaacttactactggaaatccttaaccaattataatagctttttttctttattttcaaaatgatttcctttgctttgattagacactatgtgctttttttttttaaccatagttcatcgaaatgcagctttttct

SEQ ID NO: 8575 - DNA, 1151 bp, Homo sapiens
aaagttattaaggaaatttaaaaatgacaaatcatttgttaacatggtgtgagaaaaatcatggaaagtaaaaagtaaagttgagcatttcttcccttcatcatataatttaaactgaagagtctgtcttttttttttttttttttcggttgcccaggctagagtacactggtgtgatcacagctcatttcagcctcaagctgctgggctccagcaatcttcccacctcagcctctcaagtagctgagactacaggcgtgtgccaccctgcccagttaattgtttattttttgtacaaacgcagggggcgtctcactatgttgcttaggttgctcttgaacttctgggctcaagtgatcctcctactttggcctcctgaagtgttgggactacagttgtgagccatcacacccagcctctaagagtcttacatgtgccaaattaagtaacacagttattcctaaattttctgcttttgttttcctttaaaaataggatgatgatgctgaagctatccttgctgcagacttcgaaattggtcactttttacgtgagcgtataatcccaagatcagtgttatattttactggagaagctattgaagatgatgatgatgatgtaagcgaatttgaatcctgcaaagaaataattggttgagggtatagtggtcagaattggtaatagattagtttagtttttaagaagcaggacataatataattcaaaattaggctaattactgatgttctgtatatagcttttctgggttttaagtatgtctccttaggatttttggattcatttatcttagcttttaattttctgctaataagattgttctgagtttatgaaacttttttatgtttggttagtgctatagatctattatgcccttgccttgacttcacagagctaggactttctttagtgcacaagaaaacatttactgggaggcatagaatttctattcaaggtagtattgaatgatggttaggttaagattaggttgcatatagatgttttgaatatgtttattgctcaacggcaattgttagagtaggctttaggtccttttcgtacagtgcattccacacttaagtgtaggtgagtaatatttacagtaatacttgtctgatcatccactttatcca

SEQ ID NO: 8576 - DNA, 1131 bp, Homo sapiens
attctgatcccttttcttttgatggaccagaaattatgggttgtacagggtgagtttaattttactaccttaacaaaatgttttttctgtttttgttatacttgatttgtatactcggttattttcagttacatatgtacatagtctgtctctgaacattttggtaatatgttttctgaaaagtgcttatcaagtttcctgtaattctccttggacccatgactgtctcacatatatttttgcagaggaatgcttctttaaattatactatgtgtttgtgctaattgtaaatgtgtttattttaaatatttgcttagaaataaaatttttccctttatactgctatagaaaacatttgaagcaattcacccttctaaaatttgaaatctaaatagaacatttacttctaaaagtttagcagttgaaagattgtcaattgtaatagatttttcttctttgttttgcaaggtgccagatagattggaaaaaaggaaagaatgtcactttgaaaactattaagaagaagcagaaacacaagggacgtgggacagttcgtactgtgactaaaacagtttccaatgactctttctttaacttttttgcccctcctgaaggtaaataatgttttagcttgagtattaacggttgttttataaaaagcattgcttagcttcttattcattgtaatttcttttctcaattttgcagttcctgagagtggagatctggtaagttgaattgttatatatttattgaattgttaagtatatttgaaattaaagcactgaatttcaaaaatggagagtgggatggttgttacattgagttctgaggcctacaatgcatggggcagactttttggatatgaaaaataattccattcaaaattatatcagtgcttctgctgagaaacactgagataaaaagcttaaggttttcttttcttttgaaacttcacatattgctgtgagggatttaacttttcaaaactgttgtcttccttagtaaaaccagaatatattaagtcacttatactgttacattcctaactacattatggttcaaattcattcctgaatttgttactccaatgtaaatatggtttcatattgtgactaagtatgttcacat

SEQ ID NO: 8577 - DNA, 1152 bp, Homo sapiens
ggagactaaaaaaataatggtgtgtggaatcttgtcctttttcctgatatgtctatgctcccctcctttttcctaataacttgtatgggtgagatatatgtaaaagaaaaatccaagtaatcattgttctcagaattaagatggtctgtccatgacttcagcaatgacaagtccaacacttaacttgggtaaagatttagggttgacaatatgatttacattttgtttatcaatttacccagttacatttctacttttgaaatatagccagtggatcaatgtatttatatctatttgatttttatttactttgaatctaccttttgcttcagataaaaaacctgtcattcactaactccaatgcttcagtttcagtatgacaaaagaagtgtgacttccattttactctgatgctatataactgatttctaacctttcagcctgcctagggtagttaaaagacgagtgaatgctctcaaaaacctgcaagttaaatgtgcacagatagaagccaaattctatgaggaagttcacgatcttgaaaggaagtatgctgttctctatcagcctctatttgataaggtaatgctttctcctactttgtttaatttaacattctagaagacgaattctagaaacataagcagacttggaagaggttaatctttagaactctcattgaaattgttattagaggcagcacttggaggaactatcaataatagcagttaaagttgtggtatgcatttgttaaatttgtaagacttcttagtgagaaaccactggttttagcttggatgccagtgtttttatacagccttttttttttaaatcattttagcgatttgaaattattaatgcaatttatgaacctacggaagaagaatgtgaatggaaaccagatgaagaagatgagatttcggttagtaccaactttattttggtatgtttttaagatgataaaatcttaggacttgtcagaaatgttagcatttaatgatggagtacaatattatataaccagttgtattttttcattttttaattttacgtctttattacacgtttttctattactttatttttaaaaaacagtcattcaagattgtaatttgcatggcaataagcagcggtttcatgggttctaagttt

SEQ ID NO: 8578 - DNA, 1167 bp, Homo sapiens
gtacttgttgacatcacattccccaaaaacctgcaaaaccaattttataaagcttcaaaagtataaactttacatttgaccagatgcttttaatgaaagtgtaagcacttccagtgtgtacttgtttacatatgaagttagaaaacggaattaccttttgaatttcctatttcatgtctttgaaagagatactaattttgaaaatgaattttaagtttttctgtaactttttttggtaattggtacatttgaaccttggtgtgatactatgatattatagcaaagaacagtctgaacttgatcaagatttggatgatgttgaagaagtagaagaagaggaaactggtgaagaaacaaaactcaaaggtattactttaaattacttcaggagccagtgattgctggcacatgtctactagagggtagttataagtaccagtctatttttttggacccttgctcattgtcccatttatctactggtccatacttctagtgtgtgtgtgtgtgtgtgtgtgtgtgtgtgtgtgtgtgtgtgtaaggggcgggtaggtatagatacagcaactcaattagaagtcattgtttgcatcctgcactgttggagtgacttggtgtacttgtgtcaaacagctgcccatgagttttgtctgaatttagaaatgttacaggttgtgatgtggtgcttataacagtatgtttagtgtttaatatatggagaacatgtagtgtgtgtctttttaaagatccactccttcaagcagaagagccatttattaaatgtaggtaatattcacaatttattttagcagatatttttaaaaggagtggtggtgggggattgtactacttagggtatgtcttgtagatctgcgccaagaatattaaggtaccagatgactcagcttttcatttttaagccggatggaagttaattgtgaaaagacttcagaacttgtattaatagcttcagcttttgtttagtaacattttcttaacagatacagaactgtatcctcagtgaccaatattgatatttaaaaatctgtattggttatcctggctgtgtgtacatcatctagtaattgaattattatcagaagtaaattgacctcaaaaaaagtaattgggaaaattaagtttatggcactttgtgtaataactgta

SEQ ID NO: 8579 - DNA, 1208 bp, Homo sapiens
aggcggggaaggaaaacggttaccgggggccggcgagttgcaggaattaggccttgacagggagcgtccgccgtctaggctgcggcgagcgagggaccaggcgactggcgccagccctgagcgttcccagcacaacgccgaagggggcggggcgggccgggcgccgggcacgcgggccaggccttccccacaactgatggggttgaaatttcctttccggctcagcagggagaaaagatatggtggggtgcttaacagaggaggttagacaccggcgggaaccagaggagcccaagcgcggcgcctgggcctcggggctgcaggagtcctcggtgggggtatggaggtcgccggggaaggaggacggttcagttgctaggcaacccggcctggacccgcctctcgctcgcgttgctgggagactacaaggccgggaggagggcggcgaaagggccctacgtgctgacgctaattgtatatgagcgcgagcggcgggctcttgggtcttttttagcgccatctgctcgcggcgccgcctcctgctcctcccgctgctgctgccgctgccgccctgagtcactgcctgcgcagctccggccgcctggctccccatactagtcgccggtaacggatgggggcctggaagggaagggggaacgtggtgttggctgggcggcctgcgcagatgggagggccggagggatggagggactgggagccgggagtcggggccgctggccgcccgtggcctccggggtcgtcctgtgaggtcggacaggaccgcggagtccggaccccggagcctgagaggggccccggggccgaccagcgcttttatcggggacggctgaggcgacgtaggggttggcgcggcctggaggcctaaggttctctgagctccaccgtcttttccgcgtggaccggagcgaggccgcggtgacgcccgggtgccctgagactcggctgcgccgcgaggaccgggaggcccccggcgtacgggccgggccgagtgcagagccggccgcctcttggacacccccctgcttttccctcaaaaataataccaggagggaggccgctgggagatgaaaagaacggcggaggctgcgaattccgacgggagggaggggctgtggagggacgagtccccgaggcggggagggggcgggggaggctgcgacgctcccgggctctccgcccattggggg

SEQ ID NO: 8580 - DNA, 1142 bp, Homo sapiens
atgaaaatttaattgagtaataattattcacatgtgcattttctttttagctgttaaatgtactatgccatcatccaccatttagtaaaatgtagctggcccaggacatgtaaaaaaaaaaaaaaaacaacaacaataaatagggcatgtgaaatgttaagttacagcaatagatattttatttgtatttcatgttagtacttttttgttttatatcacttataaaggtacagtgtactctttgtcacagctcagttggtaaccgcattccattgaaaagttggccttgtaaaatacaactctcatttaatattcatgcttttgtgcctttaagaaaatattttttgtcattttttgtgttacagaactataatgtgattcaaggtgtttataggcttgtcataaaagggtcatttctgtgtgttactttctttttatatagctatagtatatttaaacaataatactatcttttataggggtttgtctatttacctattctttactcagacattgatgtagacttgtcagattattctgagtattgttaacagtgccttttcgatggaatcacactttttggctgtcaccttgtgccatatacacacaaaattttgtggaaggcagttttaactttctgaagaatatctgtcaaaatttaagaaaacaaatgtataaaattccattttttccagtgtttagcatttctagtaagcagtgaggttgtttgacatacagtgatgatggcattattgataagccatacatgagactgcagattatattgaatcatattaaatgtacagaaataaaatattagatttatatcaaattttccaatttgaaccagtggggaaaatcccacagaaatcagtaagtttacatttcaatttctatcttatttgactaagtggaaagagattctttaaaatgtataacctgccattatgtaatttggtttcattttattctacctgttgtgtgagtttagtatatttaatttactttttgttactctttacatactgtttatttttgttagtttttaattgaagatggactgttgaaattgtataggaccagtgtcttattaatatgattaatatatttagaagagccacgtgaaacccatgacaaaatga

SEQ ID NO: 8581 - DNA, 2356 bp, Homo sapiens
gttatttcattggaatgcatcagttgaaatattgaaatacatccataacattgggtaaatatttactccctgagcccttaagtattcctctttgcagtcccagaccccgcccccccccacccctacataccaccccatgacccagcaactaaaaattattaacattaaatgctctgtgactgtttaatatcaaattgtgggctctatgccaacatttctggcaaatcattacaaaatttgttgttgcttatttttatagaaatattatggctcttcgaaatcatttagtttcaagcacaccggccacggattattttctgcaacaaaaagactacttcatcattttcctcctgattttgcttcaagtcataataaacttcatgttcaagtagaagttctctaccattgaatcagtgaactagaaagatctgatttggcctgggaccagtgttcaagttggtttggtctttattaaaaatcacaatattccgaaaacaaaaaaacctaggagataaatgtagaggtattgacttttcgtatcttttatcttcacactgaaacaagagctatcctatttgattattaaagtgagctatgtgttaagtgccaggacatttctagcttttgtgagaatgtgtctacatatgagtataataaacccacatgtatacacaattgtctcttatgtactcctacctgacagtagtctttgtattctatagtatgttctgagatataatgttaacattgttcataacaaaaaatgctatcaatcttataaatatatgtaatctattttcttcataaaacaggcacaaaagttttatcagtaaggaattacagattgagaaatgatggaataatagacataattaattcaatacactactgttaaaatcatttgcaaagcactcagctcaattatcttcttagaaagaaagaaaaagtatgaatggtcaaaatgaatacatcgagagagataaatggcaaattgcttttttaaaagtttacataagttttttttaacccctagaatttaatatttgtagatgcaggtaaatatatatacttacgtgtatatcagtataaaaacactggtgtgcaattaattggattgattataataccaccttaagcacttgctgaaaaaagtgtggtcaaaattgattgctgtccttttgtcttatttttgtttttcttaagtcagctggttcataacataggccaaattctagagatgtttatagagcatttgaagtgctgataatttatgttttttcattatgaaaacttattttagctttagactccagtgtgttcagtgaataagtagaatataaaaaaatataaccagtattttacttcaaaagccaaaaagaggcaataagaaaagacactttgtggtggcctttatgtgtgcattaaaattggtttctgtaaaacgtgtaataagttgagtatctacgaagagtatcaagttctgaagtttaatttttttattatcctcctctcttcttagtaacttctttctgtggcaaaaccacaattctttaagattcctattgttcaggctaaggcaaatttttttgtttgtttcttcagtttaatattttgattttgtgtttttacgtaaatatttatattccttgaaagcaatttttgccaaggtagttcagtttaggaatatgttgttctaaaatatgtcttagaatcctgaaagcatagattttgaaatgtttttttaatgaaaatgaaggtcagagagaataattgccctgaccacatttgcctttcagtaggaggaggctgtgaaatagtaaaattataatcgtttatgccatgataaatacaagattggtaaataaatacattgattggtaaattatgagaatcaaaatgataaaaagagcctgcttttttccctaaccaatatagctatcttaagtatccttaggtttctgtgaagaaccatttcccatgttttcttggcaaaataatgctgtattccatatgtacatgtgaaatgatgttttaaattgataaaagcttaaataagatctacctatacccagtattttcatgatattagaacaaatgggtttttggttatattttatatttgtcaatataatttttgtattcacattctgttacactctgcctattcattgatatatgatattctgtaaatattgtacaatttgatcttttttatggtttaaattagttaattacatacaaattgattggcttatcacaaaaatcatttcatcagtaaaccttgttaacattttgtactggtgacccacctcttaggactttggtcttatccacgtgtatgttgttttcatttggt

SEQ ID NO: 8582 - DNA, 1189 bp, Homo sapiens
agtgaatacagggccgggcatggcggctcacgcctgtaatcccagcactttggaaggccgaggtgggcggatcacctgaggtcaggagttcgagaccagcctggccaacatggcgaaaccctgtctccaccaaaaaaatacaaaaattagctaggcatggtgacatgcgcctgtaatcccagctactcagggaggctgaggctgaggcaggagaatcacttgaacccgggaggcggaggttgcagtgagccgagatcgcgccattgcactccagcctgggcaacaagagcgaaactccgtctcggaggggagggggcatttgggggaatgaatacaataaagttgtaggatgaaaaatcaacatacaaaaatcagttgtctggctgccccacactctactgacgcggccgctgtctcggctgctgtgtgccgcctaggtgtctgggtgatccatgggcagcagcaagggccacgatgacagaccatgacgaggagcaatgcaagagctagaggcccaggagtccatctaccctaactccttcatagtattatcataaaatccacccggcttcaccattactgtgacatctgaggctggagaaaatgatgaaactgtccagactaccctcacgtttacatacagtgaaaaatacccaggtgaagttctcctttatgaaatattccctccagaaaatctagaagataatgatgtctcagacattttaaaattactagcattacaggctgaagaaaatcttggtatggtgatgatctttactctagtgacagctgtgcaagaaaaattaaatgaaatagtagatcagataaaaactagaagagaagaaaagaaacaacaagaaaaagaagcagaagaggctgaaaagcaattattccatggcactccaattacaatagagaatttcttaaatcggaaggccaagtttgatgaagaattcttggaaattaaaaagaaaaggatgaaagaagaagaacagcaggaaaaaataaattaagttggaaacaactatttgaaacagatcataatcttgacacatctgatatccagttcttggagcatgctggaaacaacgtggaggtagatgagtctttgttccaataaatggatgacttggagctggaggatgatgaggatgatccagactacaatcctcctgacccagacagtgac

SEQ ID NO: 8583 - DNA, 1252 bp, Homo sapiens
cttttcccctcactgttcctgaatgctctatacttgttttaacatttttgctatctttttttattattctgatcatgatatgaccatttaacctcagaattcataattcctgaggggtgttaagaagcagtcccattggtgaggatattatgacttggtgaccattcttaggagtagaaaaccaaggacaattgcttctgtattcagtatccacttcttaatgtggctttatatgtaaaaataataatgcagtggttgtttctgtcaggaaaataaatcttacagaacaactggtggaattgaagctgctgcgctagacttggatattttgggtagtgaagaagcaatggcaatcttgagtctattattgtataatttagtaaaagaaaaaaataatcgttggtggtcctactaagagaatgcagcttttttgagttgtcacagaggctgtgtgtgccctacactgaccagggtttgtaaaaccctttcattctggtacaagagtcgggggtataacttttatacttgaatctacctaccaagtttacatttctcaattcctttttgtaaggtgctatttctgtatttaaataactttcttttaacgtaaagctgctttctgcttatcttattgcactgctagttgtatgtaggtattaattttattgctgcttactgcttttgttttcttattatttagctctgctctttttcctaatggctatattatctatagctatttacttgtaactgtactacatgtaaactgattttttgttctgattttttttctaatatttttaggaaaatattaagctttataaaatagcaataaaaaataattcatttaagaagagatggtggttgtattttttggtaggctttttttgcatactgttttgagtaaaaccattaacagctacaacatagccaaccaggccctcataaacacaagtcagatctttttgctgagatcaccccgtggttgctaaatgctgaatcttagtgcatcagaattacatgggagcttgcgggggttcaggtactgtgtaactgagcttctgatttctactaagtcccaatctctgtaggtttggagcttccagatgattctgatgtttatccagtctaggaatcacaggtaaatgcagaccacccctcaacttcttgtagcatccattaagtcaaatgcttctcattttagctaatgcccacctttcattgagagccaatttctattgttagccttact

SEQ ID NO: 8584 - DNA, 1122 bp, Homo sapiens
gaaaatcatatactttgatgcttttgtttcattccttgtgtagcatctgcaaacagtagaaaagacaagtctctgagaattatgagccagaagtttgtcatgctgttcctcgtctccaaaaccaagattgtcactctggatgtggctgccaaaatactgatagaagaaagccaagatgccccagaccatagtaaatttaaaagtaagaatcttcacctccatcaacttactagcacataaagggtgggatttcatgtgttgatattttctgcttccaagattaaaaatatatatattgtttttgacatacatactcctttcctgcattcatcaaggtttttggtgctgtgagaggtaagttagtcacctactagaattcagcttagagtcctgtcagtgccttttcctcggtggtttcagtagagtgaaaaacagaacactatcctgagaactccggtcagggagggtgtgaattattttgcatttctctttagtattgctgcatccaagacagaatgtctgagttttctttccccttttttccccaccccctgcatactcttctgaagggtggagatgaaaattgtctacaggtaagaaccagaagaatggccagggtaagggtggtgggacatggacagggagagagtttccaagtatcacacccagtgcatcctccttttctgtccatcttggatactgagccaaatgccctgggctgctggtagcctgtaagccctgggaaaccatgagctgcaacatctggctattttttgtttccagctgaaattacagtcaccctatgggtgaaatagctagataaaatcaggattgggaagaagaaagctgcatccagggtgaatgcttcctatttctggatgataattcaaactcctttgcttgatcttaacactgaggtcaagtgggtttcctacctgtaaatcaatttcttgaatagaaaatactttgtggtcattatcgtgcctgtctcatgtgctaccaccccttctgagtatttcctgtactttgtatatatttaagtgtttctcccaaagccacttaagattcaggcaaggcccatccaaccccttctcactgggtggctagaatgctacaatttca

SEQ ID NO: 8585 - DNA, 1157 bp, Homo sapiens
gttccatatgaatttaagaatttttttttctaattctgtgaaaaatgatattggtattttcataaggattgcattgaatctatagattgctttgggtattatggtcgttttaatgatattgatccttctgatccataagcatgtgcctctgatgtttttcatttgttcgtgtcatctacaatttctttcatcagtattttgtacgtttccttgtagagctctttcgccttcttggttaaataatcttgatttggttctcaagttgatcattcctggtgtgtaggaatggtactgatttttgtaggttaattttgtgtcctgaaatgatatgaattcacttaccaaggtctcagctccagtggtttctcttaaggattttcttgaccacttaacccaaagtcctcccttctgcagtcttcaattggtgatttcaagtaactatcacatggagtagttttagtgtctatttatcactatataaaatgatcttgcttatgtatttcttttactcattgactataactgtcttcttgaatgaaagtctatgagaacagggccttgcctgttgccctagtacttttaacactccctggtatgggttgggtgaatacatgcgtaaagtaaccttataagacagcttccttagtattattacatgggccagtatttctcaggatcatttcagttccttaaacaaacaaaaattctcgttagacaaatattcagatgcccatgtgtggtgatacacttgataaaatttgcacatcctatgttgacttttcatcaagtcaatagaatagatggctaattctatcatcgtaactattagtggctttcattgggattgagagaaactggccaagtgattttgtataacctattaatttggaaagtactgtgacaaaacaatggaattttaatttttttaagaaaagaacataagagtaatataaacacaaaataaattttgacaaaatttgtttctcggggaaatgttagttgacttttctttgatttttttcttgagtgggattgtgtcctaaactctgaaaggagggcagtatttgggggaaaacattttgactttttctgtacccttcactgaactccctctacatgagggagaatgacataatttaatggtgagatagggtcag

SEQ ID NO: 8586 - DNA, 1321 bp, Homo sapiens
ttggaaggctgaggcaggagaattgctggaacgtgggaggtggaggttgcagtgagctgagatcatgccattgcactccagcccgggcaacaacagcgagactctgtctcaaaaaaacaaacaaacaaataaaaaaacaaacacaaaaacagaatttcttacagttggaatattaatttatttttttaactcaaagtagaaatgtgatttcaaatactttgttgttgtaggcagataaagctatgaccataaatacgtagaaaactatatttttaattgaattgaagttctatattattttattactttactggtgatggagaacataaatgtgaattcatgatacaacattttaaattcagaaaagaactctttgtcaaatactaaatccaattctttgcttataagccaggtttcactccctcacaaattaatttaaatcctcccaggaatgcacagtgtccctgccaaaggttttcacatggtgattgatgaaaagatttgctgaagaatatgcattctttttaaatacattttaggagcagtttaatatagaggttggaaaatgaaataaattcatgatgctccatattttgatcatgttttgtgattgaactttttccaaagaacttttgaaaaagacacattcccttcagaattacaaatctgaagcttcttcacaataaagctttaaaagtgacttgtattgaaagcttttctttaatctgctcacatccgcacatctcaggttgtggtctgtattgcagggtatatttagccaatgagtatctttgtattacttagtaaattaaatattttaattccactaatgctgttgaaaggtttttagggtcagttgtaaacttaattgctttcagcttttctttccttttttattaatgtggtaacatatacgtatataatataaaacttagcatcgaaccattttaagtgtagagttcagtggcattaagtatatttacattgttttgtaaccatcaccattatccatctccagaagtttttcatctttccaaactgaaactacgtatctagtaaacaataactcctaatttcccacccccctctggccaaccaccattctactttgtctatattaatttgactactctaggtactttgtagaagggagatcatacatatttgtcctcttgtgaatggcttatttcctctagcataatgtcttcaaaggtgcatctatgttacagcatgtatcagaatttcctttttaaggctgaatagtattccattatgtgtatctaacacttcattcattggtagcttggtagatactggcttg

SEQ ID NO: 8587 - DNA, 1182 bp, Homo sapiens
ccgtccctctcctggaggtcgtctcctggcatcctcggggccgcaggaaggaagaggaggcagcggccggagccctggtgggcggcctgaggtgagagcccgaccggcccctttgggaatatggcgaccggtggctaccggaccagcagcggcctcggcggcagcaccacagacttcctggaggagtggaaggcgaaacgcgagaagatgcgcgccaagcagaaccccccgggcccggcccccccgggagggggcagcagcgacgccgctgggaagccccccgcgggggctctgggcaccccggcggccgccgctgccaacgagctcaacaacaacctcccgggcggcgcgccggccgcacctgccgtccccggtcccgggggcgtgaactgcgcggtcggctccgccatgctgacgcgggcggcccccggcccgcggcggtcggaggacgagcccccagccgcctctgcctcggctgcaccgccgccccagcgtgacgaggaggagccggacggcgtcccagagaagggcaagagctcgggccccagtgccaggaaaggcaaggggcagatcgagaagaggaagctgcgggagaagcggcgctccaccggcgtggtcaacatccctgccgcagaggtgagccgggcgggggccgcagccggaccgggccggggcgggcagctgcctcccggtgtcttcctcctgggagctacccggggcgcagagtttacctcccctggctcgtacttgtcccttcaccgagttaggcaggcagggggtgatggagttttactctgaacaaatgcttcctgggaagttccccaaactcagagtaggacacgtgcttttcaggcttcctggccaggtctcagatccaggatccttttttaccgtggtagaaagacaacttatggctccaggacttgcccacctggacttggctgacttggccacctggacttggctgtttatgcttgatcagttagaaaaattgattaatggtgacgacattctctagggtctcacgtgcccatgtgaagttaccagtttatttctcctttcttaccaatgtttaataacatctgtaaagaaaatgttgccttagcaatatccaagacagctttatcttacagtgagctcaagatgagtatatccaaatgaatacgtgcactattttatata

SEQ ID NO: 8588 - DNA, 2573 bp, Homo sapiens
accagtaagccttagttgtacataaatacttttgtgtcaacaaaaactttcagctctcacagaagacagttactcaacattttttgatgtgccacagtttcgagtttttcgatatttaaattttttggcttttcatctaagtttgggtttgtattttttccttctaaactcttcatgtggcagagtcttctatgttttcacagctttttcattacagaaaagaacacttgctcttctgtgattattgtcatgtattaggctaatgctgtgttgtctcccacctggaactgaattgcttggtggaacatatgctttcactgtttgtgcaatatgcatttatttcttatatgaatgctttaaagtcatttgaggttagatcttttaattcctattttctgcttcattggtcactttttttttattgtagtataagatgttagattctgtaatcttcacattcattttagcaggtactgagtgatgctgtatatacaaataagtgtattgttttgatttttagaccaccacatggcatgcttgactatttcttatttcaaatgtctgctaatgcagagtaggctactccatgatagtgttaaaaaacaaaatttgctaacaatgtgatataaagactttaaaagttacacattatgtggagccctatctttacaaaagtttcctactgtaaagtgcttttattttcagttttcacttgatagtactcaaccataattaaagttgcataagataattgctttacatttcacatacctatatttatctgagtgctgtctaaaactgttgtgctagccaaagtaatgctatgaaatcatttgcagaattaacccgtgagttaatgttaaatgcactgttattgccatgtgaagaggcatcgactttgataccaccatcatgttcagaccattttatacatttcagtggcctttttttttttttaaggaaaaaaaagcgcaaaaccaagtacatagtgacgatggcttttatttggacaaatagcttttatattttcattaaaccatgcaaaaaatactacatctttctggcacataactgtctccttaaccactgaacagttcagccatttgaataaattgtacattgtaaagcttatagtagctgattgtattattgattgtattgtatactatattaaatgtgaatttgtaccccttcattttaaaaggtcattgtgttctactgcctattttagattactttggggttggggaagggtgttttggtaagcaggattttaagtcctctctctctcgattggttttatgaagatataaggttatgctcttactaccaagctcaggattcttgattttaaaggtacaaggatagttgtgggagttttatttttggttatatttgaactgtatgaatggtaggtctgaatattgagaatttccatggtcttatgtggaggtaaaatatacagataactgatcagtttgagtgactgcaacatgttctggttgcacaacagttaggcatgctatggtttatatttgtgaagtttggatgcctgtgaagaatgattaaatacatgtttctaatattttagtgttttgtatttaggttatttattctttgtatctaaaactgaacagctactgtgctatattgattttattggtagtattgagcagaccttgtttctgcatgaaactagttgcaaaacccactattttggaaataaaaatgtattttgacatatacaaataaaatgaataaaactattttaaatgtgtgaacttttaatgaagacattttaaattttgttctgagatatttaaattctgcatgggtattttttcactaattgctttacttggataccaatttgaataatttctgaaattgtaatattgtgataatttgcacagcattgtacatgcacatctgtaaatgcaatcttaattgccatatttatgcaatctgtgtaccaatttggacaaatgtttatatattttacataaagctgtctgtatgcagaatctgagaactagtttttttatgataataagtgggtaaaaattaataacagtgagtttcagggtagttgctttgtagcacaagatttcgcttccataaacattgttttttttttttttcttaaagtaaacctgtgctttttcttatctgcaaacataggcttagcgatacatataaaggtaatattccattgaaacatacagtttactttaatattagatcattttccaatttagatttgtccaaggttcgacctgctaacacatctataaataagaggcacttttagccaggcatggttgggaggcccaggcgggaggatcacctgaggtcaggggtttgagaccagcctggccaacagggcgaaaccccgtttctactaaaaataaaaaatgagccaggtatgatggtgcaatcgcctgtagtcccagctactcaggaggctgagacaggagaatcacttgaaccagggaggcagaggttgtagtgagccaagattgtgccactgcacttcagcctgggcaacagagtgagactccgtctcaaaaaaa

SEQ ID NO: 8589 - DNA, 1170 bp, Homo sapiens
tactagaaaacatgatttgggaaaataatgtataatatagtaagtgtaacaaatatatagaaaatctgaaactttctacatggaagtgggagaaatggtctaaaaatatttagagatttcagtttcatttctttaaattatttgcaaactgtaatacatatttactgtcattttaattcattattataaattatgtgatacagaccttaaatacaaaggtttttatttgctttcttaatttattaaaataattgctttactagaatgtatctaatattgttctttctttaaatattgactagaatgcttttctggttggaatttctcttaccaaattaatacaatggttagcagacaagtttttagattaatataactgtcattataaagatttaaatgaataacaaagctatttctgctattaatggacacaagaattttttttaccctaattccatctgaatttatttttatttttgataaagacaaaatgacacactagtagagacctagattgtattcccactttctcttaatgacctgtatgaccttgggcaaataccatgcacgcagactgagtttcttcatctgtacagtgagaatcattctgatacttgtcccagctacattattcgttgttgtgaagatgaagaggttgtacctaaaaaaaaatttggttagaataagtgagtaaagaaaaatgaagaaactatgaagttagacttataatgtctctagtgtgtttgtgactcttaatagacgtattggactgatttttttttaagcagttacttttaagatagttctcttgataaagttttcatgttctcatacctcagcattgtgtcctcatttgttgcctggttgctttgagtgacactgcttatatactataaatgtgtttatactctatcaatgaagcataatagccttatagtagttaagaaccaaataatgtttataacttcatgactgttagctttataactgtgctgcagattgtttaaagagcatgtttaagttgatgagttaagttgatgagtgtgctttttttgaaattagaaattcttatagcccacattttactctaatttgattgtgtatcagctgctgtttgcaaagtagattcatttatcaagggagaaagtgaaaataaaggttagtagagtg

SEQ ID NO: 8590 - DNA, 1847 bp, Homo sapiens
tttccaagcatcatattcagggcaatattctaagaaagaagcagaaattggaaggcctttgaggcctagtcttggaagttgctgagtgtcacttctactgctttctattggtcaaagcaagtcacaaagccagcccagattctttgcttacaaacttgaagcaagtacaatattttatgtatgtgcaaagaaagatagattactaataattattattttcttctttaacaggcatctgaagaatttctgagctatccaacatggggactggttgtttgtgtctctctggttgtctttgcaatactcccagtccctgtagttttcattgttcgtcgcttcaaccttatagatgatagttctggtaatttagcatctgtgacctataagagaggaagggtcctgaaagagcctgtgaacttagagggcgatgatacaagcctcattcacggaaaaataccgagcgagatgccatctccaaattttggtaaaaatatttatcgaaaacagagtggatccccaactctggatactgctcccaatggacggtatggaatagggtacttgatggcagatattatgccagatatgccagaatctgatttgtagctgggggaaaagtcagtgggttttatttggttcatttttaccaatgaacattggccctagtaggagaagcattaggcttcacttatcagagggcaatctcaggtgttccgtggctgtgatctttaatcctaacagtatatgtcagttcaacttgagcattcttttggattctttggtttacatttgtgcagaaaggattgcagacaaatcttaggagggctgaggtacatgtttgccaggatttttttttaagtacctttggtgtattttcaaatatttctatctcttaaaaaaatggtattacctcagtttctaataatttctgggtttagtagtgttgacaattaaaaatggtatacattaaaatttataagtttgccttcagggtaacttccagtgtcacaatgagcagttctgtaagtgggtgcctctcagcacatttctatgaatatattatgtagataggctgtattgattttggtagcattgacaccttcttaggcaattagttgaagaaaactgcaaaatattttcttatgtaatagctgtatagagcaatagcaatcaaagcatgagaaggcactaacgctgggatgaaagatgagattcagaggtgactgagaatcatgtgagtgatggctgtatattttgtgtaaaatatatgtgtgaaaatgaactaagagtgagttactcagcactctcaagaattatgcagattctgcatttttcttatgccgtgtgcctaaaaacctacttgatatttattgtggtttcaagattattcatagtatatttatacaatatacttgcaatgcatttaagtacttaaagtactaatttgaaaacttgaagcaagatggcattttaattaatatatttctgttttgcttctgttttatgcaaatataaatcatttttaagtgattgttaaaattgtaatgcattacattttaatctacaaataaacaaagtttaaaaatgatgtttgtttttcacattgattttctttgtatcacctgaactggattgtctttcatttcagtcagcacttagacatttcataataactaaacatcacattccaagtgggatgaattacattaattgaatagagttaccaccgcttcagagtctaaggaaaaatagagtattatggttcaatggtgttcttatgtagtcttatgattcttgaaaaagtacttacagcctcccaagaaaccatgtgtacaattgactgcttg

SEQ ID NO: 8591 - DNA, 1099 bp, Homo sapiens
aggaggatgttagctaagaaaattgtatttgaagctcataagtgctttaaaattcttatacttacgggaatattaagctctgaaatgctaaagacagttacatgttttatactctgtagaaagggtttctatcataaaaataaaaaagaataattctgtatttaaattttttcatcattaaatatgatcacatttcaacttataattttacaggtacctacagaatactggacatacggattcagaatccataaggctttatcaccttgaatcaaggatttatttgatatcatcctcggtctttacttcctatcaagtaacattgttttgaaaaatagagttaacacatttgccataagggagtttttttttttttttttaaatacttcgcatactctccaatgcccaaaaatagcaaggtggtaaaaagagaattagatgatgatgttactgagtctgtcaaagaccttctttccaatgaagacgcagctgatgatgcttttaagacaagtgaactaattgttgatggccaggaagagaaagatacagatgttgaagaaggatctgaagtcgaagatgaaagaccagcttggaacagtaaactacaatacatcctggcccaagttggattttctgtaggtttaggaaatgtgtggcgatttccatacctatgtcagaagaatgggggcggtaagtaatctttttaagtgataaattactgtagtaaattgcaattgggtttctcaaatagctcctattattgctgtttctcattatttttgaaactttcaatttcattgtaaagctagagaaacccacttctttgtgggaagtgagcccagatatgttttcagattacgtttccacaggagcagatgggcttgctgtgaatgctcagggattgcttaagggtaacacattctcaacttctttctccggaagcttattaaacaactctgaataactgagtgaaacttttcttgcatcgtttgtgcttgtaaattattccctttgaagaataacctaaagcttctgatatatgacaatactggtgaaggaaaacagagaattttctctccgtgatttattaattcttaat

SEQ ID NO: 8592 - DNA, 1193 bp, Homo sapiens
ttcctgggcaaccctactgtggccgcactgcgccttcctgcactgaagcacccctgcagggctcagtgaccaaggaagaatcagagaaagagcaaactgccgtggaaacaaagaagcagctgtgcccctatgctgcagtgggagagtgccgatatcgggagaacttgtgtgtatatggagattcgtgtgacatgtgtggctgcaggtcctgcatctgatggatgctgcccagagatcacagcatataaaatcatgctttgaggcccatgagaaagacagggagctctcatttgctgtgcagcgcagcgaggaaatggtgtgtgagagctgcatggagatgatctatgagaaagccaaccccagacagcaccgcttcgggatcctctccaactgcaaccacacctactgtcttaagtgcattcgcaagtggaggagtgctaagcagtttgagagcaagatcataaagtcctgcccagaatgtcggatcacatctaactttgtcgttccaagtgagtactgtgtggaggagaaagaagagaagcagaaactcattctgaaatacaaggaggcaatgagcaacaaggcgtgcaggtattttgatgaaggacatgggagctgcccgtttggagggaacggtttttataagcatgtgtaccctgatggccgtagagaggagccacagagacagaaggtgggaacatcaagcagatacccggcccaatgaaggaaccacttctgggaactcattgaggaaagagagaacagcagcccctttgacaacgatgaagaagaggttgtcacctttgagctgggtgagttgttgcttatgcttttggctgcagttggggacgatgaactaacagactctgaagatgagagcgacttgtttcatgaggagctggaagatttttatgacttggatctatagcaaccttgtgtggcgtgtgaactggtctgctgaccccagacagcagctgttccctgtggtggtgtggcagtgcctgtgttctctcctaggcaggcctgtcaactccaggtgctggcataagaatttttacccagggcctgtcttttcaacccctcacctttccccaaggagtgtgttgttttccctcttgaaaaaaagttagaaaaataaatcttaaagttagttttctgaaaaaaaaaaaaaaaaagaaaaagggaactagaaa

SEQ ID NO: 8593 - DNA, 1217 bp, Homo sapiens
gaatgacttaaataatgaactgcaaaagaaacaaaaagcctataataaaatacttagagagaaagaggaaattgatcaagagaatgatgaactgaaaaggcaaattaaaagactaaccagtggattacaggtaattttatatttaactctgataatgtctgatttacaatatagaggtagtagtttatttctactttatcattttatctatggtatttgttaaaactgactttcaaatcactttgattaatgtaattaatttcttttgtgacttctattgtgtttatagttctagagtagcatattagtatgttgtattaaaatgcagaagcagctaccagattatcttatgtattaagtgtcatttagaaagtatggtcagtgatagcttcagaaagttgctattatataattgaaatatttactgtctattttgttttacatttatttgtaaaaatataaagttacattttattttttagggcaaacccctgacagataataaacaaagtctaattgaagaactccaaaggaaagttaaaaaactagagaaccaattagagggaaaggtggaggaagtagacctaaaacctatgaaagaaaaggtatgtgaagaaacatactgacttatatgcttaaggtagtgacagagtaagttaaatacatagctgattaacagttaatatactgccttaatttgatgacctggctgtattaattctgtattaattttgaggactataagcagtattgaataacgtagaaaagtctaagtttctgttctgtaggaatttagagtctacttgaggagatacctataatgtaactcttatttggaaattactacatcaatttcattcatctttctgacattagagtacctctgaagttccttcacaccttaacatattcaactgtgtatcatttctctccaaagtaatcatttacacaggttggtgcttttgacttttgggacagaaagatagacattttaagataccccactttgacccaaataggtcctttttaatccttcaggagactaggctgttatttcagatagcaaagttatttggaatatcttcagtatttgcagtaataatcagtaaccaatctgctcatagattaattctgtgggagaaattgcttaaaattttatagttcatagtaaactgttttgtaataaaaattactgattgaaataaccccaaaaaaaa

SEQ ID NO: 8594 - DNA, 1152 bp, Homo sapiens
acaaacactaatttttgcaatttaggatatataaatgatacttgaatgaatgtgtagatagcagtcattatggggttttctataaaagactactgaaaatcctgtggatcataacatttcattttatcttaaaataaatacattataaatgtattagaaaccaatacattgttcagtatttatgtggattaaatttgtttaaaaggtagaataatgtttaaaaataaaattttctagtaatgaaagataattatgcaattataagatgcagaaactattaaatgtcacctataattccaggatgacttcaatgataaatacacatatgtaatgtaatgtatccgtatgtatgtgtatataagtatgaatacgtatgtgtgtgtatgtagatatatttatatatataatgtatatgtaaatatgcacaggtgtaaatatatgttacatcagtttgcaacaactcttgaaataactttgtcttttaggtgcaggagcttacagatcttctgaaatcaaaaaatgaagaagatgatccaattatggtagctgtcaatgcaaaagtagaagaatggaaggtattttttttcaattgacataataactttttctttttgtattttagatttaaattttagtcttatttttctttaaatgtcttatactggtttataacacgtttattagggtttttaaacataagtttattttatttattggttagaaaagctctagaactgtcctttttgatctctagctaatttgttattgaatgacctctttcacatcaatgagtttaactttaaactttttgatagaagtctaactccaaaatatatttggcatctaaaatatataattcgaaatataatttaaatttttttacttaactcatagttaccttatatacattagttaaatagttgcaggtttaattttagtttttctaactaaatgtcaggttcatcagtgggaatgggaataagcaaagggatcagaataacttgggaagccttttcaaaatacacttttcttcctcaccaccactctccaaccttaaccaaattgtcaggccttaccatattagaagctgggattatgatggttgtatacttgaaaaacatcagagattattctgaatgaataattctaatt

SEQ ID NO: 8595 - DNA, 1175 bp, Homo sapiens
tgagtgtgttattttagatagaatttcaaaaagtacttccactatttaactggatgaacctttattgtttaatttttgcttaaagatgtgaatatttacatttattaaagtttttatattttactatgcaagcatattctttacagaaaaccagtgagatatagctaattatgcttctcaaatttaaaatgctgtaatggtttagattttaatttcaaggagtaatcactcccaaacacacctagaaatcttgttttcaaagttcatagatatcctctaattttaacttttagaattcaagatttccatttcaccttgcttacgtacatcctgatgtttgttaatgtctaagttgccttctttatgtttaaattaatattcttcacagtattattaaaaatagtttagcagtacactatccaggttaaatgataaaatatttggattcaagtatcagatgcccatatatttcttaatttattataaattattttaaatttattataaattattaaatcttctttttttttttgtaggcgctttgtttaatggcattaccatttattcctgcatcgaaccttttttttccagttggatttgttgttgccgagcgagtattatatgttcccagcatggggttctgtattttggtagcccatggatggcagaaaatatcaacaaaaaggtgaatttaaatgtcagttcatgtaatgcttactatggaattaagtgtgacacattttaaaatttaaatatttagttcagttttctaagtcatgcttttgtatcttttggtttttcatctccatagtctcctcatttgtcttgtaagtcaagttaggaaagctccatggcacctacttattctgtgttcttccctatatttatgtaatttgattttacagcctgagacagaacaaactttgagtcagatccaaatgaaaacaaggatgttactgagaataaagtctcaaatgaccattgccacttccatattcagtgaactaagataatagtcatcctacttaagtgagtcatattgagttaatatatataaaatgcatatagtaagcaatctgtaatttcttgctatcatcactatcttcattataatctttgtatcctagttgcctcaaactaacagttaaggaacagcatagtcacactgtatatat

SEQ ID NO: 8596 - DNA, 1268 bp, Homo sapiens
cacaattgaattattcttagataccttaagccactgaattcagttctgtttgactgaaagcaaaacaacgtgacagtttattttcaaacactaacttcttgatattttgttatggtatatctttttattaaatatttattttgactaagctttcataaaatatttgaagctattttaatcatcaagtatggaaaacaaattactattgcattttcctatatatgcatatattatggattaaccagaattgtatcatttttggcctaatgtctggatataaaagataattagcctactatagtattaataaatttttcagttggtttgggcaaatttaaacctgaaaaataggttaaaaagtagttacaaattaaacttactaatttatacctgattttttttcttgaattaaagtacattttaaatgagctttataataccttaaaaagttggttctaatttaaaatatgaaagctctggctatcatcctgggatagtaatttctaattatatagtatttcaaaactatatattttttagttcctttgagataactaatttctaattatatatgtttcaaaaaccatatcctgtattttttttaagaattgttttataaataggtcataagatacaaggtctgcattagaagacccactcttactaggttccctaaggatctgccatagatttttttttttttttttttttttttaggtagtttaaagcaagcactgataccagtgggagttggtcttgatctaggagattctgttaagcatccaaaaacaatgcctaatttcagttcttaggttatggcttgtgactccagataaaagatggagaatacctcatgtactgtgacttgaaaatgaattcttaaaattcttaggctctctccatgtatctttcttaaggaaaagtttctgagtgtgatctctcttttgccatagtatcaagtggagggtagttcagaaaagttaataggaaatcttttgtgacagcagactataatagaagtttgagtaatattttaataaatttatataattcaaatgataaaaatgtatcaatgttatccaatgatttttattaaaaaattaccttattattagaactgtgcctattacataaaaagtgctcatgtatttgaattttaaataatttatttaaatcaagaccaccataagtcattaataatttaataattgttttaaatcagtggttttcaaccctcacttcatattagaatcatctgaggactttta

SEQ ID NO: 8597 - DNA, 1224 bp, Homo sapiens
gggaaagtgtttgaagggaagcctctaggtaataaagacccaccccagatccttcctgactgcagcagcatttaggattgtgattgccaagcacccaaagataacctgctgctctttgaaaaacaaatgctaaactgaaaacaactaaatagaattttttgtgctggtataatcatagaatatgctaaatcatagatttcaatgtcggcttgtgatagcaagagccaagcttgtgaaaataaagctgattcactgccacatattttgtgcttgtttctgtaattgagaaaaatctactattgattctggcatgctatactggcacaactggagaaacactgttcttcttggccaccaccatgggcaagaaaaacaaggccacgtttagagcattggacagaaccaggggtctcaccctttgttttaccttcattttgacatgttcgtttctgcgaagaccagaggagtttcccagtggggaggcctctgattatttgcgagtggtcagagtcccagctgccttatcttttgtctttaaacaatagagggtggagtgggaatgggtgccaaaaagattctctggtgccaaagcaataaaattctgcccatgggcactgggcagaagaaagctctagaatagaatacacttttatttttatttttattttgccttcattttaaaaaacagctaaattctcctagaaaagggagttcacttttccaaggtccttcttagaaaattacctagcagattctgtctcacaaatagcagggtgtgatcaaccacttagtatttaaatctaacgataatcaccaatgctattttaaactctttgaaactattatattgccggactgttgaaatttcctttaacttcctaaccttaaagaatacctggatatttctggtcttttacatttactggtaatgttattgtagaaagaataaaaatggcattgctgaattgttgccacacaccttcattcacttgaacttccatagcatttacataaactgtgggttgcttgtaatatttgagtttaaaaatcttcatttttaaaaaaatttttttatttttagctattatggatacataagagttgtgtatatttatggggtacacgtgatattttgatgcaaccatacagtgtgtaatgatcaaatcagagtaactggaatattcatcagctcaactttacaatttctttgtgttaggaacattc

SEQ ID NO: 8598 - DNA, 1185 bp, Homo sapiens
ataaatgaacaaatgtacatacactcaggaaggtagtacaagatactccatacaacacaaccatgtgctatttatcatggcatttcttaaaagggtgagcaacagaacaaaaggcagaaaaggcatacctaaggactaatttaaacacatatcaatgtgaaggactaatttaaattactatcatttatgattgcagtaataaagtgataagcattcaagcaactctgtattttccccatattattttaaatgtccattttcatttataggccaaatcctgccaggaaagtaaccagatctctggatttcactgttaagtcatttcagattgaccatattcagacagtcatggggtgaaataattcacttacctccaaaatagcatcctatatgccaataatgagttattgatctgactagttgtatgtctttctgttcaaaatagaaattatcctttcttactaatgccttgaaagaatgaacaaataaaaattcccagaccacagaatttccacagcaagaatacacttattttaattaacaatagcacagatatagcatagggcagtgggttttttagttaatttatggcgtactttgtttatccattggccaacctgaaggaaatgaaactcacctatctttctatcacagatgaatgtgctagatgaatgatttgggttgtatctgatcatggttcacaaaaattatgttagtgtgttttcagtatgctaaaaagtcagagtgatacaaaagtgatatttaaaaatatacacacatgtatgtacacatgcttcagaaatattgttgcttagggtgatttgggcagctaaatagtaagtactttttaaaatttttgcatcatcatcttcctatttaatgaattgtgatttaaaacaaaatgaaaataagccaggtattctaaaagatcctggatacaaattaagaattttgctttattttaaaccaaattgagattaaattgaagaaaagcaagcaaattaatttcagcttgattatcaacctgtatcaagaacaaaaatgggaggaggtgtccacatttatggtgtgtataggtaacatggggaaaatgctattctgtgttttggaaaagaagaaatagtgccgtcctatttatttctatatttagaaatttttctcaaagaaatttcaattgtatctatg

SEQ ID NO: 8599 - DNA, 2130 bp, Homo sapiens
actaatgctttgtttaaaaaaacgaaaaaaacaaaacaaaacaaaaaaacatgagcagtggtgttctaatgaagttatgacatctgtcctaattagtttcttaaatacatttactacttaatggttttgaagcaactgtttaatttttaaaatttttgaaaacttgctaataaccttttgttcagaatttagtagattgtttaatgcaggacatcaactacataatgaaagatgcttgaaatgcttttgttatttcaggcaaatcaaattaaatcagactatcaaactacaagagaaccttagtcttttttgtttttgtctaaacatgttagtttagtgatgtcttggtgaactgtgagtgaactgtattgatttttctaatctttagagaccttcacacagcatgagggctgttggcattttgaaaaaggttaataagtagaagcatacatgttttccttttgtttttgaaacttgtttgtaaacataaataaatatgcccttttattaaataaattcatggcaatgtttttttaaaagacatttcagcttctttactcagttctgcatatacagtgcatcagtctgttctctttgaccacaattggaatacatttcaagatggtaacagccccatgaagtaccgctttaattccttgctggtaatctaatagaatcagattaagaaaattaacacaattttaccatttgacatactcttcattgaatttagtttgtctaaaatagtctcacaggtaaaaaacataacaacaatgaccaccattgtctttgatacatttattttaattcttaagtggccaaataacagattaggtaaaatgagattacatgaaaaggttctaaaatgatatatttagatgcaataattaaccatatgctagaatgcccacctctaagccaattggattctttagctctctttttctttccttcatctaccttcttctcttttttgcctctgtctttaccctttagaaactggcatgtgttagggcccagatttcaccagatacacaatcctcaggctgacataaagtttacgaggactgctactataactgagagtgctgaccaagcaaagaaacatttagttgatggtgcttgatatttttggtgggtgggggaaatctttttctcaccatcaaatctttgcagtaatcctctgcaggtcttagaaacacattggctctgtcagcatttgtaattgtacatttattcatcaggtatttatagtgaatcatactgtaaaaaagaggtagcatgatatgctggaaagcatattagactaggagtcaagacctggtttctagtcttggttttgccattaatgtgctgcatgatcttgggaaaatcatttaccctaaataagggtggtggactatcttgaagaaccctttcaactctaaaaattgaccctatcaactggagagcccacaaggcatagggaatagagaaaagggaaatgttttcagttttcttttttattttggttatgcttaaatatgaatgtaattaccaaaagatttagaagtgcatgtgctttggaggatttgtattgagcttttacagtattcatttttcaactcaaggcaatggctttctacaccaactctaatccataaacgggtcttatgacatctatgaagtagtagcaagacatgcttagtgtgtatttctctctttgagacactgtaatttctaccagaaatttccagagcattatgtaggtagaaaaaaatgcaagcaagctgttaaagatcttggatcccattatatagtatgtatagctgaaatctgtaattcaatcactttttctcttttatcctctaaccaaaaaattgtttaattttgcatcccaaatgtttttaatctttgtatattttttaaaaatccttttctcctcatcattgccttttttgtggttgtaaatagacttacttgcactttgaagatgagttactccttgtcatcttacaaatatgtgatatggtaattttcataacagatgtcagttttgaaccaagaattggtgatttgtttataagaaaaaaactggcttcatttctgtgaaattgctctttgaaaatttctttttacacgtgtaagcca

SEQ ID NO: 8600 - DNA, 1111 bp, Homo sapiens
gttgttctgtagtgtcttactaaaatattcatttttttacagtgtattgcaagttccactgcattacatgcaaatatgattcactcatacctagctgtttgtggattcaaactcataaatgaaccatttttaagttgttaatagtgtactgacatatttctgtattttctgatatttacagattcgagtggtgaatgcatttcgtagttctttatatgaagggttagaaaaaccggaatcaagaagttcgattcacaactttatgacacatcctgagtttaggatagaagattcagagcctcatatcccccttattgatgacactgatgccgaagatgatgctcctacaaaacgtaactccagtcctccaccctctcccaacaaaaataacaatgctgttgacagtggaattcaccttacaatagaaatgaacaagtctgctacctcttcatccccaggaagcccactacatagtttggaaacatcactctgattgtaagctgaatgttaacacactagctgcattgtaaagaaacaaattgaaactgggtcttttcacatattgtgatggacaagctagtattcttgtctttggacttcaacagaagacacacttgtacgaatgtagatttatttttttaaaaaaaaaaaagcaaagctttctgccagactgagggtgctttttggggggtgggagaaatgaactgacagataaacagtaactcagcgtaagtgacctgtggatcatcagtagtacccaagcatggtcctgaacagtgtattagcagagctttagtttatctcagtcctggatgggagagagagggaggagtaaaactgggcaagacaaagagccctggatcgttgaattgatagtttaatttctgctgttggctgttaataatttggattatttatgtttataaatgatacagatctgtttacaaggtttgtagatactttttttgttcctgttcatagatgggaagcttccttataactgatgcagagaaaaattagtccttcaaatactgctgtattttcaggaaaaaaaaaaaaaggggtgtttctattgaaactgtactaaatttttgcctacaatttaccttgt

SEQ ID NO: 8601 - DNA, 1239 bp, Homo sapiens
gatgatggataaatttgatttttgctttgggtgggctcctcttggggatggattatggaatttaaaccatgtcacagctgtgaagatctggcacaagatagaatggtaaaaaaaaaaaaaattttaagtgacagtgccatagtttggacagtacctttcaatgattaattttaatagcctgtgagtccaagtaaatgatcactttatttgctagggagggaagtcctagggtggtttcagtttctcccagacatacctaaatttttacatcaatccttttaaagaaaatctgtatttcaaagaatctttctctgcagtaaatctcgcaggggaatttgcactattacacttgaaagttgttattgttaaccttttcggcagcttttaataggaaagttaaacgttttaaacatggtagtactggaaattttacaagacttttacctagcacttaaatatgtataaatgtacataaagacaaactagtaagcatgacctggggaaatggtcagaccttgtattgtgtttttggccttgaaagtagcaagtgaccagaatctgccatggcaacaggctttaaaaaagacccttaaaaagacactgtctcaactgtggtgttagcaccagccagctctctgtacatttgctagcttgtagttttctaagactgagtaaacttcttatttttagaaagtggaggtctggtttgtaactttccttgtacttaattgggtaaaagtcttttccacaaaccaccatctattttgtgaactttgttagtcatcttttatttggtaaattatgaactggtgtaaatttgtacagttcatgtatattgattgtggcaaagttgtacagatttctatattttggatgagaaatttttcttctctctataataaatcgtttcttatcttggcattttaatcaatctcttgtcatgattatagaggtttagctaaaagtattttttcttagaagacaggttctataaactgaatctctgttgcacactggtcatgctggaaaaacatttgatgaggaatgaagatgctctgtatatacatgtttaggttttacaggaaacacaggagtagcatgttttaaaaatttctaaagtcaaaacatggacacattcacaggctaatgatctcatgaaataaggataagagaccacggtagcatctaccaaaaatgtgatactcaaaggattacatttcattgcttccctgttgaagt

SEQ ID NO: 8602 - DNA, 1225 bp, Homo sapiens
atgcagtgtataaataacattttgttcaactacctcttaatgtggaattatctactttaatagtttcctgacagtaatgttaaatagtaactgccaaatttgttattttcccatctctcttaaaaaagtctttatgattattttatatagttttgagaactttaaagccacttttttttaaccttacatttgcataaaaatgtttagcttttaagtagagagcaaattatgatcatatattttgatattcatgacctgtttgactataggagtttttttaaaaaaatgcactttggctataaaaccatggatgatttgatccataagatttaaatgtgccaccattatagtattcctagacatgagcttgatgaatggtattctgtaattataacgtgccacacattattgtgtcttaattgcccttagcctgaattttaatgatcaatttgttattgttgcagatgtgaatattgtgcataaacttactaaatttatgtaaaattgtataaaatagaattagaagtcactaagttctttctgtgtagaagtaataaatttattgtaacacaatgcagttgtgtatatgacattctgtaattccttgaactggatcatatattcataagttctgtagatacttatgcatgaacattttctcatttagtttttgggttcattatttgtattgtgtttactacttgtgatcatgtagttgtgccttactttgtgagaaaggttagctcagtaaatactgcaatttctaaactcagtgattggaaggttattaattataaatgtaactgataaagtacgtgacagcatttaaatctgtataaagaacaatggaaggatccttattgaattgttgcttttttttaatatgtttaaatattatattaaaaacatttctttctaaactagttgtattctgtgactataaattgttttgtctaacaaaagagagaacactgtattaaccattttgcattaatttatttacagaatattaggactttgcacttggatatagacagtggtgttttaatgttgttcaatttcgaatagtaattaaattcctgatctcaagagaaattattaatgccattttgccttagacattccatttaatattgtagagaattaacaaaactaaaaacaaatataaaaaatatgtaattaaccccttatttcattgtgtgtctgcatttaatacccagatgac

SEQ ID NO: 8603 - DNA, 1106 bp, Homo sapiens
aatttcattattcacaaatgaagaatgcaattccatagcttacttctttctcctaaatttaatgtacaaaaatgtacatggatgatattatcacttgttgctgtttttgttgcacaatagcacattaattatattaaatattctctttgtgaagttatgcacagaactgtaacactttcctctgcctttttctcttatatgtgggttcatggttcagttgcattgttatgttatgaatttactacttgggtgttctaaatacagtttatcttaaaatatgtagtaatatgaattcaaaaatggtttttgttttaacaatattaattaaattttcttgggtggattttataaaaacctctgtaaaatcaatttgtttacttatagttatctggggttgtattgcaaagaatagggttaatttttctttttgtctttttctgtctctttcttaaactcccacgcattgtccatttagaatcttagaaagcttcttaccctcgctgtcagttggaggatgaataataaacattgtataatgttcttattctcggtttcttgtaagtgggaagtcttttgagatcagccttcatatcatacccttattttgtctctctagcatcttcaggaacctgagtttgctttttacatagatctgattttttcctttatttggtttaacattttcaagcatagatcagcttcatgtatttgttttataattttgcatcttaaagctagtaactaatattgctgtggtcttattggtgaaaacaaaatataaaatgataagaagacattaaatattttactttctatttcttaccctattgggaagaatttttaaaagttgtaaaattgacttaaagttaaaatggttctgaatttggtgttccatgtcaactgttcccagttttaattttaactttgcaaaaataatgttgtgaaattccctttaagtaactaacacctagaaatagagtatcaccaaaaacaaatgtatttaggaatcccagttacaataaaaactgaaacagcatggctaagcatcttaaggataattaagaaattagcttatttgtatgctgaacaatggaatcgaactttaa

SEQ ID NO: 8604 - DNA, 1213 bp, Homo sapiens
gaattaagtccaaatatgcccagataacttggccattgaatattttagttgaagagtttcaattttaacttcaaacagtcatttgaaggtttcataatggtttttggcagactgatagagaaaagaaagcatatggaattgggacgaataaggaaatttcagctttgtctctagggcaccttgctatccctaaccatatgtgtctttcctgctctggtggagaagaagaaagatctcacattgtgtcactttagctcaccatcatgatggtcactatccatcatttcagcattttgacctttgagccaattcatattacatagatgcttgtggaatcagttttattaatgtgtaatgaaatatgttctcctgcctccattcccgaagaagcaaattgccagtattttaaatgtaataaatcacttacatttattttgcactacttttgtaatagatttccccccaacttttcctttttttcagcattccgaaataaaagaaaaggaagtaggaatgaagaagcatgaagaaaatgaggctaaacttaccatgcagattacagcattaaatgaaaacttaggcactgtgaagaaggagtggcaatctagtcaacggagagttagtgagcttgagaaacaaacggatgacttacggggtgaaattgcagtattagaagcaacggttcagaataatcaagatgaaaggagagcactactggaaaggtgattgatatctagtaaaattagtttatttccattgtaagtgataaaaagattgtcatattccatagtttttaaaaatagaagaatcttgagaaaagtgcataagcctctataggtatttaagtagccatttaaaaattaacctgtaaaacaatcagatagtcaaaattaatgtatcatatattttaaattactaaagtagtccattatctataccctagaagggtctttaaatgattttctaaaaaattaattacctctttgcaatctattccagatgtcttaaaggagaaggtgaaatagaaaagcttcaaaccaaagtattagaattgcaaagaaagctggataatacaactgcagcagtgcaggagctgggcagagaaaaccaatcacttcaggtcagtcacctatggatatgaagcagttttttagtctagaattggcttattagtgaaaagcatatttttaccttttaaaaaatctcatgtttt

SEQ ID NO: 8605 - DNA, 3310 bp, Homo sapiens
tccccagccaatggaaattctacagtcccttcccttccggataataatgccttgtttgtaaccgctgcacagacctctgggttgccatctagtgtaagatagagagaactgggtaggcctctcccaccatgtgcagtctcatggggagaggcttctttcgtttcctcgtcaaacatctgattgacgcttgcaaactgtctgaatttgccatgcaaggttttcaaacaatttgcatgtttttcagatgctttcaaatctttttttaaaaaaatagtgtaaaatattttaataagccaaagccatgtggaatttttgtttagatgccttaactgtgccacaccccacaaccccctatattattttggttgtctatttctcacagcatattttcagttttttgtccatttgacatcagtctgtggtttattttgtcatcagattacttgtgggtatacctaccccaaaattgttttctcattcacagcattagcatattcagcaaatccatctgtggtgggaattaaaaatattattggtattaaagaaatccattcaccccaaaacttgttttacaggattacaattttaattcaaaatttccagatttgggctatttctgtatgatccaataacttattttgtcacagggcttaatttgccatttttggggatttgtcgactcattttgtctgaattttcacaactggtattatgtcactagctacctgatacggctatttcccttataactcaatagtaccttaacacaaagtataactctgtagagttggtgaatattttagggaaatattagcaaaatgcatgtagtaaagacatcttatgaaaactgtattcatggaatttgatttagcatgctcagttgccagttcccattatcgatactctttctttgcagaataccttagaaccgttatttccctcagtgtagattgctcttaaaatgtattcagttatttagtggcccccacaggagtggagtcttgaaatctaattctaaatgccagtcagtgatgatcgcatcacagttgagtgaaatggccttcctgttcagctgttagagactgaagattgttagggcaccttagaatgtctcatcttttctaggttgtcaacaggtactatttgtcacataactaactttcgaggcactggaacatacctgaactaagaattaaatcttttactttatactcacttaaaatcaagaatcccatctaaaacacataggtaccttatctgaaactcttgcacttccccaaccagggcagaaatgaggtgggagaagtttgactaaaatgagggatgggggaaagtaaaagatgtttttttttttttgagactcgctttgtcacccaggctggagtgcaatggcacaatctcaactcaccgcaacctccgcctcccgggttcaagcgattctcctgcctcagcctcccgagtagttgggattacaggcgcctgcctccatgcctggctaattttgtatttttagtagagacagggtttcttcatgttggtcaggctggtctcaaactcctaacctcgtgatccgcctgcctcgacctcccaaagtgctgggattacaggcatgagccaccatgcccagccaaagatcatttttttatatagacttcagccctttgtaaatattgtaactggggagtatagagtagaaaaaaagtatagttaaaacatttgttctacaaattaacctttaaaaatataattactgctaaaaatagagtgctgttacacttaaggaaaattagtgccattttggaaatgagatcttgtgccataaatacagctgaactgaatataaatgttcacaaattaatgctgtcaaaggaatgagtaaagcagaaaaacttttaaccagcaacatttcaagtacgtagtgtgatcaaacatgatcatccagaatttttatatttttttctttgtacagaggttacatattctgggtgttcttttataaaggaaacattttaaatcccacaaattgacactttctatcttcaatggactaagatttttttggtcagtaatctctgaaatttccttaaattatatacttaacatagcagagaaactggattgtttttgtatataagactgcttccacctgaaatgctgtcataagtactgggggggtgggggagtgcccatcttgtacatgatattcttagaggtaataaggtaatgatgcatgaatttattttataaactcttggactatgtatttgacatgtaaaatatgtacagtattaacgtcaaccatctctttaaagttagcctataaatattgttgtataattttctttggtcagaaacacttggactgaatagtgacactcggtaaggattttcagtgccatttagcaaaacgtctttagtctatgcaactagcaaaaatctgcataatgcaacaacacagttttcacacttcaaattttacatgaggggttcttcacgattctcctggaacccagtctagcaaaatgagaggaaaggccctagggagatttatttctgttaaatagttaactctgctgagtatgacaaatagtgtctactatctcaaccctccaaaatttgcagagtgttgggactgtcatttgtgattttttttttttttttttggtggggtagttgaataaaattgggcagctaaatttttcagttccatgtgcctcccaaataaaaaacagaaaataagtagtttttgtgaattgacttgcagacaaagtagaaactgtgctgcatgatgttattttgtaaacagatgacattttctgaccaggcacatgccatccaattttctgtcaatcacactgttgtataaagcagcagaactgaaggggaaaaatgattgttgtatacactgaattgctttgcatggtctcatttgagataattgatgtaagaatcctgacttttttatatttggaaacatcaaataaaaatggaaaaaatgatcatggctttaaaaaaaaaacaaaaacacacacacatgaactcagatttgcaaaccaggtttctgaaactttgggtaaggtgtatgcttttaactttgaaatgtataaacacccagcggaaacgtatacctttcagtgcatagtgcattgtgtgcttaccctgggttgtttaaacttgtgttcaaatattccccctccaagtgaaagcctgtcgggaattccacagtaacacctttactgttctcccattgatgatcatatacgttacctcttcctagcggtacatttgtatgatccttactactggaatt

SEQ ID NO: 8606 - DNA, 3310 bp, Homo sapiens; identical to SEQ ID NO: 8605

SEQ ID NO: 8607 - DNA, 1111 bp, Homo sapiens
taactggtatccttccaaataaatgcattgcttggtaacaaatgttagcttaattcagaatgaaatagttaacaaccctaatattgtaaaatttgaaaactgatagcagctgtcatttataacaattcttgggctgtttaaagggtacatttgactatagctaaggaaattgaatctcactttaaaaatgaaccacacaaaacttcaagaaacgaaatagaaatcaacatttactgcccgtaatattgctcatggttatagctagtatcacatagtgatttacaaaccatgaaattccagatttaaatctgttgcactacaaaaatgtctaaatgatgtctgctaaatttgtgagttatagaagtacagaaataagtcattttcatttcaaatgcagtgaatttctaatttcatggtatcatatttttttcctttgcagttttggtaagactcccccattactttgctaagacttgctttctcaaccagtgggatgaaacgagtgccagtgtgttgactgagccttcttaggacttaaggggctctgggagaggccaaggcagcagttgaaaactgcagcttcacctggcctttgggcctgttttccctggcccacacagtgtggctggttaaaacattctgaatttgatgccaacatttttaaaaattgggagatttgcatgaaaatccagaattcgggtaacttttgaatgatctgaagatctggcaacagtagacctgacccacctttgtgcacgggacttaactgagaggatctgagtagcagacaccctaagagcatgtcattgtcttctcaccagttactctccagttggctagagtcccctccgagcacacctgctagtccttcccccttgtaagcctttgactttgtaatccctgggctaaaggaaacacattattcaacaaaagtgtttcatgtttgcccactagttgttggggatgattaggtggtgagtgaatggcatggggctttcctttggggaccatatactctaatggggaagggggacagacaaatagttgtaactctgtcatggaaaagagaagtaacttggacagacttttggattcaggccagatgaacatc

SEQ ID NO: 8608 - DNA, 1189 bp, Homo sapiens
ctgtgatctgcattttaacaagcactccaggtgatttggatgcaggctaagtttgagaactagggccttagaagcctacagcaacaggcttttatggagctgaactatgatattatctgtctcagggaggcaaatgtgtgttgttaacatgtttacttcagctgggcttgctggaagcaaagaatctggtttgagttggggctaaggggggtaagggcacagatttctataaagcaatcaaatgagaaaaaggactgttgccttcccagggcaggatccctgctgtatgaaatccacctatttgggtttttcaagcagatgagcaatttgacatctttccactcctctgagcaacacagtgttaagtggatctcttgaaggatgagcctggtgcttggctgaagctgtcacaaagtggcatttctcacagtatttgcagaggccctgagaaatgttaaccagagactcagtttgctctttgatttcagtcttcacggttgaaaacctttcttaaatgcatctttttgccactttagaggctagaataaaaaccaaaagagcaaagtttgtgaaagattgttttatctttacaaatcagaatgggtttaagatgtagctctctaatgtcactcttactcacttgcattctgatttgctttcttgagagaaagagattgggatgcctggagttcctgttggctgctgggatttgcatgtgatccccgacatagactatttgtgacacacgctggtatgtgtgtctgtagctgatgtcctattaatagctgatacatgaatgtcatttgttggttgggcagacacaggaagtgtggcacgatgtaaattctgtgaagacagggctggttgattcaatgttttatccccgatacctagaacagcactcaataaacatgttgaatgaatgaaaaaaatgataattataattgaatcctggatcactcagaaacctacagattcagggtcaccagtctgagcattaattctcaccatctgggatcctaaatatagcatgtgtaggcagcactggctgcataatttgttggggccagtgcagaataaaaatgcagagcttcttgttcaaaaattaataactgtgagacagcattagcagagtattcagccaagcatgcagctcttctgagtgtggagtcctgtgctcctgcacaag

SEQ ID NO: 8609 - DNA, 1328 bp, Homo sapiens
gggcatggcttttatttctaacttctgatttttttctaatttacctaaatctttattttacttaaataatgttaaaagtgtcatgcttcatcagccagtgtgtcatgctgcagatgttcttttggttcattagaagaaaatcttaagaagagcttcagaaagttgattttttaaaaaagaaagaaaactggctcgccgtttgtgttcataaaatggacccaaatttttattaaattcctactgaaagtatttgtggtggcccggtaaactttcgctcacacaccaccttttttttttttcttttttagagctaaaaaaattattgccaattacttgctctgttctaagaattcttataataactgttttaccctcttttctttttctttttgaacaaaaaccccaggatggtactggggaagtatgactgttaatgaagccaaagagaaattaaaagaggcaccagaaggaactttcttgattagagatagctcgcattcagactacctactaacaatatctgttaaaacatcagctggaccaactaatcttcgaatcgaataccaagacggaaaattcagattggactctatcatatgtgtcaaatccaagcttaaacaatttgacagtgtggttcatctgatcgactactatgttcagatgtgcaaggataagcggacaggtccagaagccccccggaacggcactgttcacctttatctgaccaaaccgctctacacgtcagcaccatctctgcagcatctctgtaggctcaccattaacaaatgtaccggtgccatctggggactgcctttaccaacaagactaaaagattacttggaagaatataaattccaggtataaatgtttctctttttttaaacatgtctcacatagagtatctccgaatgcagctatgtaaaagagaaccaaaacttgagtgctctggataactatatggaatgctttctaagaacagctgaagctaatctaatttaaatttaacagcttgaagaggtagctaggtgtttaaagttcctccagatacttttacctgagtgatgcttcccttcctaaggctgaccaagacctgttgatccttttagattaaaaataaaatgtcgcatgtaaaggctgaagtcgcgttttatcagaatgccttgccttcttaggttcttttccattatgtcaaaggtccaggctccagtaggagagaaagaactcctcataggaatactgaagaagtgggaaggaaccaagctgacacaggcctcactgcaatttgatatgcctgctgatcagagtctcttgggcattttatattttgc

SEQ ID NO: 8610 - DNA, 1271 bp, Homo sapiens
ttgggggcttgtgtagaaactccacaatatttaagaaaataaacacaaatctctgagtcaataactaaatgtttctgatggtatactaagaaatataacttattttattaatggttattaatataaccatgacttttaaattaatattaatattaactgatattaatattaatgtaaccatgacttatattaatggttattaatataattatgacttttaattcttttaattaaaatatttgtggttctttatagttcaccacagctttgaataaaacaaaattgttttcatgttttaaatgcagtggaaggttttatgtttggtgttattcaattggtaaggcaaattgctttgttattagcttgatttacgtgaaaatttagatttaattttagatttggtagattttaatctgataccattttatattggtttatatctgaatgcttcattaagatcctgggtatacacagtttaacctcaagcatatagtcttattatattattttattataagaaacagaagtatggaaacttgaggctgggactgttcagagctaaatcttatgaaatgaaataagttcttgtaatcattttgcagccattatttgttgtgcttttgtggtattttgtctcttttgagctatcctcacaggtttccaggaattcaaggcctaagaaacattctactaagaacttgaaataccaaggcatttaatttttggaagtgtagaatgttttattacttttgaagttttgaggaccagcaaaatagagaagtgtattgtgttacacaatttgctatgttataaatgtttacttttagtggacatgatgtaactagaatggaaaaaaacacagaaatagtaattgttgatataatcttgccttggaggtagcgatgggtgggggaatggggagtgggaacatagcatgagaggagaaaaaaatctgttaccaatttatggtaaaattattacagttaaaaagagttgcatatatgaataataataaaaccttcacccagctttcttgaaagtttacaaacttcctttctttgcttagaactagctcgagaaaggaaaaaaaaaatcttctcttagattctttgcataaaaaactaattcctttatttttctcaccggttctcttcatctttcattttggtccccagagaatactgtttgactattttgaaatcatttctcttctccactttgttgcactttgccctctgggatcgtttccccagctcactcttcttcctttg

SEQ ID NO: 8611 - DNA, 1183 bp, Homo sapiens
aaatcattgctgttaatctcaactattgatcagtagtgtcatcagtattctaattgcgtcatagtcattgttttttaaattgtagtgttgacaaacaccagaaagagcccttgacaatatttttgcaactcatctctaaggtgctggccgctgcccagaggccaaagacatgggctgtggaaaacatcagctcttgtaataaggtgcctttgccttcttattgaatcataaatcaaaacacaatagtggactgatgagcatgaagtagactgacctgaatccctgtgatgctgatggatgggagtatagtgtactgtgctgtcaaacaaatgtctgaacctagcaaatgactttggatgtttggagtccgtctcaatctctgcacttggctgctgtgagtgcctttcacttcctccattgcgattctcctgcctctgggcctttgcacatgcaattctctcttctcgagatgcgccacgccctgttcctccttcatcacccagctcctcctcctagtgttcagggcttagctttagcctccttcccctggaaggccttccctaatgaagttaggagctcctctgtataaccaaaggcactgctcactggttttgctgggcacatttataaccattcactcaatgtcatgcttcttagcagactggcctcaggcaaataagaatctagttcaggaagtgtaaggtcagatttcctcgttgccccgtctcatacttcctgttcctcttctgggctctgccagaacggtaactccactcttgtggcctctgctatgaacaaaccccgctctcttcccttcctgctaccctatggcctcttaggtttattttgttctcagcagccctcttggctctggcttctgttagcagctacacgttttctcggtaatatttcaagttcaacctcatcggcgagggtagctgtttggtttagcctttgtcctctagcacgtgcctttcctgcagggaggggcattcccagccttggaacaggccccatcactaaggccacagacagtgccagagggagctggggtctgtgcagccattcttgaattcccccagaatgccttgcctggccttgagtaaaagggatagaagtgaaaaaagcctgttacaaagcagcatgtacgaggtaacccttcatgtgtgttttatatatcaaa

SEQ ID NO: 8612 - DNA, 1736 bp, Homo sapiens
cccaggaagaagacaagagccaattggctctgccatttggaagcattgccttcttctccccacgattctcatttctgcccccaaatgatgtgtttgttgccttgctcatttcaccggggtgtctttttcctcctcaggtgacagattgactgggatcccctcgcacatcctcaacagctccccatcagaccggcagattaaccagctggcccagaggctgggccctgagtgggagcccatggtgctgtctctgggactgtcccagacggatatctaccgctgtaaggccaaccacccccacaacgtgcagtcgcaggtggtggaggccttcatccgttggcggcagcgcttcgggaagcaggccaccttccagagcctgcacaacgggctgcgggctgtggaggtggacccctcgctgctcctgcacatgttggagtgatggtgcctccagcaaccgctggggagtgtgtccctgagtcatgtgggctgaatcctgactttcactcagagcaggtggttttttgtgtaggtttgttttttatttttgatgatcttcagatggaaggagaaaacagggtttccactagacattacttgaaaggccagattactcagcagatctcccatgttggctcaacaattctttgtttttaattgcttgaagattgcattgttgtaattgttcagtttttaaatgtgtaatggcattttaatagactagtaaatcacagtggttcaaaatatatatccatatatatatatatccatatatatatctcatgtcatcacattacaggcaggtgtctcatatgtaaaacatttacctgaatgttgtctgaggactgaactgtggactttactattcataatgataaaataataaaatgcgaattactatatataatgtgcctcactcatgagaaagtaccgtgttgggtttttttttttctttctcattcctgtgttgcatagattaagggtgtaaaattacaatagtcttttttttctttttggaacagaattaatagtaacagtgaaatggttactttcccaagtcaggataaatagctcaggcaggatgtctgtattaaatattgtaagacactaaagctccctgcaaagaccagttcaaggaccagcatgcatacccgagcccttcatctttaaaagatcgctcgagaaaatcctgtgctgtttattgaaagcattaagtcaggggacgagagggggtgtggtctttccattgaagccagaatgactgaagtgttgtgctcctaaggagtatgatttagtcttctgtccttttatcaatagcacatggtgtttatagaatgctttactgttttcacggcttttcctgtatgtgatctcatttggacctctcagcaatgctgtggggcagtgggcaaggtggttcacctccttctgtacagagattgagtgattggcccagggtgaatgaggttgggtgccggctcctgagcctttccaactgctccacagggctcctccccttctctcttgcatgctcattgaagaagcttgaatcctgctccccgcctactaggtgtatggccttggacaagttacttaccctctctacacctcagtttcctcattggcagaatggggaaatgattgtactcacctctgaggtctttgtgatgattaaagcaataatgtccgccaacagcacatccagatgcagctcattgtcagctttcaggaaatggtag

SEQ ID NO: 8613 - DNA, 1215 bp, Homo sapiens
tccttcccacatttacactgaacaattttgattgctcggagagtagaacttctggaaggttgctgatctcagggtatgtgggaagaggaggatggatttttttttttagctgctttcccagctgacttgcttttaaaatcagttttttttcctaggaggtgaggagaaggctagagtggtaggagactcactctaatcactggattcccttttctcatctcactgctaatccccctgataacccttctctccattcccaatacctctcctggcctgcatattttggaaagaagagggaggggactcagtgactgaggaatatagttcttgatagtctctgattataataagaaatgctcctgggtgctgctatttgttatttcctttaggggtcatctccaaggacacaccagcttgagggagcatttgcaaagggagatgcttagtatcttctgcttctctcataccttaccgcatttatttagtgggctttaatttatcttctttcttctcttttaagcaaatcagtagtttgcagatccaagtgacttcacttgcacagtcagagaatgacttgctgaattcaaaccaaatgctgaaggaaatggtggagagattaaaacaagaatgccgaaattttagaagccaagctgaaaaagcgcaactagaagctgaaaagtagagtttgctctttatgtacaaactattttttcttttttctatataacatgtacttattttagtaatgattccaatgttgattatattttagaaactagttacaaatacactttaatagtgtacaatggtctactgaggtaataatgtactttatgtttttatagaatgaactatactgactcttgaattgtttttaaaaaaattaagacattaaaattctgacagtatagtattctgaaaaacctcaaagaaaactttttttattcattgattaaaccaaaacatttcttcaaaaatctattcttctgaatgccagagaacagaatgggttttttgttttgtttttgatgtgcaaaacttaattccttgaattagaactatcttggattttctttgaaaagctaatttatttgttttttttttttttttttttggtcttaaaatttgttactagtagacagtatggagtaaaactggtagggataaaatgattgtggtgatgttcaagatcttatatcctctggaaaaatttgt

SEQ ID NO: 8614 - DNA, 1200 bp, Homo sapiens
tacttttggctacaatagaaacaacaagaagccatatgtgtcattggctcagcagatggcaccacctagcccaagcaacagtacacctaacagcagtagtggaagcaatggaaatgaccagctgagcaaaaccaacctatacatccgaggattgcaaccaggcactactgaccaagatcttgtcaagctgtgtcagccatatggcaagattgtttccactaaggccgtactggacaagaccacaaacaaatgtaaaggctatggctttgtagattttgacagcccttcagcagcacagaaagctgtaacagcactgaaggccagtggtgtacaggcacagatggtaaagcaacaggaacaggaccccacaaatttatacatctcaaacctcccactgtcaatggatgagcaggaactggaggggatgctgaagccctttggccaggttatctccacccgtatccttcgagataccagtgggaccagcagaggtgttggctttgcaaggatggagtccacagagaagtgtgaagccatcatcacccactttaatggaaaatatattaagacaccccctggagtaccagccccatccgatcccttgctttgcaaatttgctgatggcgggccaaagaaacgacagaaccaaggaatatttgtgcaaaatggacgggcttggccaaggaatggagacatgggcatcatggccttgacctatgaccccaccacagctcttcagaatgggttttacccagccccttataacatcacccccaacaggatgcttgctcggtctgcactctccccatacctttcctctcctgtgtcttcgtatcagagagtgactcagacatctcctctacaagtacctaacccatcctggatgcaccaccattcatacctcatgcagccttcaggttcagttctgacaccagggatggaccatcccatttctctccagcctgcctccatgatgggaccccttacccagcaactgggccatctctgcctcagcagcacaggcatgtatatgctgacggctgcagctatgcaaggagcttacatctcccagtacacccctgtgccttccttccagtgtttcagtcgaggagagcagcggccaacagaaccaagtggcagtggacacaccctcagagcatggggtctattctttccagttcaacaagtaacagtgggatt

SEQ ID NO: 8615 - DNA, 1204 bp, Homo sapiens
aggttgagtcattactatgtcctactttctagattcttttgtgtgaattaagctgtgcagaggcagacagtacaatcgtaaaaatagaataacattttaatttagagtgcttggtggttgattgctaaccacttgaatacatatcttcttccttttctcattccttgctctcccttgtttctttctaaatcacaattacagagcctggcaccttaccagggctttgaagggtctgctcccagctgcacttcaggttctggcagggcgtcaagttgtgactttttttttgtacgcaagacatcctggatggctatccaaaggctgtttgggtgactagtgcaggattatctctggattttgaagaaattcatttctaatgttttgtttataagtaaagtaaatgcctggtgtaggtcctccctagacttttaatgttgttttttaaaaaacatcattcactttgagggcatgtagtatttaaaacattgttttgaaatattcaaaggcatagcatgtgcttttaatggaatgtgttttggaagctttccatgagcatcagcagctgtgcttttttgaatattttgaattaccatactttggggcagacattgtactactcactgcttaaaaaatacagtgcctatgcaaaataaaatgtcatatggaggtctgtaaagctgggactagtcaaaagaagtggtaggaaggacacgtggatgtgattatgtatttgtaatggttgcaaagagaagatgaagaatttggaaaaaggttgtactagtcttttaaaaactgcctttcactgagactagcccaacaagtgctcactgattaacaggccaatcgagataatgtttcactttttttcacttattgctgtttgaactctgtactttactttaaaaaattttcaatatgaatttctgtatttagtaaactgcacagtaggagacgttttattgtgtatttcaagcatctaatgtatgtgtaagtgtcttgcagataattgatagctgtgtattgactgattgaaatcaaagaagtctaaccatggtaggaatttaaaattgtgttagaaattttgagtttgataaacctttttataagtaaatataaatacaagagaaagccattgtattagttacttgtggctgctgttacaaattaccatataataggtgtctcaaaacaacaaaaaaattat

SEQ ID NO: 8616 - DNA, 1261 bp, Homo sapiens
atttaccaaaatttaacatatgcattagcctttgccccacagctgtctcatttccgaggcatataccctaaggaaaataagggattcataaggatactatttgccaccttttttaaaaataatgcttctagaaacaagtgtccatcactaggacactagttaagaaaattatgattggtacatgcaatggaatactcttgacccattaaaaactgatggaaagttctttatttgcattaaagtatgtccaaaaaatatagtttcccctcaggaaaaaaaaagcagaatgtagtttagcaagtacagtgctgtcctaatgtgaatatatgtgtgtacatatgttaatataagtgtacaaaaatatctggaagaaggtcagtcaaaatacaagtgttttacattttgtcttttggactttttatctggttggtgttttttgtaatttattattttacaaaaacaaagttgtgttttatgttttaattaaagctgtgccagtgaaaagggagccagttgactcttgaccttcacaagtaggtaaccatgatgaagtaactatgtctggggatctgagtctcagcttttttgtgtctataaatttgattatattcatttacctatagttggacaagctaacctaccacctggacatcatagttttgactccccaaattggactgggtatccattctatgtgttctctgtgtgcctgtcatggtatttgtcacactgtactgtaattccctctgtgccagtagattgtttgctcctgccatacatatacacatgcacatacatactttttctgctatatgttacacatttcttttgatttattatttgtcatctacatttgtatacagaagttttaattttcattagccaaaatgctaatgaaatcacatagatattaaagggatacttggaacaactttatgccaataaattcagtaacttaagcaaaatggacaaattcctaaaaaaataaataaataaattaccaaaaatgacacaaaagaaggaaaagaaaatctaaatgtttcagtgtctgttaaaaaaattgaatttataagcaaaacacttgccacaaagaaaactccgggcagatgactgcaccagtgaattttatcagacatttaagggggacaaagtaccaatcctacaccatttcaggaaacagagcagggagaaatacttctatactcattttatgaggcaagcataatcatgccaaattatttttcctgataccaaaatttga

SEQ ID NO: 8617 - DNA, 1333 bp, Homo sapiens
tctgaaagtcagccaggcatggtggtggcatgctcttgtagtgttagctatgtaggaggctgaggtaggagtatcacatgagcccaggagttcgaggctgcaatgagccatgatagtgctacttcattccagcctgggtgacagagtgagaccctgtctccaaaagaaagaaagaaagaaaacgaagaaaaaaaaatacagtaatgagaacggtagctaacatttgttgcgtatctgccacacacaagaatttttctatgtgctttatgtctattatctccttttatgtttataccatccctgaggagtagggatgttcagatggaaaaaatctaaggcatagaagaattcagctagtaactgatggagttgaggcttgaacccaagcaacaaaatagttccagggctacgtttttaaccgtccttccactatgctgtactgcctcttcataactgtttgggttttttcccctctttaaggcatcgttggcttcacagtatgactgatgatcctccaacaacaaaaccacttactgctcgtaaattcatttggacgaaccataaattcaacgtgactggcaccccagaacaatatgtaccttattctaccactagaaagaagattcaggagtggatcccaccttcaacaccttacaagtaaagacaatgaagaacagttgaaacatgcaaaatatggagcttttcatgtaattactcttttactgtttaccattcactataattcacaattaaaattgtgtgactaaacaatgtctttcgtgcctttttgcccttcactttgttgttttccaactgcaaaatagatgcttccaaacatggtgattgaagtagacttgtattggggtagctgcctggtttacagttcccttttctggaaacagcctctgtggtcctgtttgtgctttgggaccgtaccttactaccatagctcattatatgggaagacctaagccaagccagattttctcatgggaatttggaacttgaatggagagacacgaaggctgaaagtcatcaaaactgggtggcttttattgacgctctctaaggaggttatcagagatatcgtatttcctgagtctggttctttaatggttcattttaaactgtaaactatcctagactctattccaatatattcttagttctttaagctaactagggtcacagattttttttgttgcttacaaataaaaaagtctttaatatccagattggtaccagaggtaggcaaaagaccttcaaggaaatgatgcgggatctttggaactggttgttgtgtctgggtagggtgaaaggcccacatctctct

SEQ ID NO: 8618 - DNA, 2399 bp, Homo sapiens
gaacaaaacacttgttaaatgtcatcaatgaaaactttggaacccttgccttctgccgcagatggctggatcgcttgggagaaagtaaatacttgatggctctgaagaatctgtgtgacttgggcattgtagatccatatccaccattatgtgacattaaaggatcatatacagcgcaatttgaacataccatcctgttgcgtccaacatgtaaagaagttgtcagcagaggagatgactattaaacttagtccaaagccacctcaacacctttattttctgagctttgttggaaaacatgataccagaattaatttgccacatgttgtctgttttaacagtggacccatgtaatacttttatccatgtttaaaaaagaaggaatttggacaaaggcaaaccgtctaatgtaattaaccaacgaaaaagctttccggacttttaaatgctaactgtttttccccttcctgtctaggaaaatgctataaagctcaaattagttaggaatgacttatacgttttgttttgaatacctaagagatactttttggatatttatattgccatattcttacttgaatgctttgaatgactacatccagttctgcacctataccctctggtgttgctttttaaccttcctggaatccattttctaaaaaataaagacattttcagatctgagagctacatctcaatgtctgtggttataattctggacaggataaatagctaaacttaatgtaggcaaatgcagagacatttatctgaaatgtagacctctacactgagacttttctggcatagtggctaaaacaagatctacacatgcataaaaagggacaatcaccttttcttcataaatatacagctttaggaatatttcaccattctttgtaggacatagtagtccttgtctttttttctcctgacattggaaagatgtgctaattgaaacttgacttagtaggaacattgtgccaactcaaaaccttgatttagtaaaaatctcaatgtttagatcctttgtccagtggtggtgtttatcagggaatgtattcagcttgctcagaaaaccaaaagggtattaaagccacaaaagcaaagaagaaaaaaaaaaacttcccatgtttggatcttgttctagttagaaaaattaagttgaaattcttggactttttcattcatgaggcaaatgctgtaataccttcccctttgacaggtttggattcttaacattactagtggtatttcaggaagtgacgttacagttactttccttatagcggctaagtgtattaagttgaatgtaacgatggtaatattaatttgtttgaactgaggcccactactgattctttgacaaattgaattcttatatttaaataattttatgggaatgttccatcataatttctaaatcatttatatatcaaggtagccttaatttgtatatgtttcagtacaatgagattttattgcctctgggatgctgtttagtttgtattttgttgaacgtttttatcctaggaagagaaacctatgacttgtgtacctagatcatctgttacattaaaaagctgctctttcagcattagagctataaatgaatgttaccttgtcgggaaacaatctaggttttagctgtatgagctatgtttattatggtgctaatgttcagtagccacatttgactaatgtctccattctctgtgatgctgtggctagcagcagagctcgccagttcatgcctggacatactgtcagggctgggccctccagctagctcctttggggttgagtccgtatctttttgatgtggaagtataaagcaagtatcttgatttctaaacccagcaattttagaattgacctttatgagtgaagacttttggagcttttaaagaccttggcagtcatgatctcaaaccaattaggagctccaagctcccttcccaggtaactgttgggagcaatggcatcactgtatgcccttgtaatggctggaagggacatgatcttgtaagtaggaaagctgtaactaaaaattgtattgtttgcttattagccatgtatctcttaaaattttgttatgtttacaacgatgtaccttattggcaacaagttattagtttgatgtttaacaatagtgcctttagtaaattattttacaactaaaacatgttgttttttgttagatcaacttagcagaatgtagacgtccatgttgagatttaagataaatagtaagaaatctaagtttctgtttattgtttaggttttaattttattgttggtattttgagacatttttcacactaaaatttagtggaaagtactacagatttcccagacccccccccaataatatcccccttttccaagcctccccccatagg

SEQ ID NO: 8619 - DNA, 1244 bp, Homo sapiens
ttttttttttttttttttttttttagcgggagtctcgctctgtcacccaggctggagtgcagtggcgcgatctcagctcactgcagccgggttcaagctattctcctgcctcagcctcctgagtagctggactatagatgcatgctaccacgcctggctaattttttttttttttgtatttttagtagagatggggtttcactgtgttagccaggatggtcttgatctcctgaccttgtgatctgcccgcctcggccttccaaagtgctgggattacaggcatgagccatggcgtccggcctcttgtatgtttttatattgaaataagtacaagcaacgataccattacaaatagctcaggagtttttacagttccattaaaatgacgtgctaaaatgtataacgttaaaaatagtccttgaaattagaaaagagtagactctggttatcttgaccatgtaaatttttaatgaggtattaagaagtgtgtaacagttgaggtaacaacttgcataggtattatgaacaattttaaacatagccatttaatattccagatgtattttcggcacaaatgatttgtctattcagtgataaaagtctcactgcacctcactatcagctaacccagatgacttgttttgtgaaatttaagaaaaatttattggtagagacctctttcaagtttgtacttaacagatgatcactagtggtgaacagcattctacaggatactatctttcactaagacttcaacctgcaaataaacccacttataaaaaagggatacatgatcttcctgtggttaacagagcttagatacatagctggtctacagagattagttgattctaccctctccaaataagataaagttagcagcaacaggactttaaagaaacccagtgagattatcagaagaagaaaaagagtgactcacactgtatttttttttgtgcaagtttagatagatagcttttagtttttttttttttttttaatgctcagggccagtgttttaagaggctcctacctagtagtcacataatcctagcaagagtaaatcaagctttagttatttagaatgagatgctagacataataatagtccagttgccaattttgaacacttatcttttctgccctataattttttctcttcaagactctattcctttgaactaaaaaaaatacataaagttttaagagatctaatgtcatcagacattataaaatgaactcat

SEQ ID NO: 8620 - DNA, 1184 bp, Homo sapiens
cagaaattctatataaattttagtgttttcatactcttaaaatcttgattaaaaaattttttttaaaagcagtttttaaaaagaaaggctttgaggctcactctcacatacagggctgatatttagccaggagatgagaggactctgttcaaataataaaatccttccatgctgcttggtaaatagccacgggtcccagccactctagcccttccctgtaacttgctgcaaaatgtctgatctgccagtataaaggccagtctctggtacagaaggaggtctctgggaccctgtggcaggaccatacccatctgattggctgggactggtgccttatttgggtgatgctggctgtcacccctgctgacatcctttaatttaatcttgggtattgacttgtgttcttattctctttctccttcctttttcctttcctctgaaccccttccctcctttctttcttctctccctccctttctcctcctctgtctccttctcgcctttctttcttttcaattttttcttttttggcagggatcttgctgcctttgacaaatcccatgatcaagctgtccgaacctaccaagagcacaaagcaagcatgcatcccgtgactgcaatgctggtggggaaagacttaaaagtggattaaagacctgcgtattgatgattttagagatttctcttttttaaatggaattcgtaaagaaatataaaacttcagctcacaattaaaactgtctttttagttttggctttttattgttttgttggtgattttactgaaataaagttgagctacttcttcttatagtggcatattctttgtaaattttaacaaggtttaatcttttgatttacaaattaaaaaattttgaattagctttatattaattttctctcagtatgatcacaaaatatgtcaaggtagtattttacctgatatatgatttaaattcattaatttgaatctgctgcagattcaaaaattcaacatggttaggattttgctttgctttttaaataaccttaaacataagtccgggcgcagtggttcatgcctgtaatcccagcactttgggaggccaaggcgggtgaatcacctgaggtcaggagtttgagaccagcctggccaacatggtgaaaccccgtctctactaaaaatacaaaaattagctgggcgt

SEQ ID NO: 8621 - DNA, 1228 bp, Homo sapiens
agaatggaccttgaaaggctagcctccttagctgtttacagtatcttatcttttagatgcctcccagacaaaaatctgagatggaaaagctacatcaagttcatgctattccaggcccaagaatatctcctaggttagcatattcttatttcaaaaaattagccctggttttctcagttttccatagggaatcccgaccatctgatatatttactgtgtcagtataagtaagttggggttcccctggaactataattaacatttaaaaaatctaatgctttagaagaagctcacagagtggtgatgaacccaaacaacaaagaaaccatttttaacactaggtatcttcatcagtataggtaggtgttcacaatttttgatggatcaaaaacttgctgtaatacaaatagagagtggaggtactaaaggccttgcttgtggaaactgagagaggatacactgctttatgtattactaaagttaggggagaatgaaggaaatctgacagatgaaaaattctacaggaacctcatcatcgtggaactgaactgatgataacttggaacactccagtaaattctgttgtgtaatgtaatttggagcagtgataatacagacatattttctgttccatcagaaaatcagcaggcaccagtccaaaggtaccacacctgtacatgaagaaggaaagttctaatacaagaaaactgaaaagcaccaagctttaaattcaagattaattacaatccttaactataagtgatgataaaaactaacttgaaatgtgactaaataactgatccaaactgggcattaagtggcaggattatgagaaaggataaaaaaagagatttgagaaaacacatttcttgaattttcagaaaaaaatctagactattgctttgacacttagaaattctgaggtttttcaattggaattgagcatctctgtatgtggggatgtgggcccttatcaagggataaaaatccaaacactctaacatgcctccttgactgtaaagtaatgacactggttccaaaattcacaaataatagacactactgtccccccacccccaccccataggctaagaataattctgtaccagaataaaaggagctggtccagggaactgatatttactgaacatacaaagttagtgctagaaggggcctttgagaatgcttcccgccacctgtttccagctcaagacaggtgcacagcaga

SEQ ID NO: 8622 - DNA, 1674 bp, Homo sapiens
tgggaagaacagaagacagagcatgctcttttaagtctgataacatggtttcaagcccagcccccagcctttcttaccaatcaaggactcagaactgaaggcaattatttcttttggtggacttggaatctccgtttgtctacactgtcctcttcacagtggagtctttttatttcagacctacagattgtttttatatttgttgtcacagtgtgacaattttttgtacagtcggttttaaggtcttctctgccattagagccagtaggttacagctattgatgtaactatagctgcaatttttgtgcaggactgagaaacacagtgcattatttattgcggaatcattgctgctaaataactactgtctgtttatttaacacaacaattgaatgcctgaagaagttgcagtggctttattatatgtgaatgcatctgtttctcctcacgaattgttttactgctgcattttttgtttttaaaattaaactgcagtgtttcctggaatgtaaatttagctttgcttaatagtaaaataagtgagccatcttgaacactttaagtttatactatataatttcttaatgaacattggcaaatagagtagctaagagattgacaagcacattacgtttagataagcatgtgatgcagaagttgattcaagcaagtgaatccctgacattttgaggatctcacattagacaccaacaaattaaagctccaaaattatttattttttatgtgttcctcactttagaaacgtctactgcatattactggatatttgtatactaatacacttacctattttacattgtgttttaaatttagttaaaacttaaccgtagaagtctgttcaaacgcgaaaggtcttgctttgtttgttttaaatacatttattttattagaaaggatgatatttcattggggaatagtttctttcatttgggggctatgtgtttcaataacattcacttggaatcagctgaaagctgtaatatgtctttgaaatgagccatgataaattacaaacaagagaaatgagaacttacaggattgcttgaaattattgtgggtattatctgtttaccagagatactaaatattagttttaattatgcatctctttgaacatcataaacacactttggtgttggtaacagtattttaagcatttttgttcacttttaaggactatttgtttagtgcatcttacaaactataaatcttaattggtatattttgaaatggtcgtgtaaatttttgccttatatatcatgaaaatagtcataacttaatttcttttcctgaaattcactgtaaaacattcaggggtcctaccatttctgttcaggaaatcttgtagtttattgttgttatttaacagtattaagtggatttttgtatatttcattttaactttatttgtgaatagtgattgtggcatgtttggggtgttattttaatatttcacgatactaaaattttaattttaaaaaattctggaagaaacagattcatgtgtaatggtgaatattggaccactactgcttttcacatttgtaaattggttttatgttaaaccttgtagcctaacaaactgctgttctttctaactgacagacatgtattaatattgtactttgaaggttataaatatgtggaaattcc

SEQ ID NO: 8623 - DNA, 1127 bp, Homo sapiens
tgccttattttaaagacactgccccagatcagagtttttgtttttgttttttttcaaggagagatgggtgggaggggggttggttggttgttttgccagaattttataattaaactatgtaaaccttagtaggcctgtaagtttatgaggatatgtttttttttttaagtcattttccacagtaaatcaactgttactgctaggaggaagttactttttaaaaaatatttccatagatactgttagactaaaagaaataggtagatgcttcaaatagaataataaactattaaattcagaaagccactatatataaaaggaaaaagacattgtacttaagtatgcaattactttctttttcctgttacaatgttctaggccagctgcttttctgcttaccatcatttatgcttatactaaagcatgtctcatctttaagactaatttttatttatttgtttctgtagctgtttctgtaccaaattctacgtggtttggcatattgccatagaagaaaggtattgcatcgagacttgaaaccacagaacctcctcattaatgagaaaggagaattaaagctagcagattttggtatggaatgtatgagatatttattagtacttccaggttctaaagtgtaatggttaaaagatcaaccactgtcataatgtgccattgcttttatgtgggtttggaaattttctcggtagcccacagaataagatatttgacagaactttggttggtgatttatgttggttattagcagcaaattctaaaatgcacaggctgttcttgggtgtggacaaagacccctagggctcctgagacccttgtaggaggcctctaaatgtaaatatattaccaaaattgtaccatctgttatttgcctatttcactgtgttaatatttgcaatgatggtcccaaaataataatgcataaaactatacatcaaagtagtggcaccaaaatatatctttttttttttttttttttttttttttgaagacagcattttgctgttaaagcccaggctggagtgcagtggtgtgatcttgactcactgcaacctctgcctcccaggttcaagtgactctcctgcctcagcctcccaagtagctgggat

SEQ ID NO: 8624 - DNA, 1278 bp, Homo sapiens
tggagaaagtaattttaaaatggcaattggtgtttctaagccattgactaataaaacatagggttggctagtaattattttgttaacttgatgaagtcaagtatgactattatttattgtacatttgataagacaatttttggaattttgaattgcacaaattacatgatatcttttgcatttatgttactatattgtacttctgacaaatctttattcctgggtggtatttttaagatatctttacctataaaaaatgtttaaggttcataggactcgacaagagctatctggtgattttctcattagtaacatgcaacgttgtactgcaaaatttcaatcaacatgacaacttataatgagtggagatttcatattaggtactaaatattatagtattatttctattttctttttccaaataagaagcttggattattttattttgtggtctttatcattaactttaattctttctgtactgtgtataatatttttatattattggccttaccataaaattatttagaaaggttgtcaaaataagttatacctctttggcaatagatagatgtatacatctacctactatgatctacaattttaggttaagtgaagcttgggggggctactgacttggttaccttcttgtctcttgtcccaaagatttaaactgtgtacctttgtatagctcttctgccccattttgacttctgagatgaaagtatttactaaaattaaaaaaaaaaaaacaaaaaacaaacctttagctcactaactttatgggtttctgaagtgatggaaatttttaaggatatatttaataagcataaacttactaataattacttccaaaaataaaaacaggaatattacttttacccagtgtggtttatagcatacatttgtactgaagcatatagggatgttaatgtgatcttttcctgacagattatgaaagcattatgacttgtaacaagtttccttgtatatcactaacaggtttagaagacataaatattagtgtgttttgcctacatggtgtatttaaatctattaatattttcctgttgcttttttaaaaaaataaatacacataatgtatattaaaagaggtgggatgaaataattttagtaattatgtgtacagatgaaacatttttgtcatggaatttaaaagctaagtaagtataaaaaataaaatgttatatgcaaaaaataggaaacatgaaattgaaatttcattgttggccaaaatgatatgagagatttaccttc

SEQ ID NO: 8625 - DNA, 1416 bp, Homo sapiens
tacacattcagaacagtgatgttgttctttttgatacttttatctcagtatcttttcacgttccataacttgtccatatttttgctcatattttcttacttttctttgttatttattcatgtctgcaacatcaatcatagtagtctagatcaatgcaactcaaagcaccagtctacaaactgttacttatccacaggcaagataagcatgcacaagaatttaaatctagagatactttttaggtcaatgacaggatttgattttttagcaaaattttattaatagctaaagcaatgtattgatttacactctgatgcaagtaatttatctcttcattgactggtagcaaccaattcatggaccagtaccatggaccacactttgagaaacacttctttggataataatagatatcctgggatagtgcatgttcaccatctattttgtcagataatggggccttttaaaaaataatactttgctttcatgatatattgtattttgtggaaagttaagtttagcaatatagactctaaaagcaaattaaatttttttaagccataagaaattatactatatcccagtatctgtatgtctgtataaagcagtgtattatcatgttttcatttctgtgattgtaagttaagagtcttaactgcagaggtattgtggaaagtagtagccttaagcataataaaatatggtctcttgggtactccctctggccattaccacattcttagattatatgtgtccatctttgcagctttctgagagtaattttatttgttgtcttctgaaatgtacatgtatacatgtacctactgagtgctatgtgatttttaaaaatgtattactgtagaatgcttctgcaaattcaataaagttgttaaatttgaacagtgttgtgtggtctccagaaacatgttgttctgtgtgctttattcttggagttgcaacaagttaaatatttgtatatgaacaccccttttccatttcatcattgaaactcactttgacatttcagtggtataattgaaaatattctgattatggtatggtttttcttctgtttgaggaccatgtttttattgactgttggaatctaaatttataagaggaattaatctgtaaccagataccttattcgtttaaccgatttctattccactactaatggttttttttactttgtgctttctagttcttagattctgagttaacaaagcataaaatagattttatattgctgggggttgtaccaaacatagatacattgacagatccattgatagaagtgttgggagatggacttgaaatcttagtcctaaataaagactgaactgtttaaactaacttgataaaaatcactgttcgtttttgggaacctgcaagtattaaatagattctgtacta

SEQ ID NO: 8626 - DNA, 1820 bp, Homo sapiens
gattgcaggcgcgagccaccatgcccagcccatctaacttttaaaatagaaaatatgtagaagttttaaataggttgactgacctcactgctttatatgtatcaattttctactgttacctcagggaatgtgcttggaattaggagtggcaatgacattttatgttatttctctaaatcatgcctttatctaaaattatttttcttttcctcctttcactcccaacagtgctagttgccgcagaccaatcaaaggggctgcaggccggccattagaactcagtgatttcaggatggaggagtctttttcatctaaatatgttcctaagtatgttcccttggcagatgtcaagtcagaaaagacaaaaaagggacgctccattcccgtatggataaaaattttgctgtttgttgttgtggcagtttttttgtttttggtctatcaagctatggaaaccaaccaagtaaatcccttctctaattttcttcatgttgaccctagaaaatccaactgaatggtatctctttggcacgttcaacttggtctcctattttcaataactgttgaaaaacatttgtgtacacttgttgactccaagaactaaaaataatgtgatttcgcctcaataaatgtagtatttcattgaaaagcaaacaaaatatatataaatggacttcattaaaatgtttttgaactttggactagtaggagatcactttgtgccatatgaataatcttttttagctctggaactttttgtaggctttatttttttaatgtgggcatcttatttcatttttgaaaaaatgtatatgttttttgtgtatttgggaaacgaagggtgaaacatggtagtataatgtgaagctacacatttaaatacttagaattcttacagaaaagattttaagaattattctctgctgaataaaaactgcaaatatgtgaaacataatgaaattcagtaagaggaaaagtaacttggttgtactttttgtaactgcaacaaagtttgatggtgtttatgaggaaaagtacagcaataatctcttctgtaacctttattaatagtaatgttgttgtagccctatcatactcactttttaagacacagtatcatgaaagtcctatttcagtaagacccatttacatacagtagatttttagcagagatcttttagtgtaacatacatattttagagaattgttggctagctgtacatgttttgaaaagctgtttagctagctataaggctataattggaaatttgtattttttatttacagcaaaacatttattcagtcatccagtttgctaccaaaatatgttttagataagtgtgtgtatgtttgtttagaagttagaaattgtaaacactggtcttatgtttcatttggattcattattgcattgtcttgttaccagaaacaaattttgccgagctttttttgccctatatttcccagcataatttgattagaaagtacaaaaagggccaggcgcggtggcttacgcctgtaatcccagcactttgggaggccagggcgggtggatcacgaggtcaagagatcaagaccatcctggccaacatggtgaaaccccgtctctactaaaaatacaaaaaaattagctgggcgtgatgatgtgcgcctgtagtcctgtctactagggagactgaggcaggagaatcgtttgaacccaggaggcagaggttgcagtgagcagagattacgtcactgcactgtagcctggcgacagagcaagactccatctcaaaaaaaataaaaaagtacaaaaagtacttgcttttatattacat

SEQ ID NO: 8627 - DNA, 1213 bp, Homo sapiens
atggagtctcactcttgtcacccagactgtagtgcagtggcacgatctgggctcgatgcaacctctgcctcccaggttcaagcaattttcctgcctcggcagagacggggtttcaccatgttggccaggctggtctcgaacccctgacctcaagtgatcagcccacctcagcttcccaaagtgctgggattacaggtgtgatccactgcacccggccggcattatgattttgtgtactcttgaaatggttatctttgtggatgatttttttttttaagctgaaacttacctcatgaataacttgattaaagtagtaggtgattaaaatttcaatagaatcaaatgagacaaaaattttaaactgactcatttgagtttcaactttacagtcattgaccataaagcacactaaaaatgtaagttatttttaaatacatctgaaataaaaatacttactaaaaaggaagaagccgaagatgtatatttagaccagcacacaattttgatttcaattagccttattctaatatttagcttttagatctttcatacacattttcacgtactttgcaattgagaccagaaagacttgtaggtctttctgcagaatgagtgggtccttgcaaagtgagtgggaaacttactcctagatcagaaatgtttgcctctctgagtaaaatgtttctttcagatgagccatagagggggcaccttttactcaacttttctttgttttgaaactttgtttcccatactgttttcagccttttgtttataattagaaattgtgagaagcttcatttagtgtttaaaaatgtggggagataaatcagacttaacatgtatgtaagatcaattcacttaaaagtatggtccaaatagcaaaaataggaccaggtgaaacatgtagtcattttttaaaaacatgtacttggtcttttgtgtgtgtctgttttattccattagaataaatgtgtccttgatgtaaatgcaaagcatttcttcctgattaaattgtagatgtagactttacaatataattcaataataaaaagtaattaacctctagttttgtcgttgcaataaatggttttcagatagcacaaactgtgatttctggataacatttcttatgtgatatttatggattattgtgttttatttcagtctgttcatatgttttacttcttattgtaatcgggttctcgtttat

SEQ ID NO: 8628 - DNA, 1131 bp, Homo sapiens
atagcaatatgcttggagaggtatgtaattaactttaaaattgaatgttccgagtgtttaagactttccgagtgttcttagatttttgtctgtcttgccttattttagcactgaagaaaatggtcctacaaagtgagcaacttgttttaaatcgtatgcctgtgtcagcagagacaggttgataaatgtatttcattaaattacaattctccttttaatatactatcttgttttctaagtaagttggattttgagttttttagagaagggctctgggactcctttgcgtagttccggggcatggcatctagatattttttgaatattcatgttgttcacatagttacgtgttttgttaatgaggttatgagaccacatatatattccatatcatcgtgtgttactttataaaatgtctgaagcttagttgttttctagaactgtcacttcaattgaaaaccaacacaacagcaattcacatcccttccttgtgttttggattttaggagaatacttatctctggcgcacatcactatatttggctgcctctgccagtgctgaattctttgctgacattgccctggctcctatggaagctgctaaggttcgaattcaaacccagccaggttatgccaacactttgagggatgcagctcccaaaatgtataaggaagaaggcctaaaagcgtaagtaaacacttaaaaatttatactatgaaagtacttattttaagtgaacttcatttttttttgtttttttttttgttttgtttttttgagacaaagtctcgctctgtcacccaggctggagtgcagtggcgtgatctcggctcactgcaagctccgcctcccgggttcacgccattctcctgcctcagcctcccaagtagctgggactacaggcgcctgccactgcgcccagctaattttttgtatttttcagtatagacggagtttcaccgtctccatctcctgacctcatgatccgcccaccttggcctcccaaaatgctgggattacaggtgtgagccaccgcacccggcttcttttttttttttctttgagacggagttttgctcttgttgtccaggctggagtgcaatggcactatctcagctcactgcaacctc

SEQ ID NO: 8629 - DNA, 1398 bp, Homo sapiens
tatgctttttaggattcataaatacttgctaactagttcctaaaagggctgtttcatgggatgtcattattaggcttgggaatgtattgatcttactgttgcaccatttttttgttgttgtttattaagaattttatacagaaagtgttgaataaaatctgaaaaactttaaaagattgttccgttttacataggatagacagcttgataactgtacccgtgtcaccctgagtctgatttttattttagaactagaaaaatattattttaaaatcataaaaatgattattggctctgtgaagttttgtttttaactggcactgtatgggatcctttatcttttttcagctggagtcttttgtgcaattgtttctcaccctgctgattctgtggtatctgtgttgaataaagaaaaaggtagcagtgcttctctggtcctcaagagacttggatttaaaggtaggatgatgtttttttcttgaaagaaagaacaacagttttggatatgttgcatttttttcatttgcttttcctgtttgaaccaggtgtatggaagggactgtttgcccgtatcatcatgattggtaccctgactgcactacagtggtttatctatgactccgtgaaggtctacttcagacttcctcgccctcctccacccgagatgccagagtctctgaagaagaagcttgggttaactcagtagttagatcaaagcaaatgtggactgaatctgcttgttgatcagtgttgaagaaagtgcaaaaggaacttttatatatttgacagtgtaggaaattgtctattcctgatataattactgtagtactcttgcttaaggcaagagtttcagatttactgttgaaataaacccaactcttcatgatttgcctgtgacttatttttaaaacttttttaaaaaagatttagctttaaaatagttggaaagaatgaagtatataagttaaggaaaaaatacaaaactgaccatgaccattgttggttgaatattccagttgctattcagaaattgtcatatgtctcaagttttatcacacaaagttcctgtatttctagggaagcagactttaaatttctaaaaacttgatttaattatagttaaatatgtgtagtcatttgtggttattttggcaagtaaatgtcagtgtatacttacatttttgcagcatgtactacaccttttttatgttggtgagtttgctaatccttatttgtaagacaaggtaaaccaaattaggctgattcttagaatgacagtaaaggaccaaagtgattgacagctgaaaacaattttcaggtacactaattctctttacacagatctgactttttttttttttgagacggagtttcactcttgttgcccagacgagtgta

SEQ ID NO: 8630 - DNA, 1174 bp, Homo sapiens
tgtgtgtgtgtgtgtgtgtgtgtgtgtgtctgtctgtctgtctgtctgtgtccagatttcccttttatagggacatgagtcatattggattagggtccaacctaatgacctcatcttaacttacattaactcaaattagagttcttggtgcccttctcccatatcctttccccagctgcaacctgttaatcttttggtccttacctttttagtaagtggcactaccacccacacagccaaaagcttggcttcttttgattctaccatttccctcaactcatcctcatacatctgcaatccttcagcttgtcttattgcatatctctacatgtatttccaatttatcaatatcttttcgttttcacactcctgctcagtatgaacaacataatttctcaccttcagtagcttcctaacttccacccttgccttgctctcatcagtctttttaaagagaaaccaaatttctacacacactggaagatgggggtcctctttccttgcttaatgcagccatgacttgtgatcccaagaagcatctgaagtgggtagcagctccaaagcattggatgctggataagttgaccagtgtgtttgatcctcgtccatccaccggtcccacaagttgagagtgtgtctctccctcatcatcttcctaaggaacagacttaagtatgccctgacaggagatgaagtaaagaagatttgcattcagcagttcattaagatcgatggcaaggtccaaactgatataacctaccctgctgggttcatggatgtcatcagcattgacaagacgggagagaatttccatctgatctgtgacaccaagggtcgctttgctgtacatcatattacacctgaggaggccaagtacaagttgtgcaaagtgagaaaaatctttgtgggcacaaaaggaatctctcgtcttgtgactcatgatgctcgcaccatccactatcctgatccccttatcaaggtgaatgatatcattcagattgatttggagactggcaagattactgatttcaccaagtttgacactggtaacctgtgtatggtgactggaagtgctaacctgggaagaattggtgtgatcaccacagagagaggcaccgtggatcttttgacgtggttcacatgaaagatgccaacagcaacaggtttgccactc

SEQ ID NO: 8631 - DNA, 3194 bp, Homo sapiens
gccagaaaaaggagagaggctgagaaagtaggtgtagctcagcaatgtctaaagccatagagaggtccaggaaaattcatatgaaatgaagtcactattagactaggaaattaggagttagtattttgtattgctgggtcaaaacatgggaacattttttaagtgcttgatacatgtttccaaatgttgtctcaaagcagttttcagcttaagtgcactctcaccagcaatgggcatttttactatcccaagtgtcatacctttggatactatataaatagtctgtatttcctgaaatgattaaattatcttatccccccgccatttatcatttcagctcatggaagagaatgaatctcttaaacaggaactggctaaagctaaaatggctcttgcagaggctcacttggaaaaagatgctcttcttcatcatataaagaagatgacagttgaatagcaggagtggcagtcaaaactgaaattatagctctggagtaggaaggttatatttataatgtggatgttaccagttaggggaagacttttattttcatgaaaagacaataaaacaaaatggaatgtgatgaagtggtgactatttcaaagccagtttagaaagtattagtacgggcattacaatcttttggttgttttgtgttttggggcttaaccctcttttaagctgttgtgatctagggaagtcaacacatagtgtaaaataattacatgcctaatgaaaagaagatgtcatttcctaattttgatatctcattttcggcattttttaaaatgtaaaaggaaaacctcttgtgttcacacagattgctgaattgatttctccatatttgttaataatttactattatttacaaagattcaaatgcttttatgactaatgtaaaatgaaaagaggcttacattttaaatgttattaaaattatgtacttaaatctataattatttaattattgtaaaaagtccaagcagatcaataaactatataattaatgggtttggaaaatcatcaccctactgaacttacaaaatatcttgaaaatgtgaaaaatatcattttaaataatgggtacattgtataagtggaagctataattttcaacaaaaagatggtacaaatgtaaaagtaaaaagcacaaactatacaaaagcaaaatctatggccaagtgatttaaaagcattacttgtacattcctttaaacatttgttgttagaagcaaaagagtaatttatcctgctaaatttggcaccatttgtaattataaaaattttgattaatactatttatattaatttctttaccttcattttttctccttaaggagttgattgtttttggaaatgtttttttccttgcacataagacagtttcataccattcttatagaatcatattaggtgggtgtttgcacatactaaatttataaagctagttttgattaaagctctatgtgagatatatatacatacacaagtcttctataataagagtcgttggtgaattttgaattctattttgttaggaattaaggttgaaatcaacatgaaagaatctcaatcatgcattataaaataaaagtacatgggtgttaagaaacaagagacttttaaagatttaaaatatatttctgatagaatttaactaagtggtgtgtattttaaaattcacattcttaaacataaatctatccaagatagaaaatgaaatagctggactactctttctttaagatacttgaaaattttaaaccacattgcaacactttatggtgctttgcgtgtttggcatgacatacacagtggtcctggtatataagtgcttgggggaaaatacatattttgtttacattaaattttgaagtgatttaggctttattgaaaacaatactggccttccctccccttctctaacatccattttcatttacgttatttaaaatatacaggcactgttttgggtacagaggatatagccaagagcaaattgatagtagtttacctcagagtattaaaaaaatcataataagtcatgttaatctaaaactatataatagccttagattaaatgtgcagatgtctaattaaagatttaaaatgtatagcgtatgtccttagaacatttgatttttaggtatacattcggcaaaaacagtctgttatggaaaagaaggattgatgggacattaacttcttccgagctaacattgtttctgaagattgacctattctatataaatttaaatttttctatgtttttctttttttttttgcgatgaggtttcgctcttgttgcccaggctggagtacaatggtgtgatcttagctcaccgcaacctccgcctcgtgggttcaaatgattctcctgtctcagcctcctgagtaactggggttacaagcgcccaccactacgcccagctaatttttggtatttttagtagacacagggtttcaccatgttggccaggctggtcttcaactcctaaccccaggtgatccgcccacctcggcctcccaaagtgctgggattacaggcgtgagccaccgtacccggcctctatcgtatattataattgcttattgttatagaagctgaatgttttacttactacttttaaatttatttggtcttcccaaggaaatcatacaaacggtagagattatgataatctgagcattctgtgtgcttagtttgatttttttatttataagcagtactatttttatagatgtttaaaattcataaaacactgtattctgagaggtaggtattattcaaatgttagaaattttttttaaaaaaatgccctgaggcttagaaaggacaaatgactgaaatcacaattagtaatctggtctttagacttaaagcctagttatatgcttttattatagcttagtcattaattcacacattttcccttatcttttttatcttttaaaggtgaccataaaactttaaattgtgtgtgtacgtctatgtatgaggtatatgttaccctgtttgtgttattcaaactacctaaaagataggatgatttttgtttaagtgaatcccaaactagcagtctgagaaatacaggaaagcctgataattgacttaccagagttggctttttttttttaagttaccataatttagatataaagttgtcatgtcctggaatttaaaaaagaaatc

SEQ ID NO: 8632 - DNA, 1919 bp, Homo sapiens
aattaaaaatttttaaaaaacatcttgtctccacagttccatctcccaacctctatagccagctgaatgcactacagtttactgtggatgaaagaagcattctatggttaaatcaatttctgttggatttaaaacagagtcttaatcagttcatggctgtgtacaagttgaatgacaattcaaaatctgacgagcatgttgatgttcgagttgatggcttaatgctaaaggtatcatacaaacaagtagtagtaatgatttaattttgttctttttattttatgatttgtgcgtatatgtatgttacattgattattaattcatgttatgttttttaaaaagattctcttcttagtggtcatgtaagtcccctttactcaatttaataagatttgaggggaagagttagtgttttacgtcttaataggaaagtagtattttgggggaaaggtcaagaaaaagaatttctgagctaagtcatgttcttttatcttcaagatgtatggatttgccagttggatgagattaatttttcttctcttctagtttgtcattccttctgaagtgaaatctgaatgtcatcaagatcagccacgtgcaatttctattcagagttctgaaatgattgccacaaatacaaggcactgtccaaactgtcgacattctgacctagaagctttgtttcaagactttaaagattgtgatttttttagtaaaacatataccagcttccccaaatcttgtgacaattttaatcttctacatccaattttccagagacatgctcatgaacaagataccaaaatgcatgaaatttataaaggaaatattactccccaattgaataaaaacactcttaaaacttctgctgccacggatgtttgggctgtgtacttttctcaattttggatagattatgaagggatgaaaagtggaaaaggacggccaataagttttgtagactcattccctctttccatttggatttgtcaaccaacaagatatgcagagtcacaaaaagagccgcagacttgtaatcaggtatctctaaatacatcacaaagtgaatctagtgatctggctggccgattgaagcggaagaagctcttgaaggagtattatagtacagagtctgagcctttgacaaatggtggtcagaagccttcttcatcagatacatttttcagattttccccttcctcgtcagaggcagatattcatctcctagttcatgttcataaacatgtcagtatgcagattaatcactaccagtatctgcttctacttttcctgcatgagtcacttatcctgctttcagagaacttaaggaaagatgtagaagctgtaactggcagtcctgctagtcagacatccatttgtattggaattttacttagaagtgcagaactggctcttttgctccatccagtggatcaagcaaatactcttaagtctcctgtttctgaaagtgtgagcccagtggtacctgattatttgcctacagaaaatggggattttttgtcttcaaaaagaaaacaaattagtagggatataaatagaattagaagtgtaactgttaatcatatgtcagacaacagatctatgagtgttgaccttagccatatccctttaaaggatcctttgctttttaaatcagctagtgatacaaatctgcaaaaaggcatttcttttatggactatttatcagataaacatttagggaaaataagtgaagatgaaagtagtggacttgtttacaaaagtggctcaggagaaattggatcagaaacaagtgacaaaaaggattcattttatacagattcaagtagtatcttaaactacagagaagattcgaatatactttcatttgatagtgatggtaatcaaaacatactttcaagtactttaactagtaaagg

SEQ ID NO: 8633 - DNA, 1189 bp, Homo sapiens
tctaaccagttgagttttttaaagcattgaggattttttcctcttaccaactcctcttcaggtttttaaagacccagcccttcccaatctcaaagagaaaaaggaaactgagttatcttgaataacataactttttaatcaaatgtttattttggcttgtggatcttggtgttatttaaaaaattgaggtgatggtcattgcaagctcatctattaagtactatatggtacacagtctatgagtcattagtcttcattttaatatgtaaaaaatcttgatgctgtattgatttgtttgcatttaagatgacagtgagaaaatgataagcataaagagaagtatcaggttatttgctttttccaaacttttcagatgaactattgtttagtacagagactgagcaaatactacaaaattcaacttaaccttcatttcattggtttaaatgcgttattaaccatcttaagtgcaaactaatcattgtaaattatattttagcatggtctgcctcaaatagtaatgtatttttctgcattcacttggatatatttagaatcacttttttcctcctgtatcaaggaagaggtatgtgctgatttgtttggatatttgacaaggcactctgatgtgacttccctgactactaccttcatatttcatttcaaattcaaacttctgaggttgcagcatatatgaattgcattttcaaaagaagatttgtaagaattaaactatatttatgagtaaacttttgaggtttctgctgtattgtttcaaatgtaataaactttacttctgtaaaaattgagcagttgtatcttctgaccaccaacagattttcagcttgccatgatagtctgacctcattaattactgctactgaagttcaatttttttctaggaattttaggaaccttttgtttaaatattttaatttctattagccatttttaggaaggaaagaatcaattctcttaacaggaaacatgctttatttttcaaaacctttctctgatatttttctttaatttgctgattattcaaccacagagccttatgctataaatgtcatttgtattttaaaaaataatattccactcataaaactttaaaaccatctttcaacgaactatatatgtattatagttgctgccatagagttgatggtttttaattatctggaaccag

SEQ ID NO: 8634 - DNA, 1137 bp, Homo sapiens
gtccatcgtgagcctaccccagtcttctaccaaaacacaaactgcaccgaagtcagcacagactgtcgctaagagccagcattcaactaaagggcctcccagaagtggcaaaaccccagcttcaatcaggaaaccaccctcatctgttaaggatgcagatagtggagataaaaaacctactgcaaagaaaaaggaagatgatgaccattattttgtcatgactggaagtaagaaacctagaaaataaatacatactcattataaaaaaagagaaaaggaagaatgaatgtgttagcttcacatcttaaaagtttctcctatttgtgtctgtctaaataggtgcagacactaaggatagtgaggatggaggctgggatgaggaaagggttcatcagaattcacatatctgaattcactggaaagagcccttctgaagcaaacagttgtaaaatcactgcaaggtttttattaataatagacatgtatatgattttcagtctatagcatctttgttaacatctgccttttgcaggaaatgtaaaagttatttaacactacaagaattttaacaatagttgctctatttttgaatatgtattaaatatggagttcatatacctgctaatatcaacggtggtgctcttactattagttaattgcattttggttaaaaaaaaaaaagcaacagtttggcacttgtcctacaaaaggcacctaatttaattttctgatcaggattgcctgatccaacagtgctaagtcatggctgctgctgactagcttggcattattctgtgttaggtagaattcttattatttatttttttaagctttccaaattggaaggaactgattgtttcatgtggcttatatttacattggtaatattttgtcaccaatatttttggttaaaaaaaatccaacaaattaacttactgaaatataaacaaattttgtaaacaattttttatattatctataaaaacgtagacaccttatgtttcacatgttgtgcaatgtgacaggggaagctgatttagtagcttttagcatattaaaaataattttttataatgtaatttcctgtgagtgcagacctgacattttacattaaaataatgtgaaacatcagaatta

SEQ ID NO: 8635 - DNA, 1247 bp, Homo sapiens
aaatatagaaaagtgcaaaaggtgtttacgactccacattgagggataacctaattgacattttagttatatcctttcactcttttttttttttctatgagcaatcttaaaatggccataccacactttttattttgtgattttttttttcccttagttctcatgcacacgaaatggaaaataagcaattttggaaagtctactatgagcatctagaaaaagcagctacgcatgctggtatgtaaaggggttgtgaggaagctgcgaagaaaagtggttgtttaactgttttgtttttattgcttaattactcacgaaattggaaaacagagatgaaacatatattatcatgataacttttgggagtgacattctttccttacattatagagaaagaaatgccctctcttgagaaaacacttaagataaatgttgatatttgtctggtggttatgacaactttctttcttgcagagaaggaactacagaatgatatgacagatgagaagtccgttggagatgaaagttgggagcagacccaggaaggagatgttggagctctttatcatgagcagttagcattgaaaactgactgtcaggaaagacttgaccacaccaacttcagattcctgctctggagagctctgaccaaattcccagaaagagtagagccacggtccagggagctttccccgcttttcttgagatttatcaagtaagtttcctcttctaagaatatgtccctggtggggcatgaagaagagaatgtgagaagtattaacctcccaaagtggctgagttctttgttttttgccttctttctttctgcttccaatcatccattaggctgaggtattttttgtttgtttgtttttgtttttgttttgttttgttttgtttttagacagagttttgctcttgttgcccaggggtgcagtggtgcgatctcggctcactgcaaccttcacctcccagattcaagcgattctcctgcctcagtctcccagagtagctgggcacaggcatgcgccatcacgcctggctaattttgtatttttagtacagacggggtttctccatgttggtcaggctgttcttgaactcctgacctcaggtgatccacccacctcggcttcccaaagtgctgggattacaggcgtgagccaccacgcccagcctaggctgagttctttatacatctgtcacgttttcaaatcattggcacagctacaaagcactggctctat

SEQ ID NO: 8636 - DNA, 1173 bp, Homo sapiens
tcttatcaatccatacctggaggactaaattttgtggtggtactatattttcaagagaactttggcaaagtagaatgtatctgatggaaagtgaccagcacagtcctaatgctatactttaatcatttaatatcatccatccctaacccctcatcccccagtggtggttccagagacagggaggctgatttccacttagtccaaaatagacatttcaaatattttcaacagtataacagtggaatgggctatcttctacagttagtgaatcgcttgtcaaatagcatactaaagaaggaccaagttaggaaagagtaatattgtggaagcttgcctaaggtaccactatgtctcttcagtgtgtgattctgtgaactgtggacatctctcatgaacagaatcagcacctttcagattggtgtgcgttcttcatcagtatcctgtgactttctttccacggtagcaatgagtattacccagcagatctgcaagttgctccaacccaggatctacggagaaaaggcaaagggatggtggcagaggaaatcgaagaggaacctgccgcaggagatgatgaagagttggaggaagaggcagtgccccaagatgaatcctcacagaagaaaaagacgaggagagctgcagcaaagtaagttcaccattgctgaaagatcacagatccacagttctgggaggaacaggaagaggtctcttacggctttatacaaaatcaactactcagataattatttacgtaagcgctacatcttcctgggattttctttaacagcctaaaactgtcaggcttccaagttttttggttgattacttattagttttttcttggttagctacataatgttagattgggggacttttgagagtcatctaattgtagctcctttttatagatgagaactttgggacctggagtgtttggatattcttttgacctttgtcgtgcactttcccagcgtgagggtattgtgtttgcatgctaggggaacatgtaatggaacatcctttttcttaaaaataagcatgttagcaatttttttttccttccacccaccttccccaccatcctgttagcacttttctctgccttttaacttgccttctactggttacttttttctcatgctgttgttatactctctttcttattctttt

SEQ ID NO: 8637 - DNA, 1193 bp, Homo sapiens
tccgcctcccgggttcaagtgattctcctgcctcagcctccagagtagccgggattacaggcacatgccaccacgcccagctaatttttgtatttttagtagagacggggtttcaccatgttggccaagctggtcccgaactcctgacctcaagtgatccacctgccttggcctcccaaattgctgggattacaggtatgagcaccatgcctggccaccagtcactttggatctaatatagctgtcaggttttttttgttttttgtttttgagacaggggctcactttgttgcctaggctggagtacaccaccacacctggctgatttttgtattttttgtagagacaggatttcaccatgttgtccaggctgtcctcaaactcctgggctcaagcaatcctgacttttttttttaacagtggaaatattttactttttaaaattttatgtttttttctgtttcctcatattagaaacaaattctttttaaaataaaatgttttttctccacttcatatttacagagtattcagcaggattataccacaatactttcctgtttaattcaaacctttccaaaccaactggaattcaaagacttggtacaacttactcattaccatgacccagaaatggacttctttgagaacatgaagcacattcaggtagaagacaattctgctttttcctacctacgacataagcatacatatttcaaacagttctacctcatttggaaagacatgttttaactttccaaaaaggtttaagcttctctttccttggtctttatgatcatcattgaaatttgtgttaagatgatcatttcctggattctaatttctttggtggtatcacaaaccacagttaataatagtgtcgcttttctctgccttttcctaagaagtgtaaatgctttgggtccattgttaaacaaatgctatggattatatctctgaaagcaaatcaaggcacaggtgtttgctcttgtaacacatggactgtgtttcacttccttaatctttgtctttttttttttgagatggagtttcgctcttgttgcccaggctggagtgcaatggcgcaatctcagctcactgtaacctccgcctccagggttcaagtgattctcctgcctcagcgtcctgagtagctgggattacaggcatgcaccaccacacccagctaattt

SEQ ID NO: 8638 - DNA, 2039 bp, Homo sapiens
aattagcttaagactctcttctgaagagcttttcctaatgtatctctattcctactgcctaatcactcacttaaagttagatgcccttgtcacagattagtgacatagtacttgttttgctgtcttgtaagtttgatttgttcatctactcattagataatcacctccttgaggattgagactagtttcacctctgagtcatccatatgtagcccagaagtagtagtagcctggaaaataggtatttggtcttttttgaatttttcattcaaatcatagacaaattcaaagcttagaggaaccttatggatatctagtgcataacctcatctgtgttagctgtcatcattttaagtactttggaatccacctccaatacaaagtttattatagatgatcatgctttatacctgaaaattaattttataaaacagttcattttctctttacaggttagttgaaacattaaaaagcagacagtaattcagtccattcttctcccctgaaatgaagactacatcacctctctccctttggaaacagtcaagtgtacttcacactactagatgttaaaactatatgattattggcatatactgactgactgcaatatttgtagtaaatagggaaaataagtatttagttggagggataatttgatcgaatcacctgaatgttctatgtaatgtaaaatattcttttcttgctttcttgtgttaaggtatatattctatttgtatggaattcttattcaaatacagttctattaaagagtatactcctattggatgaaaaaaacctatttttgaatagtagttgcagcttgtttgtataaatactaaaaaatatcttaacagatttttttccccttaaaatgaattatctttccaaagattagactcagtatgagagtaggtgaggaacatagtttgtgtaatataatctttatttgcttacctgaccactttttattaagctgttttgtttaaaagcttttggttataggcatgaatattgttttgatggttaacttcactgacttatctgtaagtgtcattttatagtactttacagttgtcaaaaaaaatcttacatatattgatctagttgatcggtagaggaagcttgtgaagtaggtaggacaggttatgatgtcttcactgtatggacgtgaacccagggttctaataggttggcttgcccaaggtcacctgctagcttgtaaggtaggaatagggctcaaagtaaaacttttggttcagaagcttgactcataaactatactatatattcccaaaaatgtcagtattgacaacacagtctaactcttaaataaaattatgctaattagttacattcaaaataatgtttataaatttatttgtctatactagtagaagtgatcagtgacatactataaataatcctaaatggttatatttgatagaattcataacacattaaagagaaaatttcacattaaaggaaggtttaaaaatctattttcagattataaaaggtgtctttactggttttcattccttttatctacatgtaattggacatgtaaacttgttaaaaatcaaaatcttactgattgtacagggagaaattaagcattctgttttaaaaattaggcttattgctagactgtaagtttaaaaacaattcatgttcaaaggagcttttcaaattacccagtccaccacagaatcagctaatgtgacagaagtaaatatagtgcgtcataattgctaaaaacagggtgaatttctttcacttaagttggaaaaccagcctctaaaaaattaggtgctggtaatgagagcttaataccatggttccctgcaggtctcagaaacattagtagttcctttcttggccctcactgtccttccagtgttggcctctggcctcttcccctcacatttatgttcattctccgggcttatattcattctctgctgctttctcccttcacccgtgggactctcacccttcttgctcattctccagcacccattcctactttagtctct

SEQ ID NO: 8639 - DNA, 1238 bp, Homo sapiens
attttaaaactcagcttcacagagatgtctttgtgatgtgatgcttagcagtttggcccgaagaaggaaaatatccagtaccatgctgttttgtggcatgaatatagcccactgaccaggaattatttaaccaacccactgaaaacttgtgtgttgagcagctctgaactgattttacttttaaagaatttgctcatggacctgtcatcctttttataaaaaggctcactgacaagagacagctgttaatttcccacagcaatcattgcagactaactttattaggagaagcctatgccagctgggagtgattgctaagaggctccagtctttgcattccaaagccttttgctaaagttttgcactttttttttttcatttcccatttttaagtagttactaagttaactagttattcttgcttctgagtataacgaattgggatgtctaaacctatttttatagatgttatttaaataatgcagcaatatcacctcttattgacaatacctaaattatgagttttattaatatttaagactgtaaatggtcttaaaccactaactactgaagagctcaatgattgacatctgaaatgctttgtaattattgacttcagcccctaagaatgctatgatttcacgtgcaggtctaatttcaaagggctagagttagtactacttaccagatgtaattatgttttggaaatgtacatattcaaacagaagtgcctcattttagaaatgagtagtgctgatggcactggcacattacagtggtgtcttgtttaatactcattggtatattccagtagctatctctctcagttggtttttgatagaacagaggccagcaaactttctttgtaaaaggctggttagtaaattattgcaggccacctgtgtctttgtcatacattcttcttgctgttgtttagtttgttttttttcaaacaaccctctaaaaatgtaaaaaccatgtttagcttgcagctgtacaaaaactgcccaccagccagatgtgaccctcaggccatcatttgccaatcactgagaattagtttttgttgttgttgttgttgttgtttttgagacagagtctctctctgttgcccaggctggagtgcagtggcgcaatctcagctcactgcaacctccgcctcccgggttcaagcagttctgtctcagccttctgagtagctgggactacaggtgcatgccaccacaccctgctaattt

SEQ ID NO: 8640 - DNA, 1156 bp, Homo sapiens
atatttattatgggatctgagcgccatcagccaggtaagggatgcacagaagcttttacagcccaaatcaaaggttaagatgttaaaaatgtgtaagttactatattagaagagggaaggggacttacagagaggtgagttgattggaatttttctaatttttcagtcactgccattggtttggtattaactgaagtcacctagaatcagatccaagaaccttcttcataaagtgtgttatagaaatgctgtctctttgaattttgggtttaaaaatatatatactgaatcttttgcattttttgtaatgtttaaaattaggactccatctttaaaagtctgccagagcaccttgagagcagacgggcagaaggaaaggacaaagaggaggaggtatgacttaaggggtatttcacatcttcatatgccaagtgtttttctcagtctaagcaggatgaagacatctctgccagtcgttttgaagataacgaagaactgaggtactcattgcgatctatcgagaggcatgcaccatgggttcggaatattttcattgtcaccaacgggcagattccatcctggctgaaccttgacaatcctcgagtgacaatagtaacacaccaggtacaggactttctaaaaattacaagactgtgatttctaattctgctcttttagtgtggtacagggatttccataatttcattccctttacccttctacctccatttcttcctttctctagctcttcattgccttcccttccttcctttcaaaaactaaaccaaacccaaacagctctcattcactctctttttttgtttgttgttgttaaaaggatgtttttcgaaatttgagccacttgcctacctttagttcacctgctattgaaagtcacattcatcgcatcgaagggctgtcccagaagtttatttacctaaatgatgatgtcatgtttgggaaggatgtctggccagatgatttttacagtcactccaaaggccagaaggtgagtgcctaagaggaggggggttgtctagcgtggaagtcacttagcaaatcagaaaatgagtgcacatactactgtagtcaaatatcaggccagacatggtggctcacacctgtaatcccagtactttgggaggcggaggtgggt

SEQ ID NO: 8641 - DNA, 1214 bp, Homo sapiens
atccttatctgacattcttggaactagaagggtttcagattttggaattttttgcattttgtaatatttgcatatacatgagataccttgggaatgggacccaagtctaaacatgaaattcatttatgtttcatgtataccttatacacatgacctgatgataattttatataactttttttaataattttgtgcatgaaacaaagtttgtgttaagtgcttatatgtggaatttttcacttgtggtatcatgttagcactcaaaaagttttagtttttggagcattgcagattttcagatgaggaatgctgaacctgtatattgcaaatgtttacattttaccgtacaacagtgaatctctgcttacacttcaggtatagttagtgagataagtgattgagtttctttttatttttctgtcttacagctaatggttgcagagaagaatggaacaatccggttttatgatcttttggcccaacaggctattttatctcttgaatcagaacaagtgccattaatgtcagcacactggtgcttaaaaaacaccttcaaagttggagccgttgcaggaaatgattggttaatttgggatattactcggtccaggtactttcttgatatgtttgtctattacacaccaaaaaaaggcagtaactgttgctaaatgatccactcatccatcctgttatacctgagactatgctgtcaagcgaaagcaagtctttcctatagaaggccagagctatggatttttatataacataaacttgctatgcagatttactctgggagtaacccagaaaggacagtgcaaaagaggaaatcttggatctgtgcaatgttgacttatattggaaaataagaaaaacactgaccctgttgcatgatggttccctgcagtggttctaagtcatgtctttattgtatttcatctgttttaactgattgcttgtttaggatttattatagtttaaacacattggacattctgtcctataaagagaaaatactgtttaaaccttaagttcacccacttgagtttaacacataattcataaaatgcaaaatattatcttttagttatcctcaaaataagagacctgttcacatggatcgagcctgcttattcaggtaatgtaccgtttttgttggagctgtgatttgatcttttgacgttgctgtgccaccactgggatacttttgtagttct

SEQ ID NO: 8642 - DNA, 1540 bp, Homo sapiens
gttatagtagcagtatgggcttctcctcccattggcaattaaatgcttttattttcttctgaaaagatgatgtggaccaacaggtatcagacttgccaacaaggtcggtagactcttcccagcatacatctgagcactgaaggaagaagaaagtttaaattgtttaaaggactataattatcacacaaaatttattaagaaaaaaagaatggatctagtataactaattctgagtaaaccaaaatgataataattaattgttgctatttaatcccacatttttggcaggtgtaattgagccatggtcttatttgattttgttatgattgcatccaaattcactttaactcagagttctgtttaatggtggtaggatgtaagaattgaattttgaaaagactactcactgtcaaaatctctccttcctataggaaatttagctgagttttcttcatccccaatttctctcttttcttgtgttgattcagtattctgaactccattctcagctgggaaagctacagatccttttagtgcaagataaggttttatagccagattcagtggcagaccatgatttaagaaattatgtttggagcctgtgttctgtaaagagaaggttgatttggtttttagctatcgtattcggagtggaactataatacaattgtataatattcttgttgatcaattcaaagttactctgcactgtttttgactttttaaaaataccttagatgcaaatttataggagaaaaaacactttcagataagaggtgtttgctgggatggaagaactacctggcatgtaagaaatatcgtcagtcgtcctaatgcatattgtgactgtttgcatatacttctgtttataaaagtatcagttttacttttcagaggatttgtaagaatcatttaaattttcattgaaataaacgacaagtcacattgccacttacctttgaaactttattttcctcttcgttcatgaaactgctctcatcatttttatattgttccagggaaggagcaataactgatttttctgcagtgtcttccttctgaaagcctttccccaacctgaatgtattaaataccatgtcatcatctaaatttcttatggacttggatgctgaaagtaaaataccttgagaaaacaaagaaaaagttagtattaatatataggaagagagattcatttttgccattcttagtttgatgtttgcatacagtcaaacaagaaagaaaatgaaaaatttctctgtcagcctgcttggtaaacgattctgtatctttatatattttctagcttgaatagaaagcacttcaaagaattatacttttcatcattttagaaatgactcattagattgaggctaacctttatgcagctgctaatacctacattgttttggttttagtgacacattgtttattttgagtgtgaattttctcagaatctgactaagatccttggtagaatgctttctgttgagtagattatagtctcttgaaaatgggttgttattaaggaagaccacag

SEQ ID NO: 8643 - DNA, 1728 bp, Homo sapiens
tagtggggaaaagggacattttaatggcaaaacctaagttagggccccattctctacttgaaactctagacatttttaactgaatttttaataaaaaattactgaggctttgtagaaaaagatgagaatggggtagcatagagtagttgcgctagccacatttcaagtgctccagtgctgcatgtggctagtagctaccatattgaacagtgtagatatagaacattttcatcattacagaaagttctattatacagcactgctccaaacagtaggaactctgaacattgagctagataataagatataatcattttatgttttgtatccacagtggggaaatgtaaggaattgtgtcttgtaattctcttatactgtacctttatttgctcaacagatgtttgttttgcctctaataatatataccaggcactctactaggcactgggaattcaggggtagacacaatagcctcaggcctttctgtatggagcttgtattctcatggaagagcagtcattaagtagataatcatacaaataactatagtctctatagtgctggttgtatagtagatgtttaaatgactgttgattaattgactaatgtgtacagtcccatcatcttcttagatactgacaaatcataggaacaaaaagctagctagtaatttatagttaaggtctgcaagtaacattaaaatttcagtgcagtcaataaatttagttctgttcagactgtttttgttatttttcttatttttgacatagagcaaagattatgtcagttgccctgtggtttaaagccacagttattctagaagcacagttgccatcattgagtagtagctgatccaaaagaattccagccaaggtcttgccaatgatggaaagaaatgatgtgtcctggaagttgccaaaaattatgtttttcttgttgaagacaatctttgtatctttaagcccttcatatgttgtgacatgagcacatatgaatgttccctaaaaggcaacaattatgctgtcaaattcattcaagcagtagttatccctgtataatttgaagttatacagatgcctaataagtgttttgatgctgttgctactgatgttgctgatgacattacatagaaagttgcagaagataaaccatgaagattgacactttaccattattattttgattttgtttctctcttcacatcatcaagtcttgcttatgctgttaagccctagcagttctttaatatggaagggggtatgacatataatttccacctctgagaattattttctttttgttgatttttgcaacttcatccagacttctctaaaatggtgtatctgtgtgctttgtattgttggacactgacactgttgatgtaataatcaggggcttattgtaccagttaataattagccaaactcaggaggctgaggtgggaggatcacttgagcccaggagatcaaggctgcagtgagtcaagatcagatcactgcactccagcctgggcagcagcaagaccctgcctcaaaaacaataataacaataattataataattagcttagtaatagaaattcaaagtatgggtgtttaaataaatcagaattcagtttttctatgcaaagagaagtgtggaaataaattttttaacttcccaaatttttaaacacaagattttttaaaaacttgatcatctgataaaatagcctatacatttttaggg

SEQ ID NO: 8644 - DNA, 1330 bp, Homo sapiens
gggagctgtagtttctcaccaccgccacccccccgcccccccgccatctgaaagggttctaggggatttgcaacctctctcgtgtgtttcttctttccgagaagcgccgccacacgagaaagctggccgcgaaagtcgtgctggaatcacttccaacgaaaccccaggcatagatgggaaagggtgaagaacacgttgccatggctaccgtttccccggtcacggaataaacgctctctaggatccggaagtagttccgccgcgacctctctaaaaggatggatgtgttctctgcttacattcattggacgttttcccttagaggccaaggccgcccaggcaaaggggcggtcccacgtgtgaggggcccgcggagccatttgattggagaaaagctgcaaaccctgaccaatcggaaggagccacgcttcgggcatcggtcaccgcacctggacagctccgattggtggacttccgccccccctcacgaatcctcattgggtgccgtgggtgcgtggtgcggcgcgattggtgggttcatgtttcccgtcccccgcccgcgggaagtgggggtgaaaagcggcccgacctgcttgcggtgtagtgggcggaccgcgcggctggaggtgtgaggatccgaacccaggggtggggggtggaggcggctcctgcgatcgaaggggacttgagactcaccggccgcacgccatgagggccctgtgggtgctgggcctctgctgcgtcctgctgaccttcggtgagtgattctggaggagcagacgtcccccctccacacacgcggccgcttctcgaaggtcctgggggcgttgaacgtgggaggggggatcccggggcctgcggtgggccaagggacgtcaccattcctcgaaagagggcaagggaattacgtttattctcttcttcctctggaaataaaaaaagagagcaacatcatctaactgccctacagatctaatagtatctcgcccggaggtctcagcgacctcggggtggggcctctctgaggctctggctcccccgggagctgtgcgagtccctcccccctccccgcccggaggactttttcggccaccgcaaccttcggccatcccagctttcccgtcccctaattccccagactccgactcctcgcaagcccgtgtcccttcttagatgctggcctcgggagcgtgaggcctggggccagcggaatggcagtgtcagcgtgtttgattcagttttgctggagttcggttcttaacatttctcccccttctcatgcctctgggctcaatttcagttcccctcgccagaggttgcataaatccta

SEQ ID NO: 8645 - DNA, 1330 bp, Homo sapiens; identical to SEQ ID NO: 8644

SEQ ID NO: 8646 - DNA, 1099 bp, Homo sapiens
ccataaactttgtaagactttatagaagatactttcagttggatttgtattcattaactgtgtacaccgagtaagtttaaaaatgggatttctgtcagttgaacaatattttaaaatttggcctcttgggacttattgacagttttgaagtcctcactgtggagcataaatgagtatgactttgctttttagtagaggaaagttgggatttttttttttctggcaattttaagaaccgagtatttccagtgtaatgttaaaggtagcctactgctgtgctaacataatgagacggtatatcagttatattttataaaggtttccattttaacccccaagacaatattcagaggcccctgtgctttcatcataattcctctagttttgaagggaactatgccatgcaatatttgcttacctaactgatttccttagagaggaagaagctattcagttggatggattaaatgcatcacaaataagagaacttagagagaagtcggaaaagtttgccttccaagccgaagttaacagaatgatgaaacttatcatcaattcattgtataaaaataaagaggtaagcaacatgtggttagaatattttatctctgtatggtggcatacttgtttacttaaatttgcttaatttactgcaaaagtaatgtagtatccaagtaagtaggtaacaacctttaaatacctaatatgtccaagaattgctaccagatatctgggaagaaagggagtgtcagacattttccttttcctttacctctaaataggttcacggcctgataatagttgtgagtctaagggcagtcacataaactaaacttcttgcattgcatacctgaagatcactgttaggtgaataagagtgcttttataaggtacagagaagaaataaatgggtttggcataaaatcgaatatcttaatgcatcttgaggatagtctaagtgtattccctctggcttccatttagattttcctgagagaactgatttcaaatgcttctgatgctttagataagataaggctaatatcactgactgatgaaaatgctctttctggaaatgaggaactaacagtcaaaatta

SEQ ID NO: 8647 - DNA, 1353 bp, Homo sapiens
cctgaaaacagagctctcctttacaactcattggccatttataactcattggccaaaactagtcacatggccttagccattcttaaatggaaagtagagtactcctaagtttctggaaggcagacagccaggaatattgagtgaagaatattaatgatccatcacagattccaaatagaggaatcattcaagttgttttgtattctagtaaagaaataggcaagacataaaattttatttttcttgaattgttttccttcaaaggtaacttgttttatttaggtcagcctctaacctttgacatttaggccagtctgcccatttgatattaatactttctcaaatacataaattactttaagatgtacactttcagaaaaggccataaaaaactatgtggaggaaaatatctcagtttagttttctgtattggaattgatgggacccaaagctggttagttcctcaatatttgtttggcataatgtaaatattaaatacaactatctggttcttgtcttgcatttagtgtgataaggagaagaacctgctgcatgtcacagacaccggtgtaggaatgaccagagaagagttggttaaaaaccttggtaccatagccaaatctgggacaagcgagtttttaaacaaaatgactgaagcacaggaagatggccagtcaacttctgaattgattggccagtttggtgtcggtttctattccgccttccttgtagcagataaggttattgtcacttcaaaacacaacaacgatacccagcacatctgggagtctgactccaatgaattttctgtaattgctgacccaagaggaaacactctaggacggggaacgacaattacgtgagtatgaccaattccttataagaattaatagtcatggtgaggatcttgactctccagttctattctctgagcaaatgacttattctgggccttaattttcctgccttataaaatgaggaaacagaactgttgtcacttgaagaaatgtttgaggacctgcaaagggccaggcacaaaggtttgtgattgctgttgtacatggagggtataaagtaggaaatagcagcagcttccccaagggagaaggcttcttgggtacccacagaggaggcactgcttggtcagtttcccaggttagaagagtaatttgtctgtggagcatcctgaataaaggcatggaggcatagcatgctcactagatgaacagagttcttttcggtggcagttatggatagaatgtgatgaacttttatttatttatttattttgagacggagtctcactcttgttgcccaggctggagtgcaatggcacaatcttggctcaccaca

SEQ ID NO: 8648 - DNA, 1109 bp, Homo sapiens
taaagaattgtacaggtccaggattaacattttgtcatctagacacatagccacctttttatcaagcctttcattaaacctttcccctccaatacttccataattagaagactctttagtttttgaatttaaaagtatttgaaagtagcatatttgttcacttcatttagatgctagagagagagtatcactgagtcctaaggttagaatataaacattaaggcaatcttgtggctatttgcacggacagctgaatttcagcccaatctgaatgaattggagtgcttcaccatttcctgcccctcaataaatggcaataacgatatcgtctttgtgtttttcacactcctgcctgggtaccttacattctcaaaagttggagattaacttctctaatcagttattctttcattgtgtttaggtgattaggaagaagcttgttcgtaaaacgctggacatgatcaagaagattgctgatgataaatacaatgatactttttggaaagaatttggtaccaacatcaagcttggtgtgattgaagaccactcgaatcgaacacgtcttgctaaacttcttaggttccagtcttctcatcatccaactgacattactagcctagaccagtatgtggaaagaatgaaggaaaaacaagacaaaatctacttcatggctgggtccagcagaaaagaggtgagatgaactcataagtgttgtcagccattctggaaggtagctagggatttatagccaactcttgagggggagaaaaggaaaacttaattgtgtaactggagtagttataaggcctggtcagtcactgacaggaaggtcatttatattctctgaacctcttaattcttcacctgtaaaatggagtttttaataatgtataaacatagcagctgctaggataaacaaatacaccagggccagacttggaaaactttgtgacttcttaattttgtaggctgaatcttctccatttgttgagcgacttctgaaaaagggctatgaagttatttacctcacagaacctgtggatgaatactgtattcaggcccttcccgaatttgatgggaagaggttccagaatgttgccaaggaagga

SEQ ID NO: 8649 - DNA, 1173 bp, Homo sapiens
tggaaaagtacagtcgtccttaggtgtatgagggagattggttctaggacccctgccaaaatccacaaatattctagtcccccagtctgccctgtggaacccgtgtatatgaagagtgggagctctgtgtgtgtggattccacatcccaagaatacggtattttctatctgagtttggttgctgaacctgcacatacggagggcggactgtatttattggaaaaaaaatagcatataagttcaaacctgtggtgttcaagtgtcaatagtacattttgattttttttttttaccaagagttgttctgtgtaattatgaaagaataagggaaacgtatgaaccctaaaattggatatgttttgttaatgttcatttttatctcttaacagttactatgcgagtcagaagaaaacatttgaaattaatcccagacacccgctgatcagagacatgcttcgacgaattaaggtagtattaaagcagtcctcttgcttgtcttttaatttgagtactttgtatcttttaatattaatctagtgcatcttcttgcatttcaggaagatgaagatgataaaacagttttggatcttgctgtggttttgtttgaaacagcaacgcttcggtcagggtatcttttaccagacactaaagcatatggagatagaatagaaagaatgcttcgcctcagtttgaacattgaccctgatgcaaaggtttgtatccccaaccttcccgcaaaggctggctggctttctttgtttctgttctttcagaataggcctctcatgattgagggatgtagctttgcgacatttgcctaatttctaccttttgaaagaattttattgaatgtttgaatccctgtagtgtcaggcactgcactagaaactaagtcctccttttacgtcctctttcctttttgcctgcctccttttgttagcttggctgttcattctagttaagaggatttagtctgtggttctgaataaacagaagtgacattaattatgattttatacatataaatgagcaaagtggaaataaatccaaggcattaatgggcccataaatgttgtgtttaggtggaagaagagcccgaagaagaacctgaagagacagcagaagacacaacagaagacacagagcaagacgaagatgaagaaatggatgtgg

SEQ ID NO: 8650 - DNA, 1252 bp, Homo sapiens
caactgatggctgaagctcctaatatggcagttgtgaatgaacagcaaatgccagaagaagttccagccccagctcctgctcaggaaccagtgcaaggtagtttcaccatgagagcttagaaagttcaacatcggatcagccagcttatttgagaaagggtttcatggtgaattttagctctattttagtgttaaaaagtcaaatccactttttaagtacttagtatgtgctaagcactgataggttctggggaataaaagaacatgggtcctgcccaaaaatatctcataatctagtagagaaaagtaataagtaaatacacgttacagctcagcacagtttgtagtgaagaggggcatagaatgaatgccctgaaagcttatggggttggcttctaactcagactgatggctcagaggctgcttcccagagcagagaaataacaccagggctctgaaactccaacaatgtggaggcttcatcccgataaagatcagagtagggacatgtccaggctgagggagctatacaggctgggtacagacacacacaagcatggcatggccagaaacagagcaattctgtgtccttggagtctgggatataacaaggaaatggtgagaggtgaggctggatggggacagttgaaacttgttttttaatcccaaagaatttatattctatcatgaaggcaatagggagctgttgagagaatgtaagcaagggatgacttacttgactggtgctttacaaattagcctggaaatattagagaagatagattggttggtagacaacaagtcggaacttggaggcaggccgggcacagtggctcatacctgtaatccctgcactttggaaggctgaggcgggtagatcacctgaggtcaggagttcatgaccagcctggcgaacatggcaaaaccctgcctcacacaaattagccgggcatggtggcgcacacctgtgattccagctactggggaggctgaggcacgagaattgcttgaatcctggaggcggaggctgagaggctgcagtgagccaagattgcaccactgcactccagctgggcaatagtgcgagactctgtctcaaaaacaaaaacaaaaacaaaaacaaaaacaaaacttggagtcaaggagtggattagatggattagagacactgtttgaataatctaggggagcactgaggaggacctgaaggggtggagaaagaattaggaaacacttaggaggtagaattacc

SEQ ID NO: 8651 - DNA, 2109 bp, Homo sapiens
catatacctgataagaagttaatatccaaaatatataagaaactcatacaactcaatagcaaaaaaacaaataacttgatttaaaaataggcaaaggactccggaatctgctaatcccagtcggtgccgcatccccagcccgccgccatggccgcctacaaactggtgctgatccggcacggcgagagcgcatggaacctggagaaccgcttcagcggctggtacgacgccgacctgagcccggcgggccacgaggaggcgaagcgcggcgggcaggcgctacgagatgctggctatgagtttgacatctgcttcacctcagtgcagaagagagcgatccggaccctctggacagtgctagatgccattgatcagatgtggctgccagtggtgaggacttggcgcctcaatgagcggcactatgggggtctaaccggtctcaataaagcagaaactgctgcaaagcattgtgaggcccaggtgaagatctggaggcgctcctatgatgtcccaccacctccgatggagcccgaccatcctttctacagcaacatcagtaaggatcgcaggtatgcagacctcacagaagatcagctaccctcctgtgagagtctgaaggatactattgccagagctctgcccttctggaatgaagaaatagttccccagatcaaggaggggaaacgtgtactgattgcagcccatggcaacagcctccggggcattgtcaagcatctggagggtctctctgaagaggctatcatggagctgaacctgccgactggtattcccattgtctatgaattggacaagaacttgaagcctatcaagcccatgcagtttctgggggatgaggagacggtgcgcaaagccatggaagctgtggctgcccagggcaaggccaagaagtgaaggccggcggggaagatactgtccccaggagcaccctccctgcccatcttgtccctctgcccctcccacctgcacatgtcacactgaccacatctgtagacatcttgagttgtagctgcagatggggaccagtggctcccattttcattttagccattttgtcgcctgcacccactcccttcatacaatctagtcagaatagcagttctagagcacaggttctcagtctaagctatggaaaagctccccttatccaacagagtttaaaagtagtgacttgggtttttgcgagtgctttgtttactaaggactttggggaggaaccatgctaagccatgaccagtgaggagaagcaacagagcctgtctgtccccatgagcggagtctgtcctctgctcttctgcagtcaggtcactgcctactgcctgggggctctagtcattccagtggaagacgaatgtaacctgcgtggtgatgtgacaactgtttcctccctgaccccagaggatctggctctaggttgggatcaatcctgaatttcgttatgtgttaatttacttttattaaaaaagtatagtatatataaataatacaaaacaataacccttctggggtttcttgtggcggttgaaatagtcccacatgtggtcatcagaaaataagccattcctcataccaatataggatcagctccttgacctctgaggggcaggagtgcttcctggtttgtgtattagaatcccttcctgccttgtttcatggcagtgaaatgcctcttggtcctgtccaagtgtatctttcactgatttctgaatcatgttctagttgcttgaccctgccacatgggtccagtgttcatctgagcataactgtactaaatcctttttccatatcagtataataaaggagtgatgtgcaatagcaaaaaaaaaaaaaaaaaaaaaaaaataggcaaaggaccagaatagacatttctctaaagaaagcacacaaatggccaagaggtatatgaaaagatactaaacatcactaataatcagggatattcaaatccaaaccacaataggatatcacttcacatctgttagaatggctattatcaaaaagtcaaaagataacaagtgttggtgatgatgcagagaaaagggaacccttgtacattgctagtgggaatgtaatttggaacagccattatgg

SEQ ID NO: 8652 - DNA, 2125 bp, Homo sapiens
gtgttttctcaatgtagataacagtatatagtgttctcttaatagttaaaaataagcatatgttcatatttgcataggagatttctagaaagatacacaagaaatgggaattagacttgttattgtctttttattcactgaatttttataatatgcatatggtacttttaatctccttttctttaattctgctcaatttaaattttctaatcttagatttctggtgttcagcaaattcagttttcatgatctgaagaaatgatggaatggggagtgtagagaaatgagagtctgtatgattctggaacagagacatcagaaggaaagactggtgaaaagatgtatctttgtatattaatagctgtaatgtagcttcctgatgcttgactaattgaggtgttaattctgacttgagaatctttttcatgaatgattttaaagaaaaatttggattttaaaggtattaaaatatttttgttttgtacgagagtttgttgctctgtatgactcctgtatgcattgtatattgcaatttattactgtcagagatttgtagacagtttcttattttcatattgaatcatgttacttttgtaattcaagtaagcggctgggttaattcatgatgtttgcccttttaataaaatataagggtagagttcattttgaatgcaagttgcctttattataaatttgagtttgtcttggttataccttgcatgataacctagctagatttctagcatttgctgtatttattaaaattattatttttttggtaaaacattaatagtttaagcagcatcatttttttaaaaaatgtaattgaataagtgtgaatgcagaagcaaatattgtctgccctgttaaacttggtgcccattaacagtgtttacactgttcatcgtgcctgttaatgtagttttagttactggagcttttttaagactagatttggttttgagttacatttttaagaatgtgggaatatatttaagtttaatgtagtcctagtgctcttgaaatggtgcccctttcatttggtacatgattttttttcaaatcatatcttcaagtactatagtattctcttacagaagaggagttttatagtctgatggtaaatgtcttcattttacctttttaattgaaatgtcaagtttcctgttacactatggaaaccaagaaacatcagacatcattgcgtgtacagaccttttgcatgggtgagtggatgaaatggagaacagagtgagtgctgtgaacggtgtgaaatagaagccaacttctagtatgctgtcttcatctctgcaataaactaaacgtaaataatgtaactttgtataatttagtagtatgtacttggattgtttctttttgaaaagtgaggatttgtattttctcatctattctttttggtgttaattaacttgagggatttcttttttaagtttttaatatcaaaaattgctattgtatagtttgcctaaaaggaagttggagtgaatatcatctttgaaggacactcaaatttataaggtagaagcaatttcccagatataggctgaacagaaacatttactttgccagaaggagcctttaggagtatatgtgggctaatcagaggttaataatgtcctcatctcctactctccatttaaaaaacaaacttcattgtagtaaattcaaataggaaaaaatgggggagtagttaagcaaaatcaacagtcatcctactatgttgaaagaaccaatgttaatattttgataaatatcatttgtccttttactttgctaaatatgtatatttttataaaaatgggctcatattgtgcataccattttgtaacctgcttttttcacttaacaatatattgggaacatcttttccaggtcatgcatagtcttctgcatcatttttattggtttattattctgctgtatgactcaatcataattcatttaatcttctattggatattttgactatttacatcttttcacagttataaacagcacttcactgaatcccatgtacatccatgactgttttcttaaattctttgaattgctgggttaccaaatatgcaaaattttaaggcttttgatacttcgttatgagtgt

SEQ ID NO: 8653 - DNA, 1138 bp, Homo sapiens
gttcaagcaattctcctgcctcatcctcctgagtagcagcaattacaggcacctgccaccacgcccagctaattttttgtacttttagtagagatggggtttcgccatgttggccaggctggtcttgaactcctgacctcaggtcatccgcccgcctcggcctcccaaagtgctgggattacaggcatgagtcaccctgccaggcactcttttacatctaaattagatttgtttctgtaaatagttgtcaaggcttctctcacttgtatttgagcttttattctgactctgaggtgtggacttttgatagcacacattgtgttaatgttataacatatatttaagagattaaatagtcataaagtgaagatgtgttcttctgaataggctttcatttttgtaggttgttaggaaggtgatggttatagtttctgtaatttacctatgattttctcttcagattgcaaaagatgccaaagaatgtgttcaagaatgtgtaagtgagttcatcagttttataacatctgaagcaagtgaaaggtgccatcaagagaaacggaaaacaatcaatggagaagatattctctttgctatgtctactttaggctttgacagttatgtggaacctctgaaattataccttcagaaattcagagaggtaaataaaatatctcccattgtgcttttttttttcttctttttttttttgaggtggagtatcgctctgttgcccaggctggagtacagtggcaagatctcggctcactgcaacctctgcctcctgggttcaagcaactctcctgcctcagcctcctgagtagctgggattacaggcgtgcaccaccatgcctggctaagttttgtatttttagtagagacgggggttacaccatgttggccaggctggtctcaaactcctgacctcaggtgatccacctgcctcggcctcccaaagtgctgggattacaggtgtgagccaccatgcccggcccccattgtgcttttaagaaaataagagacattatttattttaactttgtaaatgtattacttgttttaaaaattcattttgtagtaaattatgtaacatttctcagaagtatttaattgcttatatcagcagtcctcaacatttttg

SEQ ID NO: 8654 - DNA, 1492 bp, Homo sapiens
gctgtatttagaattattttcttaggatagattactggaatggatttatgggtcagagtatgaacaattctaaggttctagagccctttaaatggtgtgtactaattaataacttcataagctcaaagagttccctgtacttagtagtaagaaataataataggttttgggccaggtgcagtggctcctgcctgtaattccagtgttttgggaggctgaggcaggcagatcatgaggtcaagagatcaatactagcctggccaacatggtgaaaccccgtctctactaaaaatacaaaaattagctgggcgtggtggcatgcgcctgtagtcccaactacttgggaggctgaggcaggagaatcgcttgaacccgggaggtggaggttgcagtgagctgagatcacaccactgcactccagcctggtgacagagtgagactccgtcttaaaaaaaaaaaaaaaaaaacttccttttgcgggtggcggcgaacgcggagagcacgccatgaaggcctcgggcacgctacgagagtacaaggtagtgggtcgctgcctgcccacccccaaatgccacacgccgcccctctaccgcatgcgaatctttgcgcctaatcatgtcgtcgccaagtcccgcttctggtactttgtatctcagttaaagaagatgaagaagtcttcaggggagattgtctactgtgggcaggtgtttgagaagtcccccctgcgggtgaagaacttcaggatctggctgcgctatgactcccggagcggcacccacaacatgtaccgggaataccgggacctgaccaccgcaggcgctgtcacccagtgctaccgagacatgggtgcccggcaccgcgcccgagcccactccattcagatcatgaaggtggaggagatcgcggccagcaagtgccgccggccggctgtcaagcagttccacgactccaagatcaagttcccgctgccccaccgggtcctgcgccgtcagcacaagccacgcttcaccaccaagaggcccaacaccttcttctaggtgcagggccctcgtccgggtgtgccccaaataaactcaggaacgccccggtggaaaaaaaaaaaaaaaaaaagtgatctggctggacaaactgagccagtcccacacaaaatcttaaaaaaaaaaaaagaaaagaaataataataggtttttaaaaatcattatttgcctattggagaggtaaaaacagatttctttatcttaatttgtatcactttgattattaatgaggcacaatattttttcctgtatgttgtatttcctatgtgtaccttgctgggctcaggtggtcctcccaccttagccttccaagtagctgggactatctaaattgtagtcactgtgttgtatttcattatctgaattgcctgttcattttcctcatgggataataatactaggaagagccccggtgcggtggcttacgcctgtaatcccagtactttgggaggcta

SEQ ID NO: 8655 - DNA, 2588 bp, Homo sapiens
ttaaaatgtcttcccccttttattctctggagaaatagaagatatccttgatcatactacttctctgttttattcattttggtagtcgcctaagatggttttaatgcatatggcattatctgaactgttccctgttacctcatttgctcaggcatctgaagatgttgtgctttctcttcccctgcaggtattcacaacattgtctgtgaccaagcgctctggggcaagcatcctccaggctggctgctgaggttaagccccagtgtggatgctgttgccaagactgcaaaccactggctcgtttccgtgcccaaatccaaggcgaagttttctagagggttcttgggctcttggcacctgcgtgtcctgtgcttaccaccgcccaaggcccccttggatctcttggataggagttggtgaatagaaggcaggcagcatcacactggggtcactgacagacttgaagctgacatttggcagggcatcgaagggatgcatccatgaagtcaccagtctcaagcccatgtggtaggcggtgatggaacaactgtcaaatcagttttagcatgacctttccttgtggattttcttattctcgttgtcaagttttctagggttgaatttttttcttttttctccatggtgttaatgatattagagatgaaaaacgttagcagttgatttttgtccaaaagcaagtcatggctagagtatccatgcaaggtgtcttgttgcatggaagggatagtttggctcccttggaggctatgtaggcttgtcccgggaaagagaactgtcctgcagctgaaatggactgttctttactgacctgctcagcagtttcttctctcatatattcccaaaacaagtacatctgcgatcaactctagccaaatttgcccctgtgtgctacatgatggatgattattattttaaggtctgtttaggaagggaaatggctacttggccagccattgcctggcatttggtagtatagtatgattctcaccattatttgtcatggaggcagacatacaccagaaatgggggagaaacagtacatatctttctgtctttagtttattgtgtgctggtctaagcaagctgagatcatttgcaatggaaaacacgtaacttgtttaaaagtttttctggtagctttagctttatgctaaaaaaaataatgacattgggtatctatttctttctaagactacattagtaggaaaataagtcttttcatgcttatgatttagctgttttgtggtaattgctttttaaaggaagttattaatatcataagttattattaatattttgaacacaggtggatgtgaaggattttcatttaaaaaccaagtggttttgactttttctgttgaatgaacaactgtgccttgtggaatttttgcagaagtgtttatgctttgttagcatttcaacttgcattattataaagaggtattaatgcctcagttatgtgtttgtcaatgtactggctgaggattctatctcagctgtcttttctaactgtgtaggttgagttttgaacacgtgcttgtggacatcaggcctcctgccagcagttcttgaagcttctttttcattcctgctactctacctgtatttctcagttgcagcactgagtggtcaaaatacatttctgggccacctcagggaacccatgcatctgcctggcatttaggcagcagagcccctgaccgtcccccacagggctctgcctcacgtcctcatctcatttggctgtgtaaagaaatgggaaaagggaaaaggagagagcaattgaggcagttgaccatattcagttttatttatttatttttaatttgtttttttctccaagtccaccagtctctgaaattagaacagtaggcggtatgagataatcaggcctaatcatgttgtgattctcttttcttagtggagtggaatgttctatccccacaagaaggattatatcttatagacttgtcttgttcagattctgtatttacccattttattgaaacatatactaagttccatgtatttttgttacaaatcttctgaaaaaaaacaaaacaatgtgaaacattaaaattaaaaggcattaataatatccacgtgtgccttcttactgaatgatggtcttgggagtctttgcaagagtattgagtagatctctgatattgtgttgaaaagctagctgctgagtaggctccaatgatgctatgctgatttaagtatagaagaactaatcagttcattgccatttcccatcttctggcagtatcaggcacatagatggtcaataaatgtttccagaaatgttgattaccatgttcagattatgcattcacatgcacttaatcttcttaggtatcactttttaagcagaaactcctcttttatgtaatctttaccaaaaaccttcccagtttgtacttgtttttgtggtaagtagttgcagggtgctagtaataacaacagctaaatgagtgtttactgcaacacgtgcaggcactgtgcttgacacaccctggctgatgtgatccttacaacaatcctattagagaaggtgcttttgt

SEQ ID NO: 8656 - DNA, 1104 bp, Homo sapiens
atactcagtgctctgggaagtcctgccattaagaaccccagttaacccagaatttcttaaacttacacaaccacagaatcttttttggggactggagaggtaccacttcatttattcattaaatagttactgagcacctaccctgtgcagatgctattcacacctgagatatggaggtgacaaggcagacctggcaaacttacaatgttctcatctataaaatgggtatacaggagtgtctaccttgcagggttatggtgaggtctacatttaatgaactaatgcagggtaagtgtttggcacagcccagggacattgtaagtggtcagtgatacatatgtatgattgttatcaccctagtggaggatcagatattaaacaattaaacaggtacctatttagtaacaatggcgttaagttatacaaaagagaaggacagggtgtcaagagagcacatagcaaggaaacctaatgaatgttggcaggtgggatggcggtagtggtcacagaaggctctctcctgagcaagccatgctgaagctaagacatgaaggatgtggggattgttggaaaagagtgggaagggagtgaggcctccttgccttgggaatcatggcccgaatgtcaggggcttacacacacgggtgccgtctggggagttaaattctctggactgtctatttcagaattagggaggtaggggcaggctctagtaggctgtggggtccagaaatgaatgtctttaaaacttaccccagaaatttggagcacccttgggaatattttttggaattgctgctccaggacagcgggcctcagaggttcatgtgcttagaaatcacctgagtctcactcaaaatgcagccgtggggcctgggaatctatttaacagacacatcctgaggcgattctgctgcaggaggttccccgaccttgctttgagaaacacatctctggaagattgactcttataaaaaatcgggaacacgaaggcacgacagcaaatgattccagcagagaatatacaggggcacctctagagactttgtatttgatcttagaaagtacacagtgggcaagaagagtggtatgcaaccccatgtc

SEQ ID NO: 8657 - DNA, 1189 bp, Homo sapiens
aaaaactgccaccccaacacccttccattaaaaaaaaaatacaaaatagcaccacagtctccatctggtttatagcaacagaggtactttatttaatgaagcaatggttctaatcctggatactgccacggactacaattctatccctcccagagggagtggaggaagtcttgggtggtgtggacagaaggaagagaggagagggtgagtggggtatagggcccagggtggctccctactcctcaggctcaaaaggatgctcagtgggaacagatgatctcttgatgagtgcttcttcagtttcatagtttggaatcgttcactgtgtgctttttggggggttttcaatggaaattcacgttgctttgcatttctgtgtccgtctttggtcagttgtgcaagcctgctcactgtcatgtgaagatggcctttcatctggcttctctctcttaagtgagaaagattgtccttcaggggacatgacatcaataggtttctggaatgagggactctttctccccgtgttttgctttgtgttcacattttcttttctaatggcattgaaactttaaaaaaaatggattcaactgtttttgcagaatgtagaaagtattctgtgtccttggttaaagaaatccacttgtgaagtgtgcctggaaaatgaaagtttgtgttttttaaagaggaatatttgaaactgctttctatgcatgcttagctggagaaaagtacaggcaggcgtcccatctcccagccacttctcaaaggtgctgctgtgttttaaagaccaggtacagccagggcagtatttgcaaggacattcctgcttactttatccctttggttggaaagctctagatgattcccgcagctcctccagaccccgcctccctgccctccccagctggtctgggaagaggtggtctgctgacctgtggtatctcagaggggacgttcctcctcctccctgtgcaccaggtgggctgcaccctcctgcctattcaggatgtggatgccacaggagagcagcaggcagtggaaacttcagttgcactggttctcctggtggcaaaggcatgaagcacaggggtcgattaatccaggctactagaaagctccagagcaaagtgtgcgggtcccacaaatgcttggctggtggggtctggatcagtgctgagatagagttggc

SEQ ID NO: 8658 - DNA, 1179 bp, Homo sapiens
accaggtactatattatgttctgaggagtatagagaatttaatgatatgatggctggcccccacatagtttaaattttagtaaatagcttttgaagcaaattttacatatgatatagtagaaggctgatcctggtcgtatcataccatcttcctatctatgtaactttgggaaactctcgcaactcctctgagcctctgcttccctatgtgtaaaacagggatagtaaatgccttcctcaggacccttaataggagaattcattgcagtaatgtaagtaaagcacctcacattaatgctttgctcatggtaagtactcaaatttaactctgatttcctccgtcaccattcttaaaagatattgagatagtttaattaactagatgaattcatttcccacaacccttttcaatcatcaattcctagatatttttctcatccattgttctgacacaatgcctgatacagcagcactgaaaaatgccacacaatgaaaaatggcaatagtacaaggaaaaggggtgcttttctttgggcagctcgctcgtccttcatgggacatcttactttccatttttctacctattggttctgctgttcactggctgtgtgatcttgggcaagatagtaatctaatatctcagagcctaggttgagtatctataaaatgaaaatcaaatctctatctcagtaggtgttgcaaggattcagtgagataatatacataatgcacttaacaaggcgtttggaccatagcattgaagaaatggaaactattaacagcccatttcccattggcagacagaagtagtcaggtgagtaaattttcaccatctatgtgtgactagaaggcggcaaatttctgaatcacatgagtctccaaaagatagccagaaagttaaattctattaatcctcctttaaaaataaaatttcagtaaacattcctttttctttggctttgaagaagccttagggaatatttgtcattttggagacttggcagaataacatgaggggattgtagggaatcaataaaaactaaacaacaaaatcagagtcagagaacattttcaaaaggaagaataggaggtttgatcccagcatgataaacagagcgaatttggcctggaagcacttttgattatactatagctcatttaccatcccagagtttggca

SEQ ID NO: 8659 - DNA, 1201 bp, Homo sapiens
atatgtaggaaatgttttttgtttattatgtaaacatggcttacagaattatgaacagtggatagattaaaggcatttaatatttgtaattcataataactgtagaaatggccctaaagcatgctgcataattaataatttatattttcattattataagtgtttatattaatgatcttgcatttgattatatcaaattcgtcatttcatagcaacagtattgttttctctgtttttcttctctaacttctctgaaatcatctcctattaagggatagaaattgttactagaagagaatcacatgttctgtgttcattatccctacacatgtaaattaattattttatcaatactagatagagttcacatgctgactccctggatacctacagttgagaagaaaatgacagacaattatttttcctttaggtcaaaataatgtcactgctatctggataaattataagttcatatatttgaaataagatcctggaaacgaatttaaatggtgtcaaactgcagagcaacagggcttcagtatattcacatctaataggttaatatgtacatttggatgatgatttttcttgataacattaacattaattttattttttcagacatactgtaatttaaaaattaatgtgagcgtttgttttaagttcacagaaaacttaataattcaaattctcaggaattaaggactcaccataacattgtcagttctaatgaaattttgtaaaagatggcaagtttgttacctcacttgagtggggttttccttttcccccaattctaagagaatataatgtgtatactaaaacattaataaacataattttgaaaatttccttcccctggatgtttatgttcaaaattgaatgtcgtaaaccagtagttcttaatattaacctttttggggtcccccttaattgaatgaaatgaaatctgtggaatcatttttttataaaatgcatgcacataggtaaaaatttgaagtttaaaattggctcctgtcaatgtattccaggtgaaagaaaggtgttttctttcctttatacatccttgatctttccagagcttttttccaataaaaagaaccaatatgaagttactttaaatcctaatcctggaaagggattatcagtatgcattgtttaatgttagtaataactatagtgctatttgcaaacctgagtt

SEQ ID NO: 8660 - DNA, 1294 bp, Homo sapiens
aattaatgctgtccataccactaaccaatgacggaaaatatgtactgttaaacgatcaaccagatgacgatgatggaaatccaaacgaacatagaggcgcagaatccgaagcataactcacttgcgcctgtgggggaagagcaaacaggaaggagagctacctcctaagggttttaacgtctctgacatacaggcacactgacctgatttccgaaggctgacaatcgtttgtggaatgtaatcttgatgccttgatactgagacttgggagggaaactaagaaatggttgacagcgttcccacccatctacaatgttattttaggtgctttgtggtaagtcttttttcttagattgcgctaaaatttcttagattgttcagcgctcagaacaaaagtttgaaaaatgcattgttcatatgaatgtcatctcttttcagtttccagtatcctttttaaaaaatggcaaaagcctagatttacaatttgatgaacactaaatatttcttattaatataatctatttttgtattttacttaatgagctttaagtgcctgtcgttctgaaaattgtgtatttataattcagcttatctcataattggacctaatagcatttctttgtgcagttaggtgatgagcactgctttgaggcccaagcactagtagagatgcgcgatacaggtctagtttcggtaactgttccagacatcaagcaataaaaaaatgaataccacaaaagatgtttgattttacagtggagccttactgaaccagcattcagaagtttaaggtcctcctaggtatgagtatttttagtagtggatcactgtggacagggtgcagctctaccagttcctgtttcttctgagccagaccctcttcagggaagggaccaattaattttaaaactcacttgaagcacagctggtcatggggcttggtataaagttcctatttccaccctgatacttccaattcctggaaccccagcccactcccccatccctcctccctatcaaactagtataatgattttgaatcggtacagtgtgtttaactgtaactaagttcaacagactattattatctttgtaataaattaacctagcaataaaaaatattctgtttctttcgttagatgtggttattttctagaacatccctggaagaaaactaaagtcagctctatagctttaacattcaatttcccaaaaactagggcataatgaaatcacagaagaggggatatagtatcaaaaaatacttccagtcaacatgagtagaatatgtgat

SEQ ID NO: 8661 - DNA, 1483 bp, Homo sapiens
ccctctaccccccatgtttttcctcttctgtgtcttctctttttatacaggcacttggcattggatttagtgacaatccaggatgatctcatttcaggatccttcattacatctgcaaagactctttttttcaaatattcacatgttctgggtggtcatatcttttaggggagggtcacagttcaacccactacaaagggtttatttttatatttttttctcattttttaattttgtagggatggcctcttgctttgttgcccaggctggcctcaaactgtggcctcaaaggatcctcctgtctaagcctcccaaagtgctggggttacagacatgggccaccatgcctagcttactacaaagggtttaatacaactgttcttatagctatattttacagtacatttggaatatttgtaaaaaacgaaaccaggtattataggaaaagtgcataaattctaattgtaaaaaacataagagctcagatgctactagtgctggacagaactctgcaaaattaggtagatataaatagttccatctttttttgttgtttataagacggagtctcgctctgtttcccaggctggagtgcagtggcgcaatctcggctcactgcaagctccacctcccgggttcacaccattctcctggctcagcctcccgagtagctgggactacgcccggctaattttttgtatttttagtagggtttcaccctactaaaaatcttggccaggatggtctcggtcttctgaccttgtgatccgcccacctcggcatcccaaagtgctgagattacaggcatgagccaccgcgcctggccaaatagttccatcttttaaggagtttgaatactcaaaaaatcatgataaagaataaacataaaggagtgtgcagatgccatttaactgaccagttattgatctgcagtagatactgtcttcagtttacaaaatgagaaactaacattcatataaaactgtactgattgcattttcgtttattcaacaaaccagttcaacaagccattatttattcaacaaacatttattgatgacctcctatttagcagacgctgttctaggcacgggggatgtaaaagtgaacacgtcatatgatttttattgggctttgtcctctaccctactaaacagtaggaaaaagacaaactcattctctttctatactttcagcactcagcacactttggtcaccaaaatgtgtgggttttccccacatcaagcaattctgtgacactaactggctgtcctacaatttaactcaattctgacatatctacctggagatagcctcagatcccacaagttaagggcatgatcccgccagactaccccctcccccacacttcagatgccaattgcaagtctaggcctctggtacttctgacaaacgagctataaactaggggttcctgcaacatccccctgggatttgattattttctagaatggcccacaaa

SEQ ID NO: 8662 - DNA, 1238 bp, Homo sapiens
aggggaagcagtagcactaatgctatgtagttgtcatctttgatctggctaggccctgggaatcgggtttagtcatcctgtgggatctatgttaactctttcatgccactggtgaggcatttgttaatttgctactcaactttgaggaaagacagggccttggtcagagagagaatgctctgaactctgctaaggacatagagtcagcccatggtgatttagctccttgctgttcacctcctctttcctgatgtctgccttgctctacagcacaacctcttgagggtggacagggagaaagatgatggtgtcagaggtcaaaactattatatatgacagggcacaagatggtctgtgatctttgcacagatgaatggaagttgatgcacaccaacaagaggcaacttgtcactttctttctcaatattaactggaatgctgcctcttgggttctcacctgcatggatgctttgagttggacgtgatactgtccatattctccagaggattacctggctgaaccattggctctgttcaccagtgacagatggtttccccatccactgagtgtagcatcctcagaggtaggcaagtttgcttctagggagttagcatgtagatgggatattgggatgaggaaaggaaaatcaggtagatggtgctttttttcccccaaatctaagtattctatgtcatggttttaaactttgccatgaactcctgggctttgggggaagagaaagttccattcatttaaatgaataaggtgttgaaagagtgcagggggttgggaggaagcatgtaagagagggaacatttccttagatgttacccagatggttctgggggagacagaaaagaggtgcggcaggactcttatcttaaaaagtaaacaaaacaaaacaaaacaaaacaaaaaactagatatgtaatttctaaacacccagatcacaatgacaagatgccactccaaccatgggacaccttcatgatactaggtttgtacttcctggtctctgggatgacttcagattctgctggccaaggcaaattgaactcagttcaagatggccaccactggtagacgtgtagatagaaaagaggactggtcttgggaacatctttggaaaaaccaacaaacaatagttctagggagatgagaaaaaaattcaccttacagtgctaagaaagtgcattagaatggaattgccctttccttaaggagacagtttgggctc

SEQ ID NO: 8663 - DNA, 2171 bp, Homo sapiens
cgccagctgaagtccgattcccacgggccgaaggaggacggaggcttcagacactcggaagcctttgaggcactccagcaaaagagtcagggactggactccaggctccagcacgtggaggatggggtgctctccatgcaggtggcttctgcgcgccagaccgagagcctggagtccctcctgtccaagagccaggagcacgagcagcgcctggccgccctgcaggggcgcctggaaggcctcgggtcctcagaggcagaccaggatggcctggccagcacggtgaggagcctgggcgagacccagctggtgctctacggtgacgtggaggagctgaagaggagtgtgggcgagctccccagcaccgtggaatcactccagaaggtgcaggagcaggtgcacacgctgctcagtcaggaccaagcccaggccgcccgtctgcctcctcaggacttcctggacagactttcttctctagacaacctgaaagcctcagtcagccaagtggaggcggacttgaaaatgctcaggactgctgtggacagtttggttgcatactcggtcaaaatagaaaccaacgagaacaatctggaatcagccaagggtttactagatgacctgaggaatgatctggataggttgtttgtgaaagtggagaagattcacgaaaaggtctaaatgaattgcgtgtgcagggcgcggatttaaagtccaatttctcatgaccaaaaaatgtgtggttttttcccatgtgtcccctaccccccaatttcttgtcccctcttaaagagcagttgtcaccacctgaacaccaaggcattgtattttcatgcccagttaacttatttacaatatttaagttctctgcttctgcatttggttggtttcctgaagcgcagcccctgtgaataacaggtggcttttcatggatgtctctagtcagagaaaaatgataaaggcttaaattgaggattaacagaagcagattaacctcagaaatcctgtctggctggcagatttcaagtaaaaaaaaaaaaaaggtgggttggggggacccttttctttctagttgtctttaaggaaaattaattttacttttttttttgttctggccgaaatttttatgagatatctctcacttgtcttccactttgaaccggttaaagctcatagctgtcagctctgaatgaggaggggagaagcccctgggtctttctttgaaaggaatccgctgcttgagggctgcctccctcatggtgtgcgtgtcgtttctcttcctgacgcatcttgtgatatcagaggtaactatgcaaagcatccaggcggttctgaatgtgaagcactacacccagcagagtcccggtgccctctgtccccactgccggcccatgttctctctccggaggtcaccaaggaatgcacaggtttcgactaccagaaaggggagtccttgggttctttcaaaaaattcgtgaggagagctgtctacagtggaatagggggtctccctggggaatgcaggccaagtccttttattttaacatgatgtccatgaagaggtttgccgtctgggcagccctgtcggcaaggagcgtgcatactgcgtttgtgtaattgtttgctgtatctcccttccctctgagctgtattgttctttaatggctgtcttgcccttccaaaaaaaattgaaaaaaaaaaaaaaaaaaaaacccgaaaagtaaaaaaaaaaaaaaaaagttttgtttagtttactgtgaaatgaactgtatggcttatttacagtatttttaattcttaataaacacttgagctttgttatgacttttccagagtggttacattctgagaatttcgtaattatgatgtgttttattagcacatggtataaacgattagcaaataggtaagtttactattttaaggctgttttttcttttaattctgaaaccgagatggcctcactcttgggccggggacctcctttgatggactgttagcaagtgtgttcaatgattacttgtctccagctctgttagcttcaagcacaggatctcaaccctcactacctattagaatcttcctaggagcttttaaaaaatgcctgggccctgcccgcacagatgctgattgaataggcataaagaggctggcactgtttttttttttttttt

SEQ ID NO: 8664 - DNA, 1197 bp, Homo sapiens
ttatttggtttgtactggtcccagattattatcaaatacagagaagttttgggatttgggggagggtgaggtggagtggattgttgagtagcacaaatccatatttccttatagctttgggttactggtggttctaatgcccatcttggtttcattttaggctttgggcgttgccttgtatataaaaatgctaaatgtacgttgaaacgatacaccaatcagacttttgataaagtgatggggcccatgttggatgctgctacaaggaaacctatctggcgacatgaaatcttagatgcagatggtatttgttctccaggtaaaagccttttaaaagaaaaaattttaatactttttgacatcatatgttattcaataatatttctgaatatttggcaaaaagggcagaaaaaagtaacaacctataaaaccaccatccaaactcaaccaatgaggtcatttttgatgaatttccttccagtctgtttttctatacactatgtttttacctatcagtaatctatgctaactataattttctagttataattttgaataatagaaaagccactttaaggaaatatttagagtagtttatgtccctgcatctgcactggtatttcttcatttacacatttagcttacagactactttagaattttatccccctgcaaaggtatgactccattataattacaaacttgtaatgcattttgttgatgaaacaaatagcccttgcccttatgggtctcacaggctagtgcaggagactgacattgatcagaggatcatgcataaatccaggttaaggaatcatataggtaactatgaggccattttatagcaagagaatttgaccttgttgggaagatcagcatggctttcccgaggaagtgagctggaatctgaaggatagggaagagttaactaaagaagaggatcagggagcatgttctaagtaatgagaaaagcttgtgcaagggtcccagagcttggtagttgaaaggtctgaaagaagaccagcgtggctaacaagaagagagtgcagggaagcatggtgcacatgagttggtgggtgacgcaaggggtaggggccagagtaagcaagtccttgcaaccatgttagtattgtctttattttattttattaattttatttttgagacagggtctcagtctgtcactgaggctggagt

SEQ ID NO: 8665 - DNA, 1207 bp, Homo sapiens
ttttcaaggatccaggggagtgttaacacattgaagcgcaccgcatatcatttacattttaaaccagtgttaagggaaaatgaccataacttttaagacttctaaatattggaatggactttatgcctctgtccctggagaaaacagttttaatctttcatttgaaaataagaaaagaaaccttcccgctgtgattaaggatttgaataattctgaaacagagaaatactgttagaaaaagataagtctggttctaagattgagaactctctttctacccctaatgaattcagtaaaatacaaacttttaaaaatcatctgtctaatttgagattcgagatcatcaaattctgtctaaatattttgttttaacttctaagctcattatggtctctttgtgttaacttgtattaaaatctgtcagctatgactggtctcataagcacagtcagcggaccagaataagttaattatttacttgtgtcactagtgctcttcatctaatgaaatgcacagctgtgttagatctgcagttggatgtgtagcttccattgttccgcaagtcagcagagggtagaagccgcaatgatggagagccctcagttctttctgctgttctggctttctgtgtcgatttcatggatcttttatcattcactttcacacaaaacaaacaacacagggctgtctgctatgggaaccatcttggcatataaaagggttttcagggcctgaagtaattttaagtcagctaagatttaatttttgacttacaggtgcccttggttcagatattgccaaagcagttcctataatggaaggaaaaaaatccgaaagctgcttatgtgtattttttttaactaaatgtcagaagagggctgataagaaaacaacttccccagaaggaagctctgcactaaatattcttaatcagatttcaagcaaaggtattagagattcacatttcagtggaacgagcacttttttcattttaataacataataaagttgaatttgcttaattaaatgtgtcgattaaaactgaaaacacaaaatgtaagtcatctctctccttacccacccccaatataagtatgtcatgcttccttggtcagtttctgcacctcctgcccctctctcccaccttctcttgatggagggtggacaggcagcttcctcctgagcagacgccagcctcctcctgcga

SEQ ID NO: 8666 - DNA, 1130 bp, Homo sapiens
gtctttttgcaagagcctgtactctggacaaatatgaaccaattcttgagacgttaatctttatttctgggaagggaacagctatgattcaaactgattgtcttccatcctgatggtgaccttatatttcagtttctaacattccgtgatttaaaaaataataaaaaccttttctctctggatttttaactgttgttaagtacattggcagagaaacattctgtgttaagtcatttgagccaaataatgatttttgcatactcgttcttgtttttcagaaactctgtgaaggcatatttaaagtccttataaaggacatcccaacaacatgtcaagtgtcctgcctggaagtactccgcattctctccagagacaaaaaggttttagttcctgtgacaactaaggaaaatatgcagatactgctgcgactagccaagctaaatgagttagatgattctttggagaaagtatcagagttcccagttattgtggagtcattaaaatgtctgtgtaatatagtgttcaacagtcagatggcacagcagctcagcctggaacttaatcttgctgcaaagctctgtaacctcctgagaaagtgcaaggaccggaaatttatcaatgacattaagtgctttgacttgcgcttgctcttccttctgtcacttttgcacaccgacatcaggtcacaattgcgctatgagctccagggactaccgctgctaacgcagatcttggaaagtgcctttagcatcaagtggaccgatgagtatgaatcggccatagaccataatggacctcctctctcacctcaggagacagactgtgccattgaggccctcaaagctctcttcaatgtgacggtagacagttggaaggtgcataaagaggtaaggtagagaaggctatttttgtctacctggaatttaattggtctgggacatccctagagtttcctgcaagagaagaatacaagttgggaaatggaaaaagttcccacttctcccattaagcaattgtattacccaggatatacttcttaaccattgtaagtcttattctttccatttgtgtgataacacctatcagaataggtgtaaaaatggactactattttgtaagatgccaaatat

SEQ ID NO: 8667 - DNA, 2215 bp, Homo sapiens
aaatataaaaagaagccttcacacctattctgtctttaggatgtcttaaattattagcagtactccttttttaaaaacactgtaaaagtaaccacaaatatgtgaggacttactattttaaatggaatggaatgagctccatagattagttttgaatataaagtatataaaagtgcatcagtggtttatataggctttaaaaacatgttatcttacagtcctttaaagcagccatagagtttgtatcatttttcaagccaatttcagtcagggatttgaattgtttgattatggatgataaatgtgtcatatcttattaatatgtctcatgtctcgttccttcttaatatgatttagctggaattcattttcttttcgtttcatgtttaatttcataaaacgtttaacaattggcatatatacttggcattcctgtccaccaaggattgtaatccaagcctgggaaaatcttaaatttctttttacttaaatctggaaatttgtctccattctgccacctttttttttttttttttttatagtggaggggaggaaaggggggtgataccttgcagtaagtaagtcgaaatagcatgcctgaaaatttgaaacagaccattctaacacccaaggcttgtttataaaatacttgagaattacattaatgtggaatcaacagatgcagaagaatataacataacttttaaaagctttcataaataccagcagcaattgtaagcaaatctacaaaggttcttgaacctttctattatatacaaaactgaaaagtcattaaggagttcaactaatcaggaattaaatggtcatttatttcatgcagtatgatttaaggtatttcttgagattctggtcaaatgtcataatcagcaaacgggattaaaaaaaaaactccaaaatcactaaataattatctaaataatggtattggagaacttgtttcctgctatttggaagagattgttgcttcattgctagtttgtatttctaacttctacagttatagactccactgtgctttgtgtctgaatttctcagtatagacattttgtttactgtatgcttgcatatttattttcaactttgtttgtctttaaaattgcttgaggaaaaatggttgtaattaatttctgctacagaaaagccacctggtacgttttgtctcatcaggattgttttaaattctaaactataagtttgttcagaggggcttttgcaatgatagcagaaaactgtacaaatgtacagttagttatagaggttcttgttgaaatgaacttaccatctgatgatatgtatgtacagctgtgtacttgagtcttttttagtttacttagaaagactagcagtttgacctgttaaacaggactagttcaagtcaagaaactaaggttgttgtatacacctggaggcatctgttattcagcttatcctttgagtgggtatttggcacaatgaggataaacttatgtgacccacttgaatggctgatctaataatgttgacattatgcattctgtacttagtgaaatgtcagatgaaaataactgatgaataatttttttgtattaaagggatgggaaaagaacacatgaatttgttaataaagcactatgatctgcaaacgatggaatgtttcataaagatctaaagaaataaaggaaactttaaaacagggtgatcttaccatttttagttactttgcagttcagaaagtgctgtagccagtttaaaattttttttatagtaatgtacaaacatatctttggatatgtattttgatgctgacacaaccatgaaatacaaatatattttaagcaactctaataataaagattaagagtgtagatttctaggttttaccccaacttgccaaatctctgcaaggtggggcccaggactgcattttaacaacctctctgggtaattcttgagtacaacaagagtactttcaaacaaagtttgaaaactgatggattataaagcagggagcacttctgtctgttccaagtagctgtggaaccaactgagacatctcactggaaagaaatgactgactaaaaggggtggggaggagtgtagaaaattgatatttactgggcatctgcttacctgccaggtactggccatacttctcatttaatcagcatgagggccttatgaaggaagtatcattactctcttacaaatacagaac

SEQ ID NO: 8668 - DNA, 1200 bp, Homo sapiens
tctcagtcccacgaacaccgtggccggcgcccggtggctactgcgcccagcggggctcagggaagagcggtctagacactttttattttggaagaaaggggcaagccccggcgggagcttccttcccggcctggctcgctccccattgcgcccagctccggcccggactctggaagatgactccagggtctgctctgtatattccagcggcggcagttccgggaggcagccgaaagtactaacagttggtagcagcggctagtggaaaagtgagccaaggcggcgcggactcggctctccccgcgccccgcggcactcgctgctcctcgccgctccttccctttggctcccaggcggctgcagcatgaagtggcgcagcgatggccaggagaggtaagaagcccgtggtgagaacgctggaggatctgacgctggactcgggttatggtggcgcggcggactcggtgcgctcctccaacttgtctttgtgctgttccgactcgcacccggcgtccccgtatggcgggagctgctggccgcctctagctgactccatgcacagccggcacaacagctttgacactgtcaacactgccctggtggaagactccgaggggctggactgcgccggccagcactgctcgcggctgctgccggacctagacgaggtcccctggactctccaggagctggaggcgctgctgctgcgttcgcgggatccccgggcaggcccggcggtccccggcggcctgcccaaggacgcgctggccaagctgtcgacgctggtgagccgggcgctggtgcgcatagccaaagaggcgcagcgcctgagcctgcgcttcgccaagtgcaccaagtacgagatccagagcgccatggagatcgtgctgtcctggggcctggccgcgcactgtacggcggctgcgctggccgcactgtccctctacaacatgagcagcgccggcggcgaccgcctgggccgcggcaagtcggcccgctgcggcctcaccttctccgtgggccgcgtgtatcgctggatggtggacagccgcgtggcgctgcgcatccacgagcacgccgccatctacctgacagcctgcatggagagcctcttccgggacatctactcgcgggtcgtggcctccggggtgccccggagctgcagtggccctgggtcaggctcgggctccggcccaggcc

SEQ ID NO: 8669 - DNA, 1158 bp, Homo sapiens
atttttagtagagatggagtttcaccatgttgaccgggctggtcttgatccaccctccggtgattcaccctcctcgccttcccaatgtgttgggattacaggcatgaaccactgctcggcctccaccgtctattttaaggaggcctcctaggattctgaaacccactaaaatgtgggagccatctctctgcagcatccaggccaggcctgactacccccgaagagtctgctgtcccatcttatgttctggcaggttgcgggcagcagcaggtgtggcatgggacagaaggggtgtcagagttgacctgacctcctgatcctaagaaatgctgtcatctcagcatctggaagttgacattcatactaataaaaaaagtcagacgtggtgcctgtgctcaaattgagggctgggcaactgtgaggacaaaaggtaggaggcatggaagtggggctgatgcccaagagatgggatcattgactgtcagggtggagagacccttaggacatctggtccaggcgtcttatttcacagatgagaagactgaggcctagaagggagaaatgactgctaattagatacagatgagattgctgtgcatcctctgggcttctaggcacctgctccctttccagtcttgcctccaggctcagggctctgggtactccaagaacactgctgctgggtaaattcaggggatcctggtggtgtgctggctccaaagggagcagaaaccggatagcagagattacagctgcctctgacatgatgtcatattaaaatgaaaggtttagggagatgagcactgcagcctgtcaccaggcagcccgagtgttatttaggactttgtttttgtcttggtggactgcactcagtgcagccgtgagtcaccaaatgatagctctcaggttttgaccgcatcccatgtgctgggtgctgtgcagacctcatttctaaactttgtctgtaaaattcccattttacagacaaaaaagccaagcctcagggactttaagtaacttgcccaagactggggtttgatcctccctcagtctgaaccaaagctggggacctttccacttgcctctgctcctttcatcgtcagctgccagcctatggtttgggcaccagtttgacaccagggttattgccaattttat

SEQ ID NO: 8670 - DNA, 1379 bp, Homo sapiens
gtgctacttggcagctagtaagtttaaagcaggacctgccttaactgctcctggccacttggaagtttagggtagatcttgttttccaaagtttcggcaggtgcctggagggcaaataaaaaagcagcagtcagtcagtagtcagtgatggagagaacaagaggagagatgcctggcctctgcccaagaaattagctttgatggaagcctgagcaagtcacctggttattgtaacgtggagatctttgtaggtttagacatggctccctgtctccagtaaacatccagccattcagacaaagggggcctggagatacagagagcccaaataatgcctgctggattgtctcctgatgagtacatgtggactcacctgaggaagggaaggaagggaataatcttttatgtttcatttaccttatgaaaagtgttaaaacattgccaactcaaaataacattatttaatgcatgtgcaaagttaggtcttcccagttgtctcagtgctgaggaacctcatcagagaagcatggaagatgccaaaggatttttggaaggtaaagaaggctgaatagtgaccacatgggcctgttttcagggtcccagcttagttaagtcacccatgcacctggtcattgtgtctcccatgcacatccagcgtttctcagaagcagacccacccttaagttgacaggattgatggaacatgctctcctgctcaaggcacaacctctgggctggagtagaggactctggtgggaaggttttgctgctaatgtatttatggaatgaatgtatttcattcaaatctgtattcctctaggaaggattaaaattaaacttttttaaaatacaggattcctctggtagtctcatttcatggaggaaggagatgagtgagtcttctagggaaagtcaagtacaatttgaatctttctgaggttagaagaagagagcatttctagagtattttagcttttgagatcatattcttattgtttctgctgttagtacttaagacaaactgcttcctgtgcttccaaccctcttctgccctgttcctgcctaaggtatgcctttactctgttacctccttggagaaatgtggcaggtctgcagtggagggttgggggatgtgttgcggatggttagggttggctgctgacactgggtcgtgacgcctccctcagggcagctctggttcctagggcagcttcaaactcagcattttgccaaaggcatccagctggctggttcccccatacccaggaaaccactggtactgggactctaagctccctttcttcctttatctcagtagcacacactgggttcacttccttcattcccaagactgaaatgatgcccaagatagttacgcc

SEQ ID NO: 8671 - DNA, 1146 bp, Homo sapiens
ccatatatctccccttgatcatagtccaacagggccagcttcccttgggggccctttaaggaatggggtgaatgaaattgtgtcatttctatacaaacactgctctcttgatgctgaaatgccaaaccgaaggatttctgaggacctaaatcacggagcatcaatcttacaaagtgttggtccagagtcccatctcttccccaaccctggataccagtagcttcccacccagtccaaacctgcaccatccatcattatgtagatgaaaaagccataggtcatagcctctttgctattctattggagtagcctccctaggcagtccctctgaagccttggagtgcaggtaaatgctcattcccaagtagcaaagagaccatggagaaggtgcgtgtaaagagatatatttttgtaagaggaatatgattaatacattccgccccttggaacctggccatgcaaagcaagggcacagggattagacctgtggcacacttccccaattccctcatctgtaggatttgggctgccccaggcccacccagggggctctgaatgtattttgtaccgtgtttctttcccccaggagaatttttagtcttctttcatgaagcagtggaggggttggcctcccttctactgggaggttgactctctctgggagactcttggtccaagacctgggtcagttctttgctggtggtcccctctgaccacaagcttctgcctgaagattcctcaggtcaacaccatcattaaatgcgagttttgttgatgattctaccatgtggtagagtgttgtgtaagacaggttcacaaatgggatgttttcctagtgtgtgtgtgtgtgtgtgtgtgtgtgtatgagagagagagagagagacaacagagacagagagaggcagagaggcatagagagacagagagagagacaagaaacagagatagacagaaaatgttcggggtggcaggcgggttggtgtataactgctttgtgcctgtgtgactctggcatagctgctcagggagaattacgtgcctctgtgtgtaaaattgcctttgtgttctcctgcctttctatgttttgaaactgtatcccacaagttgccggtatgaccatcttatttgtaatgagtctgtgcaggt

SEQ ID NO: 8672 - DNA, 1703 bp, Homo sapiens
ttgtatatatattatcagtagctggccagaaaaccctaccttcaagtcactgctctgtgttaaagtatgtggaaatgcataggtgatctgggagaggaaggtgacatatcagcccatgaactccataggccatgaatttggctttcggatcagctaggaagacagagaactggtcctgagaggtcctgtgggctctttgcaagggcaagacaagtgagggatgcaacgaggacttgagatttggcaaagaaatgagaaaggagaaaagaacctttaaaggatgcaggcatggagcagctcaccctagaacatcgcaggctgatggtgctttaggctggagctatttggggcgtcagggtggtgccagcccctgatctcaccttgcccctcttacctgggggtggggttgtggcaggcatcttcaccagcagccctcaccccatcacagggatttttttctgcctttcctaatccactcagctctggctggaggtgcttagaataaaacactggtggtggggcttctcattctggttaatttcctcaacgcctttggagacaggtccaaaatgcagctttgggaagcaactccggagagtcccctgggaagaagagtatgtccgaggactcagtcacttgagacagagtctggagctggactccttgaactgtgtttctgagctgcagacaccaaatacctcctggatacaggtgcctggcatggcttttctcatctaatactgacacgtccctgtggccacagagtgtcatagccccatttacaaatgacatagctgaggcccagatggggaaagtaacttgcccagcatcacacagctaatcagtggcagagttaagatctgaacctggctccgtctggctccagaaactctgttcttctatttggaatttatctgtggagattattctagtatattgatagcctacatttatttagcactttttatattatgcactttacatatgttttctcatttaatcattacagcaaccctgagttaggtatggttataacttcccttttacataggaggaatctgaggcttagagaggttaagtaacttgcccaaaggtacccagctagtctctgccggagcttggatttgaacttcagtttgcctggctcaaatgaggctgcagagttgggaaggacttaaaaagtttggagatttttgccataaatattgatttttctgcaaatgaggatgaacatcttaatggcctttaagaaactttgcaaatagttttcaaaaatgatgcaacatggcagagaaaatgcacttggcttccagctccctcaacagccattaacagcctcctaccgtggctcccacctcctatgtctccagagatcaaggcaatggggagggaaagctggcaggaggcagtcccttgtgggcctgaggccctttggctcctaagtgtccacattctgttctcttccaagtcccttcattgttaagctgattctccaacaagatgcaatgaacagatgcaatgtctaccccgcgctgggcgagttcccgaggccatgggctgtttggaatcacacttcattaagagacaaactgttccttcccttattgtgccttaatgcttatgacaaggcagctctgaattgatcccaagctggagcctctgaatgctttaaagagtttgaatatagacggtttgagagcaaa

SEQ ID NO: 8673 - DNA, 1238 bp, Homo sapiens
tgggagacaggaaatgccttacttcactctggcccggcggacctcccaccacccagcagtgcactggggatggacaggcctggtgtgctgcgtgctcgcaaccacagatggctcctcggctttagacagaaaggggaaggggttctaagtcaagagcctttcagtgctccctcatattgagggcagtggcagaaaagtgaccactctgcaggctgggcccaggatgtggtgtcctgagatagttttgtatcttaaagactgaggcacagaagcgaaacgagaacacactgtttttgagacacagttgtccaaatgtttctggccagctccggcccctttttgtatgacacttctcttccaccctgcacagcacatgtgcccgtcattcttttaattttaaaagatgaaatggcagatgctagtaattcacagaatggcctcttgtgggggtgggtctgagggaagtcagctataaaacatttgctggagttttgttcaatggggctgtgcatttttatattatgtgtttgtaaatgacatgtcagccattgtttcatgtttcctaaaagcagaatatttgcaacatttgttttgtataggaattatttgtgccacctgctgtggactgttttctttgcctagtgactagtgacctgtgttgtctaaacatgagtttcagccctttggttttgtttaataccatgtcaaatgcaaacttcaattctccccatttagctttattaaactgacgttctcttcaaaacttcttgctgaatggtactcagatgtgcattcacatacagatgtgttttgaagtgggtgtaccttgctttacctaatagatgtgtaaatagaacttttgtaagtcaaatcccattgtcactttgatttaaattattccagctgtgatgtgtcttcattttatagcagtttgacactggagcttttgagcttttttacctcacatcttttatcaaataatatttactgctttgaaaacagcaacagcattggccagttcagtaggggaagcttgctttattaagacactctggagaaagacgtcagggaatccttgtatatgtcgtgggaatcaactcctcatttatctgttgcgtaagtttaagtttttgtgcatcagtcgggttttctatatttttttaacttaacattttttaatataaccgattaaaaagtagacagaacagtaaaataaactcctgtgtgcctaccattca

SEQ ID NO: 8674 - DNA, 1213 bp, Homo sapiens
gatttatgttattacttccacttgattgagcccacttacccgagtgtaattggggcacagaaagtcgtgggacaggtcaggcggatcacaaaagacttctcggggtggtgcttgcccctccgagtctggtgagggagtaagtgtcacatgcagctgtcacagcactttcacttcacacctctgttcaagctccctgaagagaagtaacagttaaccatggctacttttcttttgaaaacctgtagagcagccttccaaacgcagaagggtcgagaacagcatccctgcagctggagaaacacaaaatgtagaagtagcagcagggcccgctgggaaatgtgctgccgtagatgtggagcccccttcgaagcagaaggagaaggcagcctccctgaagagggacatgcccaaggtgctgcacgacagcagcaaggacagcatcaccgtctttgtcagcaacctgccctacagcatgcaggagccggacacgaagctcaggccactcttcgaggcctgtggggaggtggtccagatccgacccatcttcagcaaccgtggggatttccgaggttactgctacgtggagtttaaagaagagaaatcagcccttcaggcactggagatggaccggaaaagtgtagaagggaggccaatgtttgtttccccctgtgtggataagagcaaaaaccccgattttaaggtaggtttatggaaaaaaagaatgcctttcatctgtggttgctttagacaggcactttcttcctgcagcagtgatatttaggatagacatggaagttttacgctctgtttggatctaaacttccttgtgagccaaggtccatcctgagccggttgactgaggtctgactcatggcatggctccttcttgctgggtgcttagcaatgacaagggactgtgctgaatgctttatgtgtgtcagctcattgactcctcatgagactctgtgaatggttacttttattcttgccgttttacagaggaagacatggaggcctggagaggttaagtgactcgctccggtggccccattaacaagtttcagagcatggcttggctctagtctgcctggctgggctgctcatggggacaaggctggtgtcagaggagtcaggtgagctgggtcatgcctcgaatcatggtttttctctgtcttccttcttcctataggtgttcaggtacagcacttcccta

SEQ ID NO: 8675 - DNA, 1251 bp, Homo sapiens
gcaaagtgaacaacgaaatcagaacagtgatccaggtggctgatcgcaagccctctaaaggcagagataataaagagctagaacttctttttcatccctttgtctcccaagtgtctttccctggtagctgcagaggtcaaaggtcccaaacacagtgaagagctggactttctaaaatccagttgctgtcaaaacctctcagaaaagccaaccagcaaggcactcatctttgctgccccaagggaccaggttcagggagctgagtcacagaggagcatgcttggaagctggccagctccacagcagagcagtttgccaggccacgtgccacctgcttcctgtggctcacggccttctggctggcaagcccctgtgggccaggaagctcagacctaacctgctgtggcaggaggtagctctgaagtgatttgtcaggaactgtcctcaggtgaagggagaaatgagacaaggcacttttgctcccagaacctggcccttaggggactgtgaattgtgatcagaaaatgggagagaggacatttctttaaccttgagatctcccatctgagtttcaggagcagaacctgaatcaaccaagaagggttagcagaattgggaaactgaatgatagacatagtcaaagagtctggctgttgggaaatctggttttctgtaaggcagtggggcactgttctacatgggcaaggatctgcctgcctcacattatcccccagggctgtcaaccagaccccaggcatcctctttagttgatctggaggagatgctcctataggcaaaggggacaccaaagagagcattcggcctgactcggctgtgccactgccactgtgctacttacctgaaatcttcccaacctctctgatgccattcggcacttctagtcaaaaggatttaggctaacatttggtatgaggacatcggagaagctgatattcacaaaaccagcataggaaatcactaccttttaaggaagagattcctgttacaggccacaagcagatccctaagagacttctcacaggttccactcctgacttagagaagtgtctgggctgtctttgcttacccaagccaggcagtgcagctgtgtatacttcatgcttgagaatcccagctgcagctttgataaagtgggagtcctgagaagacccttagccgtttgagttattaaacagaaatcatccccaccaaccctgagagcctctttggcctcccttttttattggctgg

SEQ ID NO: 8676 - DNA, 2611 bp, Homo sapiens
aaagggaggcactgccatttggagacattccatttcagatttgtcaaccagcgataggccacattccagtaagaactcaatttgtctcccaaatttgcagaaacaaaacgtgatttaaaagctgagctttttatcagaaagcttttttgatgttttaagtgttatgtgacttgttgaactttttaaaaagtgctacttttaaaatcccagatactctgaattttagaaaacaaactaattctgattgtgtcgtgcccaagtacccttttttttttaatgaatagggaccaatgccacattgctttttatatttctttcttttttaatgttgccaaaaccaaaagtagctttgttttcctttgtattttgctactttgcagtatttgtgtgtgtggttttttttccttaatttgaaagggacagcactgtgtatgtttataaactaaatgaagataagatattattttgtataaacattcatctgagaacaatcaaagcagtagccacatggtgctggctcctttgcagcacaaacctggtcattttgatgactgtacaacaggaagacttgaaaaatcacgtggattcatattaccaccgctctcatttcatggagtcttctgatcaaaaaagctcacgtcgtatttcttcttttcctttctcttttctagaaattgggtgtttgtaccagaatggaattttgcttctcggttatcctgtgcttcagatgattataatctaacccaaactagcatgtgtttctgcagtttgttacacacctaggatcatattgcattcatcactttaaacatcatgtttcaggttttggtcaatacttgacaagggtgcccaggacaggaagacgtgtactgctgagtgttccttcttgcccttttcagcagcttgcccagctcttgagtacagtggtggggactaaaaatgtgggcatgtggagaggggtatttgccctgggtgatcctgtttccctgtgctgtccccatgctgtgttggaggaggaagtggctctccttccaccaacaaagctcctgctctaccctcttcctcacatgtgctgcgacctctctcagggctcccccagccattccttctttccttcctgccttttagctctaaccacattaagctaagacaaggccagagggtgcgattgaatgagtattgagactgaggagaatgatagagagtgaagcagaaacaggagcacagacctctgctgtagctttaatgcatacaaacatgtccctccgcacaactaacctgccctgcctctccatctctcaccaaggctgcgtcaaagcacagaggctccccggactcggagggggccagagactgagctctggtcacctgttcattcctcggttagctggaactttgccccgtttccagtttcttatagtgcatgcttgggaaacaagatttaaggagcctctgttttggaagggctgtctgtgattgaacgtgaaatgtgtagtgccattgggaccacgaagggaattcttgcacatgctcgtgctggtgtgggcatgggactggctggaaacgtctgtatgcagggagccagggtgagggcagagtgtggtgacagccgaacttggagtaatgtccgtgtagaaaaaggaccatgttcttatccagccaatactgggagtgctgtctccacaatttcagggcatctgaatgtttgatgtggttttgtgtgtgtgtatgtatgtgtttaatattgaagtggatcatgagatgtaaagaaaacaataatggcaatgacttatattcaaatctgtatttgtttctttatcaatgtaatctgctgaggaccttttgtctaagattcagtagtgttttaaggttctgatatcgaattaatgaagtaaagttgttgatggtggtgaaacaccgtagggcatgtggttcaaagagaagcaggagggcaagggaaagttaccctgatcttagtttgtagcttatgacttatttaatgaatggatgcccagccaagctcagagtaggcgcccaaagcattgtggattattttcctgttttgtctttttttttttttttttttaagccatgacatcccagaagaggacagtgaattactcctaggtcggctcttatagagtggccatagtgttctgtcaaaacacttgcttccattttcagagataaaaatcattgattacaaaatggtgtttgtgtttatttcacgccttggctgtctgtgaggcagcccccacctctctgcctgacatagcttctctgactttggtggacgagcacggtgccatactcctctccgggggtaagtacaggggaagcgcgtgtgggtggctcagttcaagtacaagtgaggtctccaagccagtcaagcactgtgttttggcttccagcagacctgagcctttggatcctgcctcagacctttgccagcggtgtgtcctgggatggggttcctaatccttctgagtcccttttcttgaaaggaggatgataattccatgtagttcagatgagaggaatacctgtgtggccacacaaacaaccctcgctgcatggccgctactgttactattatgagttgattttctga

SEQ ID NO: 8677 - DNA, 1203 bp, Homo sapiens
catctcctaaccgaagaagggagatgggtgcctttggggaacaaatttgatacgtgttttcaaatgtaccttcttattggcgaagatgaatcttttcattaagttgaaaatttattttttatttagatacttttatttctgttcaaaaaattgtcgttcagtggcagataagtacactacactgttataagtgttcttcatctggttttggagtggggatttgaactcaaggccagttgcatttggtctccacattgttttagcttattccttcaccaagagcaaggggcatttggaaacttgacattttactggtaggctttatggcagccaactgagaagacagccatagcttgttagctaaggtcagacactggagcaccatgatttgttttggagttacgagtttttatttccccttttatagactgagggataaatgtaagactttttttttccttcaaagaaatggaacaagccaattaagaagcacaaaatagacataatgaatggctaatcttcctctgaattcagacatttcctttcaactttcacatccacaaaggttctgtgagttcatctttgcttttacagaccatgagaaactgagtttcacttatcccatttgagggagacctgtgtgcagtgccccagctaactgatcttatgatttggtttttccttgcattcagtgacctacacttaatgaatgtgtccttgtatttcattctttaaccagcattatgggaactaggatagaataagttgctttacaaattgtcatgtttagatgaggtgttgctttttagaggagcatcgagggtctttcccaggctataatactgtctgtctagctttgctccttaaatatgagtttgttttagaggaggtgacattggtataagctaagccctgtgacagccattggaaataagatcaatacttgggtttctatagtcgataggttcatgagtactatgtgagatttttgtgtattaaagtgtgtgtatttagctcttagcgtcaatgtggcatagagggaagatcacaaatctgggaattgatgagctgtggagttcagtcctggctcagtcactgacttgtagtgggacgtggatgtgtctctttatccttccgctcctctgtttctctctctgtaacataagcagctgtgtataaaagttattttctggccgggcacag

SEQ ID NO: 8678 - DNA, 1223 bp, Homo sapiens
tctagaaggttgatgaatttccctaccactctcctggggaccttttctctctagtgggaacaaatgctacataatttagtcaagatcctattaagtcatctcacctgaggcatctggagagggagttgccttccattggtgggaaattgttggtgccagaatacattttgcccaaaactcttctcattggctggccacctagcagggctcctctaaacacgcaactcagcgaggggacccccttcacctctggcaagagagctgggtagatcagaaacttggtgacacctggctagcacagagcaggctcacttgtcttggtcccactacccagattcctgcagacattgcaaaccaaatgaaggttgttgaatgacccctgtccccagccacttgttttgttatcatctgctctgcagtggaatgcctgtgtgtttgagttcactctgcatctgtatatttgagtatagaaaccgagtcaagtgatcatgtgcatccagacacactgtgtcacctgagccacagagcaaatcaccttaacgatctggaatgaaactgtgaccagtgccgccctgggtggttctggagagactgccgtcttcttgtttggccataggtgctggggccccggcttcagtcactgtctcagacaggagtcccgataagcagatcaccagtcctccactgtccttcctgtcggccttgctgcatgagaagatagctgcttcctccctcttttcctacactgtaattattgttttacaattgagtgccttaataatagtttacaaatactatgtatttatgcaaaactgttaaagtctcatctgttatgattggatacttggtcttgtcagtagtggtcagcattgggttgtgagcttgtcctactccatacgtgtttatcctgctatgcagttttacattgtgtgttcacatctattccaaggagccttgctagaaacaacactggcggttcctgcaggccaggcaggcattggcccatgctgtgtcccataggagccaatgaaagaacgtagcttggtctgctagccagccgtggggtggcgcaggccaggcagcctctgcaccagagtccagcacctgcccattccccagtcacacaatcatactcttctttcatagagattttattaccacctagaccaccctagttttcctctctgttagtgtcctgagctcttttgcaacaaaatgtaggt

SEQ ID NO: 8679 - DNA, 1114 bp, Homo sapiens
atcttgccctcagctgggtccgccagattaactcagtgaaaccagaaagccttcaaggaccagctgaattctgaaagtgagtgagtgagccatcatcttaacattggccagaactgtgttccccaaagctattctagaaagcaccccaggagggatctgcaggaacaaggctagttcatattttacctagtgagcacagtttttgcaaaaatcctccctccaggactttgtctccttggagtgatttttaaaaatacatacattactttatagggagctgttttcccactagtgtcaattaaaatcaccttaaaaggtgattatccacttattcctaaacccctgtgggttgttccccctttccctcagccaacaaaagcatagcctcaaaaaatatcaagttcggtatgttttgccaaatcaaatttcatgtggtagatcaatttttgtgtcaaaataatcttttaaatttagtgatgacaggcttttgttggttttttaaccacgtctatgtatgagaatgatatatttttgaaaactttaattttgaaagccataatttttcttatctaaagagttggggggtggggtgtggaatctggagagtacaagttggtctttggcttctggcaaacttacccattcatttttggaagcacagctagcatatcaacatccagacgagagcgctggtcccgtccacagagcagagtgaagcattctggacttgatgcttaatagcctggcctggagaaaagggtaaggtttatttttggaaacccagatcagttgcatgtaaacagatggcacatggctatttaaaatgctgtatgatggggccgggcgcggtggctcacgcctgtaatcctagcactttgggaggccgaggcaggcggatcatctgaggtcaggagttctagaccagcctggccaacatggtgaaaccccgtctctactaaaaatacaaaaacttagctgggtgtggtagtgcgtgcctgtaatcctagctacttaggaggctgaggcaggagaatcgcttgaacctgggtggcggaggttgcaatgagccgagatcgcgccactgcactccagcctgggtgcaatgaaactggga

SEQ ID NO: 8680 - DNA, 1201 bp, Homo sapiens
gcactccagtctgggcaacaagaatgaaactcatctcaaaaaaacaaaaaaaacaaaaaacaaaaaaaagaatacttgagatcaggtaatttataaagaagagatttatttgactcacgattctgcaggctgtacaagcatggcaccagcatctgcttggcttctggtgaggcctcaggaagcttttactcatggaggaaggcaaaggaggggcaggcgtgtcacaaggagagagagggacaaagggggagaggagggaatcaccagatcctttttagcaagcagatatcacgagagggcctgatgttactaatactatttgatggttggcgatgtctgtgcttcagaagggatgctttcaccgacccgtgtctccttcccctaggtgatgctggaatcctctgtgtacctgactctggcagtttacagtggctgctgcctcctggctgccctggcctcctgctttttgcccattgagaccaaaggccgaggactgcaggagtccagccaccgggagtggggccaggagatggtcggccgaggaatgcacggtgcaggtgttaccaggtcgaactctggctctcaggaatagtgaccgatgggggactgagctggtctttgaggctgcagagcttggggggctggcaggccccaactggggcactgattgtcactgccgacatcaagaactcacccaagagtatgacctggaccaacagggttttgtgtcttgactcagtttgctcatcttcattgaggtccacccagggatggggagatgtttgctctagggggttctctgtatatgtggtgaaagctttgttcataacctgtggatctacatgggaagactacccatattaggagggtctggtaatgccagcaaccaatcagacaccacccagagtcacccggccaaaccctcagtgaacaaccaaaatatctctctgtagataccgtccaggctcaggcccatgtgacacctgctgtccacccaccggacctgttcagtaggtttctcccacactcacagccccaggctttcttctttgaaattgcaggcgatctaggtgtggtctgagcagctatttcctggcaggggccccccggtttgcctccctagagcctgaccagtggattctctggcagatggacatggtgcattcaaactggagccacatgcccccacccagccccctct

SEQ ID NO: 8681 - DNA, 1111 bp, Homo sapiens
cttgcctttatggtgaaacaggggagatgtgcacctttcaggcacagccctagtttggcgcctgctgctccttggttttgcctggttagactttcagtgacagatgttggggtgtttttgcttagaaaggtccccttgtctcagccttgcagggcaggcatgccagtctctgccagttccactgcccccttgatctttgaaggagtcctcaggcccctcgcagcataaggatgttttgcaactttccagaatctggcccagaaattagggctcaatttcctgattgtagtagaggttaagattgctgtgagctttatcagataagagaccgagagaagtaagctgggtcttgttattccttgggtgttggtggaataagcagtggaatttgaacaaggaagaggagaaaagggaattttgtctttatggggtggggtgattttctcctagggttatgtccagttggggtttttaaggcagcacagactgccaagtactgttttttttaaccgactgaaatcactttgggatattttttcctgcaacactggaaagttttagttttttaagaagtactcatgcagatatatatatatatatttttcccagtcctttttttaagagacggtctttattgggtctgcacctccatccttgatcttgttagcaatgctgtttttgctgttagtcgggttagagttggctctacgcgaggtttgttaataaaagtttgttaaaagtttgttttgtgcaagtgtcctttgtgcgtccaggccagggcatccatggacgtccttgggctgccctttcccttggcgcctcccagggttcccatagcaaccaccgtctgcaggaggggccgcccttgcccctcctccccgccctgccgctcagtggaacggcccaaccctcccctggctgcggtgagcgctgggcccaacccccggcctggagcagcgccccaactccgagcaccgtggagcaccggctgccagctgagaccccagaggggtaactaacggcctgaggaaggcatttcttcggggaacatggcgtgcccgtcgtggctacgttctgccaagccctgtgacgttggaggggagccgcctgc

SEQ ID NO: 8682 - DNA, 1244 bp, Homo sapiens
tttgatttgctgtggcctctatgcctaatgagctagtgtttctggcagctctctctacccaactttgcacttgtagttttgagtctttgtctctctggaatatgaacaggtttataaaacattccatggtgaacaattctgtcggctgcattatagccatgagtgaatagacagcattggctggtccaagctctgttattgagtatacaaggaactgatttttcttatgttagcactaagggcaaaaaccaatatttataatgtaagcactatccaggtaaaacactggcccaagatttggtaaagagatttcattgcaatgtaataactacagttttttacaaattggaacagctttggtgtgtcgtaatcaagggttttttttgtttgtttgtttcaaataagccatctgattgtggtgactggggcccatgtccaagacaattcctggcatattctgtcaccctcccgtggggcgatcactgtgtggggaccccattccccagttaaagtgtgtctctgtaccttacaacagcgattcaggacccaagtgtgaacaacactcagcccgccctctggagcgtgtgctgtctttagggccctacccaaagtcactgtaacagttaagtgtgtcattaacctttctgtctctttgcgccataaaaaaatgctcaaagttttagatgtagccactgtatgttgtacaaacgttggcgacatgtaaaataaaagtcataaaatgcttctgttttctggctcttttcaggcatgcccggcataaccaggcccctaaaatcggtttacaacaaaggcagggcccccacgttctgcctcagccccttaaagtcgctccaggtggaagggaaaagacagtcatgtttctgtagtgtttgtttgaattcaaacaccaaaaggaagtcttggggtcaaaggctgcctggctcatgaaaaagtgaatcagctggtgttaccactgatttgctattatggggcagagggcttcagttcaccaaacccaatcccttgacacatgtgagttccatttatttaaagcaaaattcaaatttcacagctttaggaaatttcctttacttagtctcagaccatgcacagtaagtcatcgataggttcttggaagctgagacttgaagcaaaaccatgaggctaatggatgtaaacaagagttaaattcctacagcatgttgctgggcacaaaaacatcacccaatttctaaataaagacc

SEQ ID NO: 8683 - DNA, 1650 bp, Homo sapiens
cttgatacagaatgatctctaggttaagttaggcacaagaggaagacatgtacaactctgtgtggtgggccaccttgtgtgttttttgaagtgtgtgaataaatatgtgtattacacatatttacatgcacagaatctttgagagggtaaaatgatgagaaactgtacctttaagaagggaaactaggggcagggagacctgtttctctgcatccccttgattttctgtgcatttagcaccacatgtaagtgttgccattgaaaatatcagtttatttaaaaataatactggtggccttcagcagaatcccaggggcctgatttagcctggcggccctgcttaaagtccaggtgttggcagagggggtgggccataacttacctgccctgtatactgtgggaacacaggtggagtttcccgaagcccggatttatgaggagaccctgaacattttgctgtatgaggcccaggatggccggggacctgacaatgcgctcctggaggccacaggcggggcggcggggcgctcccaccacctggacgaggacgaggagcgggagcggatcgagcgcgtgcggaggatccacatcaagcgccctgatgaccgggcccacctccaccagtgagcaggcaagagaccgagccgccctcctctcaccgcccccactccctgccgtgctacacccagatcctgtgcaggctgccgggccccttctgcttcccttggagcctggagatacttttgtaacaagccagatgattattttggtattgcttgacaaggcaaattgattgtcttgacccaggcgtatgacccctgtcgttgaacaagctgtgtctaagatctctacttttcatgagaatctgagactctttggagccaggctttctcggttctcagaggaaaagtatgaatgagtgtgaagtgtatgtgagaacttttgtttgcaatatttatttttgtgggtgtcgacttcctatgtgggctttttgggtgacactcccttaagggttcagtttgacaattctgagagttgtcctgcagttggaggccaccagaggtatctgagctccctgcttcctatttcataatcctccagccccagcaggtccactcctggttcctgtgtgtttggcccgggcacaatccccactgctttgctagacgtgctttctgccatgtggctttgggcctagagcttgttgataattgcagcttgtggcagtggaaatatggctgaatgagcgtctaaatcgttgagaccagtgcaactttgggtgcaaggctttgtttagggatcaagccttttgccaccttgggctggtctttggcctggtgctcactgggaccccatatgtctgcgtaggagcagaactttccatggcagtaagtgtccagctctgtttctggttctttccccaactccagccccgtccagttgttctcctgattgacccgactccactccaggaaggccatctgaccctgtgacaggcatagctcataaactacccctccctgggatcccgctcctcttcagcctccttccccatgaagctgggctaactttctaagtcattttgcttagaaattcagtgtggcccataccctttgtcctcccagcctggcatccaggcagggacaccct

SEQ ID NO: 8684 - DNA, 1178 bp, Homo sapiens
gggctcaggtgactgcacctgtgcagtcccctctgcatgaataaggagccggcaggatgccaagtgcaaggccagtgagtgcgggtctcccgggctccctctgttcgcaccacgtgcagtgggtgccaccagcctccgcctcgccctcaccgtctcccattttctcctcacatggtctctctgtgggagggtgtcagctgctgctctgttcctcttaacaatcccacaggagacctgcctctcggggacgcctcaccagtgccctggctgggcatttgtgctgttcctactctgcagtcacacgtgctctcacaagtggccagtcgcacctattgggtatgggtttcatgtgtcttagtccccgagagcagcacccttgagagagatgtacggcgtgtgccagttttggggccagatccaccccgccactccatacggctggctagacagcagttacaacacggtaacagacagagcaaacacgtgctacacagctgcaagggcccgtcctggaagagcaggagcctgccccgtccccactgaccctgctttgtgttgcagttcgtgaccagctgctccagacccccgctcctgggattcgcctacctcaagcctccattctccatccgctgcgtggaggtgtcggacgatcaggtacccccacggggtgggtggggaagagccttgacttccctcttggtggttgtctgctgtgcccactgtgcaaggcccttatctagtccatatctcagcaaggcaggcagctggacccctcagagccaagtgaggagggccccacagttctcacggcaggagaaccagccagccccagagagactgcccacggactcagccctctctcggcagcccctttctctttccttcctcagggaagggtacctggagtgggggtgggtacgtgctgtttttagtggcgtctggcctcaccagggctccagatctgaggcagcatgggagaaagtgagagagtgggctcaggaggcaggcaggcgcagactcgaatgctactcctaccccagcaggctgtgcacgtccaggctcgctgcttcatttcctcattggccaaaggagaaggaaagccttcagggttacggagctctgtgtgtctcaagcctggcccactgtgggtgctcaaatgagagtcctactccccataa

SEQ ID NO: 8685 - DNA, 1670 bp, Homo sapiens
tccagaatgtgctgcctgttccccaaagcctgcttgtcccgcggaggacggctgcctttgaccctgcttatttgtctcactggttatctaatgaggaacaaacactaacctaaggtacacatcccatctgggcggtggcttcactcctgagtctgcaaaatcccaggaaacttgggtcttgctgcccatccttcctcagcacagggaacccggaagcccgttgcactgacagaggctcacaccctctgggttttttgttttttttttaaacttcatttctcttccaacccattgtgttcctctgccctcattctttacctttgttgtaagaactttagctccagggaactgaggcagaggccctgtttgtggtctgtgttgacagccacccaccctctcccacctcatgctcctgcacctgcaccaccaaggttgatgccggattcgaagccaggaaggcccagtccctcctctgctctcctcaaagacgcaaaacattttccaacaagagctgtcacagtggcagcaaagcaggggccacccgtctccacagtccttcagagtttcagctgcatcctggtgtcccacccaggtcgagcccccaggcttctggaaaagagtgtgtgctctactttgatggaaacatggcaaggaatttaaagacaggaatgtattaatattattgaaggtgtgttcgtaacctctgattctgtggacttgccactttctccaaacgctcggttcctttgaagatttcttctgaacgtgtgtgcgcacgctgggcgggttcgtgcatacatgcggggaccccagactgtcagcacagggaagatggatcccatcctaatttttatcacctgaaggttggaaccagtgagggactgggagagagtgatttataagcaccaatatcaacttcatgtggatttttgacaaggaggggtagtttgtaatttcatttaaattcttttcagcagctggaaatattgcactatctgaaacactgaatctccttttgtaactggtgttcactgacaccttgatggctcttgatggctctaaaaagttgtaggattttttgtttttgtagctaacttatggattgagatgtgatcaaaggctttattaaatttgtacttcagcatatgatggctgcgttctgcatttcattccgccatatgcctggaccgttcacacttgggtatctgggcttagggagcatgtaggcttccacaatggagggaagatgtggaggggcgcagagcacatgtcctcatctccccagccagagttcagggatgttggcagtctgtcctatttgcttccaattgtgtttcaagaagtaacacatttcagatgagcaccctctatgggcccatccctctcacccacttcccagaggcagctgtcaccataggttgggtgtatatctttgcagtccatgttttacacagtaatattctttttttgtttttttgagatggggttttgccatgtcacccagaccagtcgcgaactcaggggctcaagtgatccgcccaccttggcttcccaaagtgctaagattactggcatgagccaccatgcccagccagtagtaactttcaaaagtgatcaacggatgttgaacaaacccagataagtgtctggagtgaaattttacagctact

SEQ ID NO: 8686 - DNA, 1177 bp, Homo sapiens
aactgggaggtggaggttacagtagccgagatcgcgccactgcattccagcctgggcaacaaaagcgaaactctgtctcaaaaaagaaaaaaaagaaaaaaaagcacgtgaccttatgaggctctcgctgtattgttattttaaggactataaagagtttgatttaaaattatgcagggcccctatgtgggattttttaaaaagcaaactggtgtgtattctcatgtggtttgcacagcccagcctcacagcactattgtaaaccctgctctttctgtctcgctagacagatttttttgtttgttttcttttttctggttgttttttgttgttgttgttgttgttttacagctgaaaccaaccagcaagcccttgatgaccaagaggcgtttctttcaaagctatagggcacaaacaattgaccatagatgactccgtttgcattcttctgcagaattatttccttcagggacagattttccaacctaagaaactacctaccgtgtgtattctcttgacggggagagatgaacccttcagctgctaagatccaagaaaacgcctcactgccttaaccttaactgttcttcctggcgctaaaaagagctgtattttttaaagtgctggggcaaacaaagcaaccccaaaagagttgatgtgtgttttaaaagaaaaaacccaatgaggaacaattggagatttttatgcagaaactaaataatccttaataaataaatctctattttggaatcacatctgtgcactgtattggttcttgatttttttttctttcctgcatcagaaattacaactggggacccttacaaatcctaccaagaatgtattttctggcgtccatggttttaaaattttatttatctattatttttaaatgtttttgtagagattggggtcttgctatgttgcccaggctggtctcaatctcctggcctcaagcaatcctcttgcctcagcctcccaaagggttgggattacaggcatgagccactgcaccaggcctggcctccgtggtcttaaaaaacagaactggttgctgcatggagaaacgggaatttcacataagaatcttgggtttcggcagggtgcagtggctcacttctgtaatcccagcattttgggaggccgaggtgggtggatcacttgatgtcaggagttc

SEQ ID NO: 8687 - DNA, 1272 bp, Homo sapiens
tcaggcgccatctgatagccttttctgcaggcttcatgtccttagctgaccctcctttatcttgcaaacccctgcccctgctgtcccagggaggacgggcttctgtagaggcttctgggaaatgagctgtctgcaggaggtgaagcagtgttttccttggaatgtttgaggacctgcaatagaagatgttgcctttatggccctagagaaagtcaaggaacatggggaccaacaaagcatttccagttgtaagaatatgtcagaagagtgctcggttagcccacggtgccaaaactccaaacaagttccccggtggaatgacgtggccattggagggctgcaggtcgtcctctctgtatgtgccccgcgcatttccttggcctcatctgagatctggtgtcagagttctctgctcctgttggcaaatcgcaccttatctgaacatttgttccagccaccttttgcacatggattccgtaccttgcactagcaatgtctaccttcagtaacgtcgttctttttcaccctgtattctcaatgatcccttcctccccatatgccacccttcccccaaagctgatagggcagaggtgcactttatgaaactggcacttgactgaacagaaggaaacagctgtacctctaagctcctttcacagaaatcgtcatctgccttggaatgcaaatagttcttatttgccaaagaacagtgaattgggcccaaagatcaaacacagcatttcatgtaatcagaattctaaacgcacaactcgggagctgtgcacggcttctcaagtgattcagttgcagaaccaagagcaaaactcgcctgtttttgtcctcaatggcacccatgagctttccaatagtatagttttctttctttccttgtcctggttgaaggtaacgtgttcctagaaaagaaaatgctgcataggaaaactgagatgccttttattccaacgtgtttgatccctgtcactcattattctgtactttttattgtacattctattcctgtaattattgtgccctttaagtgttgtaaaatcgttttggaatttgtgcctgctagttatgcaataaacaggctctacaagtgtttttgtggtaatgctgtgctccccatcaattagttgatgtttccagatactctgtaaaaggtctgaggaagttctcccaaaacgccatcattagtgagatgcagtgtttcatatgctttggggctctgcagttttacagtaatgactatctttttcttcctctgtgctt

SEQ ID NO: 8688 - DNA, 1088 bp, Homo sapiens
gaattggagacacttctttactgttcaccaaagaaatgggtaatctgtgctgatctccttatttttacctttttacagggtttctaggacattgtcattattcttcctccatctatctgattccattccttccacacccagctaaagttagaggagatacatatagaatctattttagattattgttaactatttgcatcaaattaagatacacaaatggccatggatgttgccttagccttaaacattactaatagtttcacatcacctcactgcacgcatcgaaggatctgatttgaatttgtaaaggcaattcttttgagagcaggattctccaggctaaatcaaaggcagctaatcctgtccctgaaggagcagctaggggaacctgaggcttgttcttgaagtgggcaagctggccaaaatattggaacacacagaaccaaaccaggtgtgttctacacctgcatgagtgaaggatttccacgtagacacctaggaagagcccgcatgccctagactcactccagaggaaggattgatttgcaaccagaaagggagctgaaaaccacggagctccatggctcttcattcaaaagggaaaataatgattccacgttgctttttagagttcaaatcaacatctttctggataaatctattttttaacaatctttttattatttgtaaaagatataaaaacaactcccatcagtagcaatacaaggttatacattttaaccagattttctcaggccttttttggatacctttagtagttaactctcttttgtcaaaccctcttgtatataaccatcgcacaacatacagaaccctggggaatacagccaagggcactgctcactgtggcccgtgtattcattcccacaggctgcactgaaataacctggtaaacaacaccctcctccattttgcgtctatttcttctattgtgcttctttggggataggaagagaaacataactactgttccaggtaacgtctgtatcatacagttagtgttgccagtgaaacgttcccagatacaaagaattgtgcttttaattccatttcacaatctgttttgt

SEQ ID NO: 8689 - DNA, 1170 bp, Homo sapiens
aacctgggcagcttagcccagagttgggttgggttggggttttttttgttttgttttgttttgtttttttgacatagtctctttctgttgcccaggctggagtgcagtggcaggatctcgtctcactgcagcctccgcctctcgggttcaagcgattcttctgcctcagcctcctgagcccagactattaagctgtactgcctctcatgagacagaattgattttaaatggcagggggatttggctaaaggtgaaagctgtgttttacagtcttagggacagcagagtctgtaattgcttttcctcattgttttatccccttagcttaattgagggtacttaacgtttcgtttttaatacaaattaataaatgtccttgtgtctgttgccttagatgtgaattgtttagtacaaatgttactggtgggcttcctttctttttaaagattagacctctaacattttattccttgggttagaaataattgcagtgtcaggcaggtctttactactcttctgttttcttttatacaggaaagaaatgctgaaaatgccatcgaagcccttaaggaatatgagcctgaaatgggcaaagtgtatcgacaggacagaaagagtgtgcagcggattaaagctaaagacatagttcctggtgatattgtagaaattgctggtgagttgagtttgtcatttttcttttattctagatagtatttctgaatgtagtccttttctcaaggctcataattatatttaaaataattgttttcatgtatcaattaacacattttattgccattcatacaaatcctacattctctaaaattattttgaaatgttttagcacctcccttcctgtcattgataaggcttttggtttttgtttttaaacaaggtattttgaattctacttgtttaaatacattgtagaacacaagtgctagagaggtaaaacctaatgttgatttgacagttagttatagtgaacaatttgttagaatactggctaatgacgacacagtttttcctgttttgtttcttggcaccaaagttcatggtcaagggtaatttcttgactctgaaagctatgcttggccaggcttggtagctcacgcctgtaatcccagcactttgggatgccgaggcaggcagatcacgaggtcaagagat

SEQ ID NO: 8690 - DNA, 1058 bp, Homo sapiens
catttgatttctttggtttttggaccctgtcacatgagtaggggttgtcaagatagcccatggggctagttgccgtttctattacagtgagaaaagtaggggccttgagttgttggagccagaagtggagaatgcttagagttgaactatatgagtttgaaaaattgggaacacagaggggttaagagcactgcttgaagatggtctgcaagccgggctcaaatagaaatctaggtgggtcagtacagagctgcctgacataagtaagtagcacatggagcattgcttgttgtcacagttgtatggctggttgcttgaacagtagccagtggaagacctagtagaatgtgtagagaatctgggtgccctagtcaaaaaccagcgtcggtatttaagttgggatgtggtattcatcttgtgaccagttctctacttctgtcctagggtacaaacattgctgctgggaaagctatgggagtggtggtagcaactggagttaacaccgaaattggcaagatccgggatgaaatggtggcaacagaacaggagagaacaccccttcagcaaaaactagatgaatttggggaacagctttccaaagtcatctcccttatttgcattgcagtctggatcataaatattgggcacttcaatgacccggttcatggagggtcctggatcagaggtgctatttactactttaaaattgcagtggccctggctgtagcagccattcctgaaggtctgcctgcagtcatcaccacctgcctggctcttggaactcgcagaatggcaaagaaaaatgccattgttcgaagcctcccgtctgtggaaacccttggttgtacttctgttatctgctcagacaagactggtacacttacaacaaaccagatgtcagtctgcagggtaagaggagtaatttagaatattccgtgtcgtggttctttgttcatcctaccaatatgccttcatgccatcaaaacttttgatttgtaatttcatacatttctgtgggctgtatgtatagcctgagcttaatttctaatatttgagag

SEQ ID NO: 8691 - DNA, 1250 bp, Homo sapiens
ttcccccttccattcagaacctgatggtggggccagcatgacctcaccaaagaaagctgagagcctttcacatatcctctgtgactgagcattgcagttagttaacttaaagttgtagtatatgtgatgttctttctgttgatagcatacttactataaatgaataaaacccaggatagaaaatgctttcctgaaagcaaaggatatagtttctgtctcaaaggtaagctagtccctgtcagagacagaatgtgaactcttcagaatgataagcagtgacatggaattacattattatgtgaaggcactctttgaattaatagtgtgatcagtggcttcttatatttgggtgaaataataaatactgtgtttgatgtcatcttatatttaagggaaatgaaaaacctacttattagaataagatcacatgcacacctgtactttgagtatgtttttaattatctgggtcacctgtttcagaggaggataaaaatggccttacagtgttgtaatagaggacagattgtgcttttgtggaaaaaaaatattaaagataaatttatctgtgtacttctcccttttttctactttctgtgcctttaaccaatacaggcaaagggtgtgtatgaaaaagttggagaagctacagagactgctctcacttgcctagtagagaagatgaatgtatttgataccgaattgaagggtctttctaaaatagaacgtgcaaatgcctgcaactcagtgagtatttgaacctggtttattgttcatgctgcttatcagtcgtactatatatacttagtgtctgcactgtcctactctcttagaaaactaattataccttatctcctcaaacttacagtatttccttccccatattcactctcaggtaagatgctcttcctgtgtatttgaccaggaaaataaaagcaatcaatagctaatttccttgagcgaccctctgggcccacaggggctgccttctcccatagtgctgtgaacagtgttcttgctcctagcagaagccacctcctcccaacatctttgctgcattattgatttccatctctactagatgttcttcagcatagggggaaataatagtgtctttctatcttgaaactttcctttgaccttatttcccctgtcagctaccacactttcttttcctgttcaattaaaccttttttttttttttttttttgagacagagtttctctctgtcaccagattggagtgccatggcg

SEQ ID NO: 8692 - DNA, 1135 bp, Homo sapiens
ttttctcataagaaaatgcaaaaaccgccaggcacggtggctcaaatgcctgtaatctcagcactttgggaggccgaggctggcagatcacctggggttgggggtttgagaccagcctgaccaacatggagaaaccacatctctactaaaaatacaaaattagccaggtgtggtggcgcatacctgtagtcccagctaccctggaggctgaggcagaagagtctcttgaacctgggaggcggaggtcgcagtgagctgagattgcgccatggcactccagcctgggcaacaagagcgaaactccgcctcaaaaaaaaaaaaagaaaaaaaatgcagaaacctgtctcaatgtttaactgggcatttttcaaactaggggacaaaaactagaacttgccacttttatttaaagtgatgctcttattttagaccaatctgaccttcgttggctgcgtgggcatgctggatcctccgagaatcgaggtggcctcctccgtgaagctgtgccggcaagcaggcatccgggtcatcatgatcactggggacaacaagggcactgctgtggccatctgtcgccgcatcggcatcttcgggcaggatgaggacgtgacgtcaaaagctttcacaggccgggagtttgatgaactcaacccctccgcccagcgagacgcctgcctgaacgcccgctgttttgctcgagttgaaccctcccacaagtctaaaatcgtagaatttcttcagtcttttgatgagattacagctatggtgagcatgtttgaacatgtacaggtgactcaggctacacaagcacatagtagcctctaattttgaccactgaatttttttgtcatagctccctaatttggaatttgtcatgatttgggtcttttctctagaattcggtgaatcagtggttagcatgttgtgtgctacttgcagggaagatcctagagtcgtttaaaacccagaagggccttccagatcagtcccagaggaacaatctggtgatctagtctcttttttaaatgagacgtgtttttattgtaagttttctgaaaattgaggatgtaatcagtcagttgtttggatcaccctgcttttaagttctttaagagctggctattgatgaagcatt

SEQ ID NO: 8693 - DNA, 1672 bp, Homo sapiens
agtccttgctgaggatgcccccctgggagaacatctggctcgtgggctccatctgcctgtccatgtcactccacttcctgatcctctatgtcgaacccttgccagtaagtggttgggtggggcttgggaccagccacctccttccaggggaggctggaggcgtgacacgtcttccctgtgtgtcagctcatcttccagatcacaccgctgaacgtgacccagtggctgatggtgctgaaaatctccttgcccgtgattctcatggatgagacgctcaagtttgtggcccgcaactacctggaacctggtaaagagtgtgtgcagcctgccaccaaatcctgctcgttctcggcatgcaccgatgggatttcctggccgtttgtgctgctcataatgcccctggtgatctgggtctatagcacagacactaactttagcgatatgttctggtcttgactgacagttttccataaagaagatgtttaacttaatcaattaatttttttattgtttaaagcaactgtctatttctgctgaattttcacatgaacatactggctggtgatggaggtttcatactctagattttgttttgctttttctgactccagtggggcaagattttccttttttatacacataattaaagtgtccattgacatgtacagagaactaacactattttatgcaaatatttttttgtagatgaaaaagcatgtacagtgttctgtttaatactcatccttgtataaaaaaaatagttgagccagcagacattgtcagcaaattaattggcagcagattttaggaaatgaatgtgtgtggttttttttctaaaactaaatagcatgtattgtgtcttttgcatgatgatccggatttaatttgatatcacagtctaatttttattcataagccaatttttctgcactgagcagagtcttgctacctcagtcagtattgttttggtttgctacttccctcacccactttggcctccgttcaccccaccccaccccacctctccccaccttacccccgccccgcttggcttcttctttaggattgtgatggttcgttctgtttacatcagttttaacgagaggtatgcctgtactcgcttgtgcagaaaacattgttccagattcaatcgactgggtttatgtcccttcacatagtttttaaggttatttatttaaatgtctaatgtattttattgtaacagacattgttttgccaacattgcctatttcagtggcacgtcatctagttttaaaaaaataaaacattttaaatggacagagaaaaataactgtcttgtctttaactcgtaagtggcttacctgggactaacagacatgtccaactttctctccagttcttagctcagaactttagttgtactctgcttgaggggaagaaggctcctgctctgctgtgtaggtagtcataggaattgtattcttaatgtacaggcactaattgtcatctgtgatgtacattttatgcaagtttctgctggcctggtatagagaacataagggcaagtgtgtatgtgtgtgtatgtgtgtgttttgtaaaatctgtaaatagcacatgaccaaatgaacatattgtatagaactatttttatttgaatgtggcactaaccaccaccaccgttactacgatc

SEQ ID NO: 8694 - DNA, 1275 bp, Homo sapiens
tagggagtcagaaggagcccagcgaagtgccaacacctaagagacctcggggccaaccaaagggaagcaaaaacaagggtgccgccaagacccggaaaaccaccataactccaggaaggaaaccaaggggcagacccaaaaaactggagaagtaggaagaggagggcatctcgcaagagtcctcggaggaggagcagtgaaccgtgcgtgccgcctgctcctcactggaggagcagctgccttctgggactggacagctttgctccgctcccaccgccctcgccccttccgcaggcccaccatcaccaccgcctctggccgccacccccatcttccacctgtgcccacaccaccacactacgcagcacaccagccactgcagggctcccatgggctgagtggggagcagttttcccctggcctcagttcccagctccccccgcccacccacgcatacacacatgccctcctggacaaggctagcatctcacttagccgcaccctgcacctgctgcgtccccactccgttggtggtggggacattgctctctgggcttttggtttgggggcgccctctctgcttcactgttccctctggcctcccatagtggggcctgggagggttcccctggccttaaaaggggcccaagccccatctcatcctggcacgccctactccactgccctggcagcagcaggtgtggccaatggaggggggtgctggcccccaggattcccccagccaaactgtctttgtcaccacgtggggctcacacttttcatccttccccaccttccctagtccctgcactaggttggacagcccccttcggctacaggaaggcaggaggggtgagtcccctactccctcttcactgtggccgcagcccccttgccctccgcctgggatcgagtacatattgtggtgatggagatgcagtcacttattgtccaggtgaggcccacgagccctgtgtccgccgcctgaggtgggctggggctgctcccctaaccctactttgcttccgccactcagccatttccccctcctcagatggggcaccaatagcaaggagctcaccctgcccgctcccaaccccgctcctgctcttccctgcccctcaaggttctggttccatttttcctctgtccacaaactacctctgaacagttgtgttgttttttgttcaatgttccattcttccacatccgtcattgctgctgctaccagcgccaaatattcatcctcactgcctcctgttctgcccacgatcc

SEQ ID NO: 8695 - DNA, 1105 bp, Homo sapiens
tctcggctcactgcagccttcgcctcctgggttcaagtgattctccagcttagcctcccacatggctgggactacaggcgcacgccgccacgcctggctaattttttatattttagtagagatggggtttcactgtgttgcccaggctggttgcaaactcctgagctcaggcaatctgcctgcctcagcctcccaaagtgctgggattacaggcatgagccaccacgtccagccaacatcatttacttaattgtaagtttatataatttgatttttgagaagagctgtgtttaacaaccagcttgaaaaatgcctcaaaatttaacaattggttttcttgagccagaaagaaccagccctcgcacctcaatgctgctatcccttctccctcccctaattaatcttgggtggtttactctttttttcctttaagggaaggttgtttgccacagtgacatttgctctttttctgcttctgtgttcttcctgggcttgccattacaggcttaccactcttctctcatggatcctgataccaaactcatcggaaacatggcactgttgcctatcagaagtcaattcaaaggacctgcccccagagagagtaagtctaaacccattattttcaaattttggtacgaaatgcctaacaatcttctgaaatgatcaaatcagaaaaattcttagctcagtcttctctctcaaattgcccttgtactttgcttggtagatactgtggtctagacctttcaagatagtggttatatgttgcatttaataggaaattgtattatttcttctgacttctccaggaaactcttttgagaaaatggaggaaatgtgcttaattctggacactgtttatcagttctttcaaacaaatctaatgctgttacgtctagaatgccacatgcccatcctttctgtcatcaacctggaaaagaacaacaacaaatattttaacctcttcctcgtctaaatctacttcctttattcattcttcaagatcttcatttttagcaatacctcaatcttaaatctgaagtgtactatgtaacattacttacgtctattcccgcttttctgaattttatttcagaaagcc

SEQ ID NO: 8696 - DNA, 1144 bp, Homo sapiens
gactaacatactatccctcagaatgtccaacacagtcagttattcttctggtgctggaaaagaatgtttcttcagttgagactaagtagagtaattggattgattttaggtaccatgttatacctcaaaaatcattttgagaaggcaagatgcccacactgagaggcgcacagcaagtaacacttgacagaacagcagattcgctctttccttgttcatctagagcaatgggttctccgacttcaaagggcatctgaatcacccgagtggaatggcaagcagagccacttgcactgtttaattggccatttctttctcttttgtcaagttaacgtagttgaatttgctaaagtaaaatacagttggcacaactctcttgaacattcatctcttcagataaggaatattgccaacttctctaatacaatgcagactataaatcctcttattctgtcttttagcatccagacctcaccacaggccagaagcgttacctgtgcagcattgctaaaatctataatgcaaactatctgaagatgttaatgaagaggcagtacatgcacgtacttcagcacagctcacaaaagccaggcaggtgcacctccagttgtcttttcactagtttttacaattagtgagagggtcttttaacaggtgatttgtatcacaggtgtcctcactcatcacagaagccgccttagctcccgttactcacagaaacagcattacccttgcactacatggcgacatcaactggagagagaggactcggggtcttctgatatcgcagctgcatctgcacctgaaatgctcatacagcattccctttggcggccagtgagaaacaaagaagggtctgtttcttagtgtaaaaggggggaaatgcatctcagtttaatttttttttttctcagacagggttttgttctctcacccaggctggagtgtagtggtgtgatacagtttactgtattctcaaactcctgggctcaagcaatgctcctgcctcagactcccaagtagctagggctaaaggcacaaaccaccatgccctgctagttaaaaaaaattgtttgtacagaaagcatctcactatgttggccaaggtactctcacctccgcctcccaaagcactgggattaca

SEQ ID NO: 8697 - DNA, 2757 bp, Homo sapiens
gggtatactgacaaaccaaaactgcctggaatgcaagcatttgtctcctagtacttaatttaagtacacattttttattgacttttccttttaaaatatactgataggttctcattttcattgtaggtggaaagccagatgacatcaccgtccttctttcaatagtggctgagtatacagactagctgaggtgtcaagtcctgcctttcctttcatcatcccaaatttcccctgccatgtgtgctgatcctgctggcaggaccacatttctttgccactgatctcaatggccagtgatgtaagtcttttgcctgtcttcttgagactcgttgagatctttgttgagaaccactactatcattcactagctcatatctgccggcagcaattgaagagatccaatatttgaagattggccttcatttctcgatgttctttccatgatggggatggaggtgttcagtgccaccgtggctgttacttttcaaagtagttgaagtattgaaaatgagtaatgttggtaaagtgaattcaaaatcctagtatgctaaagggatggtacaagtctaacacaaattgtacgtaatgatacatctactagaaacatacattattcatcaaaagaaatgttacatgtgtactccacaggcatagtctttgttatgatgattggtgtggctttatgtctttgttataaactcctatttttcaggggcttatgattctgctctaaaacattgctctgggttatacagttttgatcccaaaagcttttttgttacaaatcgggagaaaaatccattttagttctatggatggaaatatttcatgcttttaaaaagatgtttgtgttcctgtggttaaagttttggcagtttattgattagtccaaatcacaggctaaggcctgatctccaggaggggtaggggagacactttaccagtatttttttatggaaataatactcaaggttgtaaaacccctcaaagcctagaaatttaattgttatggctgaaattcctcctagttgtctgatagaatgcccctgaatgggaactctaggtcccaaggcctgaagggttgagaacagacagctgtaactttgaattttgttggctttcagtggtcatgctacctacccatactcgtactctcagaccttttattagtagccttgctttctatagagcatgcaccaaatccagtgagtccatgtggagagagcactgtgtgcgcagcggcagcagcacagacgtccatgaggaaaactcccagtgatgatctgacatttacaattaccccacatggaaatttaggggtttctgaatcaagcttaatgtttacagtttccaaatagccattttgcagtgtatagtttccttacaaaactaccccgcattcagttttcacattatctgcaagctgaaacttatttttaagttttgtgtacaagttgactgctgtaaagatatatatttttgggtcagtttttttccttcattaacttggtggtagaaaaaaatatatacttagaaatccttaaattaaagccatgttttatatataagtcaggtaacattggtgtatagatgagaatgcaattaaacctgatgagaatctacttgagaatatagaaagtctttctctaaaggagatactgactccctggtttattgcattaaaatttatgtttgaggttacctcaacttgttttaaaagattttgttttgtgaatttgtactgtatatttgagtaactgtcaggcttttatttaaaattgtttaacatgtaccatgtacatgtcattactatatttcaatgcatcatgcttgtaacaggcatttcatttataataagaatgagttattcatttgtaagccgttcagtaatttatctactattcctaaattggcataatgttagataatctattttgaatcacctttaattacatgtcagaatgccttaactaccctaacttgacaaaacagaattctttggtagacgcggtgggggcggggtggggggtctggacggagtctctatttaaggagaaatcatcatgctatgataaaacacagaagcatgagtggcaagtggcggggtatttattttgcacaaactatttgcagtctctgtgtatttaaaaagtaaagaaagttgcatccagaagggttttgttagaatgaatacatttatattaggactgacaacttcagctcttttgtttaggttttcaattatttttggtaagagtatgtagccttatgatctggatatattttgcattcattttccaacgcctacatttaattcctggtaagagcagtgctcgtcaagtttctggtttttctctgctctcatttaacccgtcaaacacaatctttgtaaagctagattggtggtgttttatacaacttatttactcagcttacctttttgagaaacgattgttagaaattgacgatgtgtttgttccagtgatactgaaagtagtgggggcaagaattgagtttcacagtggaattggctttggatctggcctatagattagtgacataaaatattttctctattttcccctgttctttttgtgttatgcacttaattttatgactgccgggggggtcagctggagtgctgcttaacaagtatctctcctactctcagtggtcagaggctgtgttggacccatagtagaattttccaggtcacagacccaagcttccatgggttgttactgtgctgtaccactt

SEQ ID NO: 8698 - DNA, 1307 bp, Homo sapiens
tgtgagtagattttcccttgattgttttttatcctctcagaactttctctgacttggattttaaaagttattttggccaggcatagtggctcgcatctgtaattccagcactttggagaggccaagccaggaggattgcttgatgccatgaatatgagaacagcctataacatatcgagacccctgtcattagaaaaagttgtaaaagttagccaggtgtaatggtgcacacctgtagccgtagctatttgggaggctgaggcgggaggatcgcttgaacccaggggtttaaggctgcagtgagctatgatcgcaccactgcactccagcctaggcaacagagcaagaccctatctctgaaaatatatacatatatatgttataagctgttttgctttgctcagtggttgtgctttctataatgtaattaaaatagtaattgcaaagagaatttcttttcctgtatggtctgaaattaatcagccatcaaaaagcctgcataatgtcttttatctctgtgcttctgtacttaggttttggtagagttggatacatggtttttaactcttacaatatgcatcccatattgtaactcgatacaataagctcttgtagattttagccatcaaaaagcctgcataatgtcttttatctctgtgcttctgtacttaggttttggtagagttggatacatggtttttaactcttacaatatgcatcccatattgtaactcgatacaataagctcttgtagattttaatggtctgtgaacagtgcaggtttcctagagaactacctcacactgagcatccttatcttctcagctcagtcattataagccatcaatcataacatcgctcattattgtcatcaactgggggaagcccatagaagagttttttaaatcactggattttattttacagtgttctgtataatataattgtttccatgtactgtttaaacctactgcaccccatgcattactgcatgtaattctagtgtgtatccagttgtcctttttctgtgtttttttcttttaaccaaaagtaaataaaatataatcatagatttcagtttttatgtcaggattattgaatttctctgtagacaaatggaacttttgaaggggtagtatccttttaaaagttctgctttcttcattttttttttttcctcattgaataggtttatcaccagatcttcaatctatggagcagattcggcgaattatgcgaccaactgatgtaccagatcaaggtcttctttgtgatcttttgtggtctgaccccgataaagatgtctt

SEQ ID NO: 8699 - DNA, 8086 bp, Homo sapiens
gagtagctgggattacaggtgcacgccatgttggcgaggatggtctggatctcttgacctcatcatgatctgcccgcctcaccctcccaaagtgctgggattacaagcgtgagccattgcatctggcctgcagtcctgtttctaacagcattcgcacagacaggatggctccttttttggaatactataaaagaagtcttacttggtatcgaagatgcaattaagtcttgtctaagattttaagattctaattagacattaaaaccatgtttattataagtgtcctgaaaatgaagccactcagaaagctagttaaaccatgtttttgcccctttatctaaatctcgtattgtattttgtattttggcttcattggactaattgcgatttttctcttgcagtgagagggtccaagcctggtaagaatgtccagcttcaggagaatgaaatcagaggactgtgcttaaagtctcgtgaaatctttctcagtcagcctatcctactagaacttgaagcaccactcaaaatatgtggtaagtttggggcacacaggttatcttttgttacatgattgattaactgagtcaaggatatgttgatgaccttgtattagctagcagaatgattatcctgtttgcgaatagcttggaactacttaaaagtaagttaaatagtagctttagaataaatacctctaatggacttagtttacttagatgtacttcagatttttaaaaaaaatattttgctgaaggaataaacattgcaaaagaaaaaaatgaaactaagaatggagagctgaggaaaggtctgaactacatggatgtataggaatatgtttaagtttaaagcaacactggttatagctaaaaatagaacttccttgatactgattttgtggttctgttttctgcataatagaagcaaataatctgtgttttaactcaatgtaaaaccaaactttattcgtttgagtaatatattcttatagcatatttgcattgataaaactttgtgttcatgtttttaaaagtaaaatgttctttggcattatctagcagggagaaattgaaagctaaatgcattgatgggtggggggtgggggtggtgtgtatgtgtgtatgtgcttttgttcagatggggccaagactcactagaagtgcagcagttctgctgacacagtacccagagactgagctgtcagagatctgatattgatcagtcagcctgaaagggataccatgttacttggcaagaatgcatgcttggacataataaccctttccacagaataaattcttaatagttgaattttatgtgaggttctggacatacacatatacttaaaatttttgttaagctcagttgaactaaatatgatataagattggaaattacttagtgttggctgcccagttaaactctcattactagaggtcaatgccattgtacaatgaatatttaaagaatgtctttccaaagctttgttagtggattgagctttaagtatgggaacactgtgtaacaaaattcttgcttccaggtgacatccatggacaatactatgatttgctgcgactttttgagtacggtggtttcccaccagaaagcaactacctgtttcttggggactatgtggacaggggaaagcagtcattggagacgatctgcctcttactggcctacaaaataaaatatcctgagaatttttttcttctcagagggaaccatgaatgtgccagcatcaacagaatttatggattttatgatgaatgtaagtacttttctatatctaaggaagagttattgaaattaagatatttatcataaacaattatcacatacttctgttaggaattgtgagagtttagatgcagtggtatcatctctcatgttttctatttcatcaacttgtttttagcttagcttttttaggggggtgggggaacggagtctcactctgttgcccaggctggagtgcagtagcaccatcttacctcattgcaacctctgcctcccaggctcaagcaatcctcctgcctcagcctcccaggtagctaggactgcagacatgcatcaccacgcttggctaatttgtgtatttttttgaagagatggggtttcaccttgttgcccaagctgatctgaaactcctggctcaaggaatctgcccgcctaggccactcaaagtactgggattactggcgtgagccatgatgcccagccagttttttctctcttgggtagaaaaataacactgccgctgtaataaaataaggtcttggattcttttatgatgtgatgatcagattaggaagtaatgatcatggtaatggttgctttaagatttaaattgttgtattcacagataacttaattcttagtagaaatctgagaaccattccaaatagtttttttaagcaactttattatgtaatttcattccataaaattattctgttaaaagtgtacaattcagcgatttgtagtaaatttatagagttatgcgaccatcaccatagtccccaggcaaccactaatctactttttgtcttttctagagaatattgcatgcaaatggaatcttgcaatacgtaaataattagtttttgaaattattatagtttttctccttctggcatatccacacccaggaagaatggcaataactttcctaaaactaaaatgtgctgaacaaagattatttttacagtattttacacattttgtgacccattttggattgtttaattaaaggtatacttcgatttgactattgacaaaacacagttcttaaagctttgaaaataggctgggcacagtggctcacgcctgtaatcccagcactttgggaggccacagcgggtggatcacaaggtcaagagatcaagaccgtcctggccaacatgaggaaacctcatctctactaaaaatacaaaaattagccaggcgtggtggcagatgcctgtagtcccagctactcaggaggctcaggcaggagaatcacttgaacccaggagtcggaggttgcagtgagccaaaatcacaccacagtagtccagcctgggtggcagagtgagactccgtctcaaaaaaaaaaaaaaaaaaaagctttgaaaatatcagttcagtaaagggtttcaagtcagaaaaggttttgaatctttaccttcaccttccttttgtgctcatcattgctgccaggacgggtttcaggtttggagtgaagaggtggttaaggaacttcaggtacttggcatttgctaatatgattatagggatatcagcaaagggttgtccctgtggccctcccctagaccacatcgtaacctagagtctccagatgcagtgtttttccatctcaattcacatagatatgttgagctagcacatttgttagaagtgcatcctagaaagattatattcacaaactgagcccttctactaccaccctttcccacaactggatgtttgcttggtctgtgaccttgagatccagctgataagatggggtggcaggaatcatcagggacaaaaattctatgggttctggactgactgatagcattgaacttgtacatgaaaggtattcaatattaacagtgattctgtgtcagagaagtaccagtaagccagttactactccttaggtagtgaaatgcaaggcaggtgtgatgggttttttttgtttgtttttgagacagagccttaggctggagtgcagaggtgggatcatagcttactaccacctgtaatttctgggtttaagcaatcctttcacctcagcctccctaagtgctgggattacagtcatgagccaccacacccagccaacactgtgttttggatacttattccaagtgttactcttgagttttttgttttttgtttttttttttttttttgagacggagtctcgctctgtcgcccaggctggagtgcagggcgcgatctcgcctcactgcaagctccgcctcctgggttcacgccattctcctgcctcagcctcccgagtagctgggactacaggcgcccgccactacgcccggctaattttttgtatttttagtagaggcggggtttcactgtgttagccaggatggtctcgatctcctgacctcatgatccgcccgcctctgcttcccaaagtgctgggattacaggcgtgagccaccgtgcctggcctgctcttgagttaaaggattccttttacatagctgttagcccagcaaatacttttcatgtttgcactgatgaattcaaatccagttgacctcatttttgtgacgtgtatcctaatgtaatgatactggctgcatcagtttcggtttctacttaatgcagaggcctttaaaaaatgacttagaagatcagtgttggttggtatcagtttcgactcctgtttggtcatcaacacaatttgtagatcttatgctcaagcttcctctctctcatcaggcagatataatttgccatccagtctacttgtgggcatgaaagtgcccttgacataggtggcttttggttgaaggcttgcagacatttaatatatatataaaatacttaactaattttattaaaatgaaaagttgtattcaaatgttgattttcatgggacaatttaaaaaccactgcctgttttccaggtacataagtactttatactaccatttcttttttttttttttttaactttgtaaatgtgatggaaaggctgaggtatatgttgttgggtaaaacatgagtgtttgttgatctgtttctgctgccgtagctgtctgatgtacagtaatgcgaaaccgcattacaggttatggctcagaatcttaggatttggaagctaggcgattaccctggctaaacctttcaggagccagatgttcctagtggtctgaggtagccttagggaggaaatgaagagagaatagaaagaggcaggcccacgcttaaagtgctgagagggaaaaggaggaaacaaactgatttttgatggagaagccagcaggaatcagcaggagaagctggagtatgtggcataactaaagaatcaaagccggggcgtggtagctcacgcctgtaatcccagcactttgggaggccaaggtgggtggatcacttgaggtcaggagttcaacctgatcacaagaggtcaggaggtctgaccaacatggggaaaacccatctctattaaaaatacaaaaattagctgtggtggtgcacacctgtagtcgcggacactcaggagattgaggcaggaaaatcactggaacctgggagaccatggttgcagtgagccaagattgcgtcgcttcattccccctaggtgatgcagtgagaccccacctcaaaaaaagtatccagaagtgaagctgaccttggggaaagaggaagtcactgtcactggggagctaagacagcagctctgtttttataatacaggttaagtattccttaccgggaatgcttggcactagaagtgttgcaggttttttgtttttgtttttaattttggaatatttgtgttataattactggttaaacatccctaatccaaaaatctgaaatccagaatgctccagtgagcatttcctttgagcatcatgtgagtgctcaaaaagttccaaattttggagcatcttggattaaggatactcatcctgtggtggtagtagtagtagtattgctgttggaaatgggagttggtggtttttggagattgcccttcagcctttcgtaagaaggagtttgcttttttttgagacggagtttcactcttgttgcccatgctggagtgcaatggtgcgatcttggcttactgcaacctctgcctcccaggttcaagcaattttccttcctcagcctggcgggagaagtttgttaaactttccgaaccccctagtgaaggacctctaaagaaatatgcaacagggtgaaccatagtcagtgttagacccagtcattgagaaaccagaaattattaggagaaaagataacactcctctgcagagagaaggcaaacatttgttgaatttacatttcatttcaagccctgtggtaaactccctaagctgcttgatttgcattacagggtgggaggtgtggttcaggtcagttgcttgggctggctctaactctcaaaggagaggtataggtttaaacctttagatgtccctgtattccccaggaaaagagactaaggacaaactcttggtttgttttgtttgttttgttttgttttttgagacggagtttcgctcttgttgcccaagccggagtgcaatggcacaatcaaggctcaccgcaacctccgcctcccaggttcaagtgactcttctgccttagcctcccaagtagctgggattacaggcatgcgccaccacgcccagctaatttttatatttttagtagagacgggatttcttcatgttggtcaggctggtctcaaactcccaacctcagatggtctgcccgcctcggcctcccaaagtgctgggattacaggtgtgagccaccgcgcctggccaaactcctggtttttaaagattgtgcttagtatagtaagtacaggaaacaaaggcatctggacaattggacaatcctcaaccaatccagagaaatttgttcttgcaaggtatgtgactaggttttaaactcagaacatcagtttcctgtagaaacagtgcatagaggcatatttctgtcagaactgcactctgactccagaatgtgtggatgcctgtgctgttgagggaacatgaccatcctgtgacatcaggcctgtgggagcatgtggagtctgtgcagtgttggaaacaaatgccctgtagtgcctgtgagaggcagccactgccgtgtgatcattgtgcctcctgctagagtactgagggctggggatcctctggtgtcagtaggttattgaggggcatatatgggggatgggtgctaactctcaggtttcctcagaaggaaggtcataacgccacatgtgtaagttcgtaattgaattcagaagtaggggactagctgcggtgagattggacagagcagacaatttcaaacagaattgatgctcccagataattcctgggatttgatggcagtccttaatcattatcaaatctggaattctggtttcatgcttctgtggaatttaaaaagatttcatgtgaaaatgtaagtcattgcttttagatcagatatgtgtctctcctaaaccccttccctctaggagagtctttctttaaagagatggggtctcactatgttgcccaagatggtcttgaactcctgggctcaagccatcctcctacctcagcctcccgaagtgctgggattacaggtctgacccaccacgcccagctcttattttaaaagagccttaaaataagatggttttattaagattcttaataaaaacatagtttcatttgcttaaaaggcacccagaatcttgctttgggggaagttaatcctgagagaatgagcctacggaacagtaatactctctttttaatgtaatactctctttttaatcacaggtaaaagaagatacaacattaaactatggaaaactttcacagactgttttaactgtttaccgatagcagccatcgtggatgagaagatattctgctgtcatggaggtaggtgggctgatttttgttccaaataggttttgatcccttccaaagggtgaacactttaacatttgtgagttatcattgggatgactttctctgacagaacactctcctttgttgatgtgttgcattgcactttcactctgatacagccaggatcatttggataaaaatcttaaggaattgatttattacagggaattctagactctgtaagctaggtttgaaaatagagcagaaaatttttatttttattttattttttgtaaggatgagttctcaccacgttgcccagtctggtcacaaattcctgggctcaagcagtcctcctgcctcggacttccaaagtgctgggttacaggtgtaagccactgtgcccggcttagaaaagtttttggttttttttgtttttgtttttgttttttgagacagagtctcgctctctc

SEQ ID NO: 8700 - DNA, 1219 bp, Homo sapiens
ccaggtcctgaaatgacttaagggtgttggggggcttataccccaggtcatggggcagacagcaccacgcctccaccccccaaccccggcctgggtcccctgagctacctaggcccatggagagacctcatctgccccgcactgcccaccccagccactgcacatccctctcaccagcctgagcccctttaggggcaggaaactcactcaccgtcaccagttctgactgagagaaagatctccctcactacccgagctctcattctgcctgctgggcttcgcagaaggagtgggctccacctccctgggagacccagctccttcccactcggaggtggggcctcaccctgcctctgctttctcccagcgctaaaggctacgcaggcagagctgctagagctgcggcggaagtacgacgaggaggcagcatccaagtaagtgagccctgctgaggtgtacctcctcccttggaggcctcccagacaggcctcctccttctgaccctccagtacttgcctcctccctctgaccctcccagacacacctcctccctctgaccctccagtacttgcctccaccctctggccatcccagacacgcctccaccctctggccctcccagagaggcctcctccctctgaccctccagtacttgcctccaccctctggccatcccagacacgcctccaccctctggccctcccagagaggcctcctccctctgaccctccagtacttgcctccaccctctggccatcccagacacgcctccaccctctggccctcccagagaggcctcctacctctgaccctccagtacttgcctccaccctctggccgtcccagagaggcctcctccctctgaccctccagtacttgcttccaccctctggccctctcaggccttctccctctgaccctcccagacacgcctcctccctctgacccttccagacaggcctcctctctctgaccctccagtacttgcctcctccctctgaccctcccagatatgcctccaccctctggccctcccagacaggccttctccctctgaccctcccagacacgcctcctctctctgaccctcccaaacacgcctcctccctctgatcatcccagacacgcctccaccctctggccctccagtacttgcctcctccttctgatcctccaggacttacatcctccctctgtccctccagacatgtctcttccc

SEQ ID NO: 8701 - DNA, 1613 bp, Homo sapiens
ttttcactgacactgtcacagcggatgacagactttctacggggaggagggggggatcatcaggaagcccagaacactaacaagcggttctcccatctaccgtcagtccacatggcaggtctgctgtgtccacaccacagatgaccacatctaatcctgcttctactctcagctttaggacaaaagctctgtcagaggcacaagctgaaggtcaaaaatgatttaaaacattttacctcagactaatttctttaaaggattcaggttcaaaacttaaccactgcttatttcagtgcactgtttcaactaacacccatgctatttttgtagtcagaaacagctatgcaaaccctacctaatttacagtctgagccagcatgctggcttgtctactgcatcctcgggacagtcacctgccactgagtggccactgtccttcctaaatgtcaagaagtgaagtatgtcaccctttcagggaaattcaggcaattactgaaataggagggtggcaagaacagttctatcctggtgccttacgaataaaaaactggattctggtttacagcagctttacagtgatagttaaattaactggggctaggggaagagcaagcaaaaagggaagaaggactcctaggccctttctagtaaatccttcagcaacaaggctggcttggtgccctccaagcatctaatggcttattaaattatcccacaagtgggttttaggctccttttttgagccaaaatggaagctgggaatctggtgccataactaatgagaaactcctttaatagcccacaatcagtgttctgttctagctggctactgcttcactggattgagaatctatctatctccttgcacacatgggcacacacaatctccaccatccagggaggtcctgaagtcaaatctctatctatacaagtgatacaattcatagggggctggctcctcccagaacctgtctggaggctcagaaacgggggcagtgacagtggagtcagctgctcttgggtgccagcagagccattcagtacaacccccaggctcacagcagtggcttctaggaaactgggagtttagatcagctttacagatacatcgatcagaggctaaaatgaaacctcagcctaaaactcataggactgactgcctgggaggagggttaggtctgcttcttccacttatacttagtctctgtgctccaagaggtcaaatttttgcttctagaatttccttggggtctttcagagggtgggggaacaaacccctatgcacttttcttttttttttttttgagatggagtttctcttgtcaaccgggctggagtgcagtggtgcaatcttggctcactgcaacctccaccttcctggttcaagcgattctgcctcgacctctcaagtagctgggattacaagcaccagccaccatgcctggctaattttgtatttttagtagagacagggtttcaccatgttggccaggctggtctcgaatgtctgacctcaggtgatccacccgccttggcctcccaaagtgctgggattacaggcgcgagccaccgcgcccagcctacaccacttttagtaccaacactcttgggtg

SEQ ID NO: 8702 - DNA, 1430 bp, Homo sapiens
tgtgtgttctgatggtatacaggatttggcttgatgagaagcagcagcagcagcaacagcagcctgatgcatgcctaggactcagttggccttccttgttatgacaggctggacagggcagtgttttccttcctgagtcccaaaagtctgacatgtggggggttattaccatggcagagtttgattgtagctctggagaagatactgctgagaaagcgctgtggatggactggctttgagtgtagcgttagccccagcccctgaacaggggagagcgccctgtgattgtgctctactacttgatggctgccatggcgatacttcacagtctgacctgttattctgaaagcaatactggtgcttggctaatatttggggagggggtttgttaaggcctttttttctaccccatgaacaagtcttctgggagttttatctgaagtggttttacgtctgactggtttgtttctacccacccacccaaccctccccactttggtgcagatgggagggggaaaagcgaattcaattttgagttttgttcagctagcacgaggatagtttacaatcatgtgctgcagagacactaggctgatgtgtggtgttgccagttttctgtttcaatgttcgcttttctttttacagtacaagcccaccaccaacagcagttgtaaggctgccctggaggaaccgaaaggccaaattccctcctcccttctactgcttctaccaactggaagcacagaaaactagaatttcatttattttgtttttaaaatatatatgttgatttcttgtaacatccaataggaatgctaacagttcacttgcagtggaagatacttggaccgagtagaggcatttaggaacttgggggctattccataattccatatgctgtttcagagtcccgcaggtaccccagctctgcttgccgaaactggaagttatttattttttaataacccttgaaagtcatgaacacatcagctagcaaaagaagtaacaagagtgattcttgctgctattactgctaaaaaaaaaaaaaaaaaaaaatcaagacttggaacgcccttttactaaacttgacaaagtttcagtaaattcttaccgtcaaactgacggattattatttataaatcaagtttgatgaggtgatcactgtctacagtggttcaacttttaagttaagggaaaaacttttactttgtagataatataaaataaaaacttaaaaaaaatttaaaaaataaaaaaagttttaaaaactgatcaagttagtgtgtgtctgtataagctacttctttgtaggatacttaatatcaaagcaggtgtgctaagggtgcattttgaatatcccggaaggtagctgtgaaatgatttttcttcttcacccttagttctggttcaaggtatctctagaaaaagac

SEQ ID NO: 8703 - DNA, 2030 bp, Homo sapiens
tctccaattgttttccctggttatccatatatctgctttgaccataagttgtactcttgagagggcttggccttggacattggtgcagtgtaactagaagctggaagcacccaggtggtcccatttttctttaagagcagccctggaagcactttggagctcacctccagtgtaagctgctacaggtgaaaggtgtgcttgccatctcagtggttgctgtctgcatcagctgctgacaaaggtccctgcactccagggcccaggggattgtcttaatgaggagaaggagctgcactgaagttgggctctaacgctggccttgaggccctccctggggctgttacgggtgaattggctgtattagatgtctctgctactttcataacagaactctctgaggcgggtctaagtgagacctgccacaatgaattccatttcctgttaaatagtgcgccagtgaggctctggcaaggtgtgggctagagatgcgactcagttggatctatctctcagaaggctaccttgtaagtagagttccacagctctgggaagtttgggcgtcctcaccctgcaaagtttaggttctgtggtgtagcgcactgcagttgatttgctttttgatagtggggagggaagccggtttggtccgtgtgggccagcgtggtttggtggagtcagcttcataagagctggggtcctgtaggtgtctaccagaggctggtggctaagtaggcatgtgaacttacatgtaagtcagggatccctaaaacctcactctgtttttgtgctgaaagggcaaaaaggttaacacagggaagctcaaatttgccatgtgcccgtttgaatatgtgagagtaaaaacggcatttcatccaaggcttatcgtagtctagaacagtgcacagtgtgggaaaaaggaaacaagggctcttcctggccctgccaaccccctgcagagctggaatccagctgtttgggctgactaaaatcacctttccaacttgacagtgagtgagaccaggttgaacttggtacagagacgctgggctggcccagatgacttcaggttactcctttccatctcactggagccattaaaaactccaactcctcctcctcctcctgctccatcagcatatctctgagagagtcacgggggcctaagagtctcttttcactgcctggtgagcagaccagaagcagagggagagaggcaaatgaacagaggtccaagtaattcacatacttgactgtgacagtctctgcttattaatgtaatctgttttcctatttgaaagggatgttatctgcaaaactacctcaggccccacatggcagcctgattctgaagcatcattgaatcttgtatgatattaagttgagaaagctgcccttggatccagtgtctaatctttgtgaagatcttaccccatacatagaatacaatgatcagaaatgtcaagggttaggacagcacagccctgacttctacccaggctcacttgttgcctgctccctgacccttgcaggatctgcccaaaggtgaagcgcgtcttcaggtcaatagataatctactagagattgtccccagagaacagaactgggccctgaggcccaccgttgccctttcctgagagtcccagcccagtgaaaggaacacagttgacatgttgttgaagccggagatgttgcctgtatgcgtaaaagagctctctgtttcaggctcatgtacagtcaggaatggttccttctcatccaactgcccatgcgccaatgatgctaatgacgacacagccacccggcggtccccaggccgccctcgctcaaagtgcactacagcccattccagtctcgacaacagcgcatttcccctatatgacgcacccttcaggtgaggcgtgtgtgtgcaggggccgccggggcaccccaaagcattctgctcgcacaggtggaatggcaggcagggccagtgcttcaagccccgcatttgagaactagcaagacccgtccaggagtgtgcacaggaggg

SEQ ID NO: 8704 - DNA, 1498 bp, Homo sapiens
tatcattatcatctcccccttcctctggggagtggaagaattgcttgaatgttatctgaaaagaggcctggtagtaaaccaggccctggctctttaccagcagtcatctcttcttgctctggggccagccaggaaaaacaaacaacccggggcacattgggtagactcagtgtaggaaaaatggtggcagctccactgtttatttttggtgacttcgtacatcattatgaaccgcaattaaggaggaggcttaatggctgttcccaaactcaaatctcagagtgggtatcctagcatctagcaagactgagtggggagatttctcatccgtgtgaaaatgtagagtgaggcctctgactagctaattgtgtattttgttgggtttagtattttctaaatgtttacaaaatattgggctgcatgttcaggttgcagctagagggagcttgggcagattttcaattacgctttcaagatataaccaaaagctgtttctaaatcctaaaattagaatttcaacagagccccctttagaacagtcatataacgcttgtgtgggccaacagaggggctgtgtactctctctggaaccataaatgtcaaataatttataacctgcagtaattgagcaaacttaaaataagacctgtgttggaatttagtttcttgaagaggtagagggataggttagtaagatgtattgttaaacaacaggttttagtttttgctttataattagccacaggttttcaaatgatcacatttcagaataggtttttagcctgtaattaggcctcatcccctttgacctaaatgtcttacatgttacttgttagcacatcaactgtatcactaatcaccatctgtttttgtgggatgtgctgcagcatttcccaaaaaactttacgtgtaatgttgcaaaatgaatgtactcagacattcttaatttttacttagggcagaccaactctttgagtctctcttggacttatatatacagatatcttaagagtgggaatgtaaagcataacctaattctctttcctatagagattctattttatttaaaatctatttttacactagttagaatcctgctgttttggccaagtacttgtcttgcatgtctgaccttgcagaagctggggtggatcatagcatactaatgaagagaattagaagtagtttacaaagctcgctcactcctcatttctctgtgatcccttctatccagtggccccaccaccacctgggaaaacagatttttcagtacaggtgggataaatgctctgaaaggctgtgcccagaggaatgagcaaataggcaagtgtttccaaactacttggaggtttacaaaaaatatgtcccagaaaaaaaaaaaatcttaccaagatacgtaaagaaaaaaaaatttttttttaaacagtcaaagagtcatgtttgaatttcacaaaatcacatcagacagaagttgttttcttcaggagggaaatgaacc

SEQ ID NO: 8705 - DNA, 1115 bp, Homo sapiens
aggtgagcacagaccagacagttggcttatttgaaccatcaatactagatgccaaactctcctatcttcagccgcccagcctcccatagaccctggcagatgccctgtgtcacccactcaccatgcatgcaactttccttttcctcttcagaatgacccagcaaggtgggaggtgccatcgtacccccattttgaatgtgaggaaacaggcacagaaaagtgaagtgacttgtccaggtcactgagcttgcaagtagctgacctcaaattcacatgaacttgggttttcataagcccagagcccaggctctttcccatgcaggggggccgcctccttagatcctaacccccggccccagcacagggcagaaggcacctgcagagtgggcctggggagtctggaggccgtgggatggcaggtgtggccccatggaagccctctggaatattagtgattgtatcacataggtgccacagggaagtccgggaagatggttgttatgggccatcaagagcaggctatcattcctggggctctcggagacaagggctgacccagggccgcctccctccactctgtgtctgccaggcctttggagcagcaggcctgagcagcgactacccactggctcagttcttcacctgggcccgagccctgcgctttgccgacggccctgacgaggtgcaccgggccacggtggccaagctagagctgaagcaccgcatttagagccttggggctgcagtggctcaatgtcctggctggtccagctgtgcccagatctgtcactgatgtgcctcgaaagatccggtgtttgtggctcctgcaccctgctcagcagctctgtcccgggacagtcagggtggactcaatctttctggttctccacagaagacgtctctgcaagaagcctggagtctgtttcaggccaggaggaggggatttgctgagggccaagggggttctgggacagagtctggaaagctggtcttcaggctctcagtcccaggctgggcaggcacggtcacttcacttcagcctttcagtccctctctctctgcctgtgggaatctggacacattttgggaggcctcccaaggctgtgggacgtgct

SEQ ID NO: 8706 - DNA, 1192 bp, Homo sapiens
tgagagcttgttcctgtctttctgtccccacagattggccgcgtaatccaggttgctgctgggagcagcaacctcaagagagtgaccttggagctgggggggaagagccccaacatcatcatgtcagatgccgatagtgagtttccagctggagaaggcctggccttgaaggtagccctggccacctgtgttgtggctccagccgatcctgtcgcccccccagtgcccaatggcgttggttgctgtccctcgggcctcaggataagacgccagcgcagggcctgcatggcctggccttggcctgtccccagcctctccctggctgctctctgcatcatcaggctaggccacgcccctgctatctgactcatccacttgccgccatcacgccctttgtcctggttggcagtgggctccgagagcacccctcatctccctgtatctgtctctggcacccagcaggcatcaacccttacagtggtgggaacaggctccattgggcaggcggccaccagggccagggtcctcctcctcactgtcacctttctgtctcctgcccacttcccgcagtggattgggccgtggaacaggcccacttcgccctgttcttcaaccagggccagtgctgctgtgccggctcccggaccttcgtgcaggaggacatctatgatgagtttgtggagcggagcgttgcccgggccaagtctcgggtggtcgggaacccctttgatagcaagaccgagcaggggccgcaggtgagccaggcagtgccgcagggtctgggtgtctagagccagcatgagaagcagagagggcatcgggctcagatcagttgggactgggttcaggtctcagctctaccacacagcagctgtgtgcctttgggaagctatgttccctccctcagccttcatttccccatcccgagccgtgccctgcctcattcacagggtggctgtgatgtagaaattaatcctgggaagcactttgtaaattgcatatatgtaacaaataccaggagtgtctgcaaaagggagtgtgtgtttccaagaccttggtcatcagtagaagtgtatccaccagaagatacacagctctgtgaaccttcgtgtctgagagccatggtatggctagtatagggactttatttcacttcatgttttgagctgtttgattttatttatttatttat

SEQ ID NO: 8707 - DNA, 1181 bp, Homo sapiens
gttgttgtgtgacctttggttggcctggtgtttcctggttcctgttgatccatggggaaaagtcctttgccttatcaaaatatttatattccttcagcataagagtgaaattaccttcttagtactttgagcttttcctttccactttcttagactggctttttaggtgcccagcaatgaatatgaaaaactgacggcagtgtttgcattcaggcagtggttgcaggaatccagcaggctcacgcggaacagttggccaacatgagaatccaggatctgaaagtcagcctcaaacccctgcactcagtgaacaaccccattctgcggaagaggaagttacttgggtaactgagcttatttcttcgattcttcttcatggctggaatggctgagtactgggttctgaaatttaagaaatttaacttgctcagctaggggtctttagcctctgaagagggtggagaggataagttctttaaatagtatcaggagttggacactattgttatttttctgatacatctgttgccttatgtttagaggtaatatctgtccagagttggtttttggggtctcacgttgtcattacccctccctcaaactcttaaagcaccaagccaaaggacagtgtctatatccacgaccatgagaatggagccgaggattccaatgttgccttggaaaaactccgagatgtgattgctcagtgtattctcccccaggctggtaaaggtcacaccatttactaatcctctgtgtgtctgtgagtgtgtgtgtgcaggggtgggtgggtgtatgcatgcacatggcaaaaggaatggtttaattttgggttgtctgtttcatcttgtgttataagaaaagtacattatataaggtagtctatgcccactaaaaagattggacagtgggagcttagaaatgcagttaagttctgcccctcctttgtttctgtggaatttctagtttagacttaattggcagtgtcaggtgcaagcatgcaattttgtgttttcttagtttgacaacaagggcacaggttgggggatggagaatggaaaatgtgggtagggtctgaatctcattgcaggctgttaaccatttccagagcctttagagtgcaaggctgccattagctcataaataagagaatacctccttagttcagaagtggctcctgc

SEQ ID NO: 8708 - DNA, 1160 bp, Homo sapiens
gcctggccaaaaagctcagggaagccgcggagccactgcccgcctgggtcagggtggtgacggagcctgactgagaataacggctgaacttgactaatagactgaccgagggttggagcgggtcccaaccaactgcctgacggcccaaaggcaggaagaaacgatggtaggccttgtcatcttcgaaggagaggaaggacagcaaacgaattgctatagcgtccccatgcgcacttggcgcttctcctcaagcggagcaggaacggaactgggcggacccgccggaagactcggcgagtgcgcgcgcgcaggagcccattttcccgcccgcaacgtggccccgcccttttacccaggccctacgcgagcttcgccgagtacgcgtgcgcagcagcttcccctccctcgccccgcccctcacgtggccccaccctctcaccctagacagatgggagcctcctggggtgtccacgtgagcgcgcgtgagtccgcccccccagtcacgtgaccgctgactcggggcgttctccactatcgcttacctacctccctctgcaggaacccggcgatatggctgccgctgtgccccgcgccgcatttctctccccgctgcttccccttctcctgggcttcctgctcctctccgctccgcatggcggcagcggcctgcacaccaagggcgcccttcccctggatacggtcactttctacaaggtaaccggggcgggggacgtcgcgcgcaggtgccgccggggcgcccggaagagcgcgcgcccgtggggagacgctggattccgggagctgacgggaggtggtctgtagcaacggtcccagagcttcccggcgtcctacaggcctagtggactctgagcggagaatgttatgaccaccgggcatgcacgcttcagggccccggcgcacccttgcttttgcagcatttatacttgcatccacccttgcaaagatgcagccgagggaactgggtgccccttcccttcacctgtggggagagggcggtgcctggcgagatccaaccctcgagtcccaagtgggagaaccggagggcggtgcgaggtcgacgccaccgggctcccggctgtggaagctgggaggggttggcggggggaaatgcaggcgcgttagcctgcgtgtccgcgccc

SEQ ID NO: 8709 - DNA, 1363 bp, Homo sapiens
acatggagctgagtgagaaatacaagctggacaaagagagctacccagtcttctacctcttccgggatggggactttgagaacccagtcccatacactggggcagttaaggttggagccatccagcgctggctgaaggggcaaggggtctacctaggtatgcctggttgcctgcctgtatacgacgccctggccggggagttcatcagggcctctggtgtggaggcccgccaggccctcttgaagcaggggcaagataacctctcaagtgtgaaggagactcagaagaagtgggccgagcaatacctgaagatcatggggaagatcttagaccaaggggaggacttcccagcatcagagatgacacggatcgccaggctgattgagaagaacaagatgagtgacgggaagaaggaggagctccagaagagcttaaacatcctgactgccttccagaagaagggggccgagaaagaggagctgtaaaaaggctgtctgtgattttccagggtttggtgggggtagggaggggagagttaacctgctggctgtgagtcccttgtggaatataagggggtagtgggaaaagtggtactaacccacgattctgagccctgagtatgcctggacattgatgctaacatgaccatgcttgggatgtctctagctggtctggggatagctggagcacttactcaggtggctggtgaaatgacacctcagaaggaatgagtgctatagagaggagagaggagtgtactgcccaggtctttgacagatgtaattctcattcaattaaagtttcagtgttttggttaagtggacctgaagccattcttttttcttttcaaattatactttcgtctatgacctgctttcctctttgaatctaagctggtatagactccactttcccagggtaacaaactatcctcataacactgtggaaactggcatacctttgttattttccagtgatattcagactgacatggattgactgtcaatggtaaagtttgtctattttccagtccttaaaactcaatagcagtattgatgaatatattgaaccaacattgatggaccatggtgtaattattttccatgctttgtgaggtacacatagcaaattcttagttttactgatatattctgtgacttggatttacacagctaaatgatatagtccgatttcaaaattaaaaaatattttccatctaaatcactatcactaaataaatactaacttctagaaagcagaataaagagcacttgtgccaacattcacatcttttcttcagactcagaagcagttatctgcaaaagtgagcttcacgacagctctactttcatatttaaccatt

SEQ ID NO: 8710 - DNA, 2359 bp, Homo sapiens
agaggggaaagcagtgcagaccacttattaagcccgctgaggactagctttctgtctttcatacatttgggaaagataggaatgactgtttcaaagaagagaggtgcacataatttatgcaggcaagtatgatacttatttcattggttttgtgagtcatatatatacatatatatatatacacatatatatatgacttgaaaattaagatttaatactttaatgttttaagtgtggggggtttgggaaggaaggaatgtaatattatggatttagccttaggctttaagttttaggctggcaaaagaaatgttattcagtgggtttgaggtttggactactttcttcaaacttagagaattataacaggatggtgtttactttgttcacctggatgtccccaagactctagcttcttctatcagtggttggtctgatagaagaggtaaaaattgctcttgaaaatgtcctacaatttatgcagtttctttgataatatttttctgtttaaatccctgcttctgtttttggtctgttacctaaatatagttcaagtttaattctgtaagagcaaagaaatgaatttgatgaggaaattaagcatccaatggaggattggtcttgaagaccttaaaggtgctttccaacctgcactgctccagtgaaatgtggtacttttttcttttaaaagcaaccaagagagctgggaatatctgtgtacgcaaagtaattgcattttgtcccttcattttgactttcttagattcataatttgatacagtgcttaaacttccaaggaaattttaaacaattactacattacctgttcaaaataaggcttgttggaaatcctagtccatcaactaatttcaaaaatttatttttgatatgagtagcaacagctggtcatataccctatcccaaaaggaagaactgtcttgaacaagatgaatggaaaattgtggttaattctgaatttcatgtaatgacaacatattctttcataaaactatggcctgtttaagatggaactttgtgtgtgtctgctggggagggtggggtacatgtgtatggcgtgtgttcttgaaatgatgtctctctgaatatccaaaaaagtactgtactgtagaaatgctctttgaaaaagtctatcgactgaccatgatcaatctagcatatgtatgttcagtgggctagccttggtcctcagggacagtgtgtgactctagtggtcttcctaaccagtctcttgcctaaagatatctgggacctctactggctttaatgacaaataatgttatgttgaggttatgcttcctttgttatttgctgattttcctactaaatgtagcatttcaattagatccagctttcacattttgagataattgtaaaaagaatgaaattatgcagaaatggccaatatctcttatcaatctgttcttttggaaaccctcatgtactataaattgtgtacagttaaaaaaatatatatatatatatattcttacatgagtaaaaagcaccctctcccagcaatcgtatgccattggtatttgaagagaattcccaaataacccattgctgctgctgctgtttttgatttgtatgggtttttttgttttgtttgtttttgtgtggtaaactgatatttaaaaaaggaaaggagaaaaatcacgactactgtttacagactgaaaaattattgctttttatactactgagatcctaagttaagactctccaaagcaaacatttggtttaaatcatttatctgatgtagataaaaggtagagaaacttgtagtgttctccacataatggaaaatgtacaaatgcctagttgtgttgcccatcaattttgtatattttcataattttaattgttgaaaattgcattatattttgcaatcactatgttcaatctggatttgtctttcattttaacttttaatataaaaaggggtttcaatgtatctacaggcttgttattgaaacttcctacttatttgatgtgatttattaatataggaagtatatattcttccttaagtaagtgaagcatagcaaatctactttaaactggatgggttaatttatataaacattttcattttaagttggcatttctgcctggttcctttttgttcagattcttagaagccacaaccttctgaatggtgtaattcatctcagttgtgaatttagggctatatcccaacatatttttaatatttgagaatttagaatttttatttgaagtcagctagtccttttgactcaaaagttagtaccttctgtacttgcagttattaattcaacatatatgtattgaacacttaaattagcatatagcagat

SEQ ID NO: 8711 - DNA, 1106 bp, Homo sapiens
agtaaaataatctttaataagatagtagtagtttgtatgtaatagtggtcccattttctaagagagtgaataagaaaatgtgacatttaggccgggcccggtagctcacagctgtaatcccagcactctgggaggctgggatgggtggatcacctgaggtcaggagtttaagaccagcctggccaacatggtgaaatcctgtctctactaaaaatacaaaaattagccaggcgtggtggcagatgcctgtaatcccagctacttgggaggctgagacaggagaatcgcttgaatccaggaggtggaggttgcagtgagccaagatcgtgccattgcactccagcctgggtgacaagagtgaaactccatctcaaaaaaaaagaaaagaaaatgtgacattttccttcttgtggttggactctattctggttattgagcagaaatgaaaccagcttaccaacttttataacttttgattttagagaagttgacaagtgagattcagagtcgggaaaataaatgcatggctatgtacaagaagctgagcaggtggccagagtgcaatgccctttcccggcgcctcttactaaaaaagtgagtaaaagctttcttttgtaccatttgactgtagtgaggctttaagacctcactattgattttcttggtgtctgtgttttgaagtttctgggcataaagtcttcttatagtagttgtgtcctgcatgtttctaaaagtttttaaggagccttcatctttcagtagagtattataatggtacttgtaggctgggcatggtggctcatgcctatgatcccagcactttgagaggccaaggtgggcagatcacttgaggtcaggagtttgagaccagcctggccaacatggcgaaaccctgtctttactgaaaatacaaaaattagctagttgtggtggtgcgtgcctgtagtcccagcccctcgggaagctgaggcacaagaatcgcttgaacctgggaggcagaggttgcagtgagctgagatcatgccactgcactccagcctgggtgacaacaatgagactccatctcaaaaaaaaaaaaaagatacttgtgccaccatggtgctgaa

SEQ ID NO: 8712 - DNA, 1143 bp, Homo sapiens
tacaatgacctcggccacacagagcgctcgtgctttcagcagagcgcctccacagacaagcctgtggccagccctgccctccagcctcgagctggagttgctccagaggcagccccagcaggcctccctccacatagaggtggctgggccaattgcccaaacacgtgagacacacagggagctttatgtgttcatcttcctgctttagaacttgctcccggtcttggtttttctgaggaaaagcccacagtggttcccctgcccctcccatacctccctatctgccgtctgtctctttgggccctggtctgacagttttcatctgaggcctcctcgggagcaggagacttaagggttcatcccgaccttagttcacagagcctagctgggtgcatcccagccgcagggggtgagaagacacccagagatgggggacaatgctcaggtgggggcctcctccgagactctggttgagaggaaagcacatgattcaagcctaccccacaaaaaaggagcacaaaatgctcagaaatggcccttcctccctgcagtgacgtaggacaagggaaagggccacacccattttcaaaagagtggactgaggtgctctgctcaatttggggtctgctttagtgacccagacactcaagtccagatggagactccaggggggtccttctgcccctctggccagccccacccagcactccccatcaccccatgtaagtgtgtatgccagggctgagctgcctccaggctcacccactgcatctttgccccaaataggtctttgtccagtggtactttgttcatgagcagcacaggccatcttgttggacactgtcactttgggccttgccaggtctcacagaatcacatcgctgtatttattgtataatattgtgaatattggaagttttgagtgagtgctgtctagaaggttttggagtgtggatgctggtccaagaaagaagatgtgccctggcctgctggaaagattgtgaattctagagatagagccgttagcatccatctcctccctgtaactcttaggaaatgcatcaaggaccattatagaaaggatcccctgacctaaggatgaaatcgacctagggttaatcatgacagctgcatcagttgtat

SEQ ID NO: 8713 - DNA, 1098 bp, Homo sapiens
cggggccggcacatccttgtggcgtgagtgtgtgcgcgtgtcaggggctggcaggggctggcccggccagccagccagggtatgacagcagcatctgttcctgggcaatgacacgaggacctaggtcaggtgacaggtggatttcaccaggagagggagatgaggcaggatggtgggtgccaagaaagagggtcctcagcagaaggggtttactaagaaaacagcagctctgaggcggcggcaccagaggcaggaaaggactgggatgaccagggcggctgggccccaggcctctcccaagagaggatccgggacctccagctgagtgggtgtggcccccagacccagcctcttcggcggtgttctccctcacctgtgctcctcacccgggcaggtgggagaacaaggacatctacgcggcagccatccggagcctgcggctgcgggagctgcagaatgtggagtgcgtgacggccgtgcgggccggcctgggctccatcatccccctgcagctgctgaccatgctcagcccactggagatggagctgcgcacctgcggcctcccctacatcaacctcgagttcctcaaggtagacatcccagggccaggctgggcggggaggtggtgagccccaggcgtgcctccctgtcaccctcaactccagcagcaggcatcggcagtggcctgtctcagctctgtccttgccacagacctgtatcattgtcatcattgtcatctccctgtgctcacagcccacacgttgcaccctgccccaggattgggcctggcctgcagaccccagggctggggaggcactgggtaggtggggctccagggctcctgacacctggacctctcctccccaggcccacaccatgtaccaagtggggctgatggagacggaccagcacatcgagttcttctggggggccctggagatgttcacccaggaggagctgtgcaagttcatcaagtttgcctgcaaccaggagcgcatcccgttcacctgcccctgcaaagatgggggtcccgacactgcccatgtgcccccgtaccccatgaagatcgcccccccagatggcacagcaggtaccgcc

SEQ ID NO: 8714 - DNA, 1227 bp, Homo sapiens
tttttaattttaaaaattggattttttgctttcattatccagagctagctatacaaaacttttctcctgaaagacacttaaggttcctatgtaaatttcttattattgagttccaacatgactaaatgcagccattagggttatattacattgtgaagatacagaggttcaaagaaaaataaaaggtccctaggaaattacttacatatttggcagaaatattttgcatatatacatttatttcctctcttgggtcacttagttactaatttgaagatgtcaagcattcattgaatccccttaggacaaaatacatgatttttttccatcatggcaacattgagttgattccatcgatttttgctgtatataaacaaaccagaatttgaagttccttgttaatgaagggaatcatcattatcagaaaatcattttgtgtttgattgcacatggcagtatcctaagttgtagggaaagagctgcaccagcatgttttatgcccctttgaacctcacatgagagtttcctgagtgtcggtcagttacgtttatctagtgtaatccatgaccctttgtcaggagcgaagagaagtgcctggtacgcagtggccttgtgcagctcatggatcgactgtgtagcttgagcaatcagaccgagtccagctccagtgagaaacagaccaagaagcagaaggtggccaccatggcctgggctgccttccaggtgcttgccaaccgctgtgttgagtgggaaaaagaggaaggtgagatgccagactcctttctagagctcactgatttcttctattggtgtgttagtttattggtttttttatgctaaatgaaagagagaaagcctctattaaatgacatgatcagatgggttaaatcagtggatgatttcatgagagacttttcctcagtgtggttttataaaaacttacagcattacgatgagactgaatgatatccctgtaccctgaaggagtacagtaatcccaggaaattgagaagatattttttattctctccttgtcaatactgctagtagtttccaaatatatttttttaattaaaaaaaatttattagacacaaggtctgtcacccaggctagggtacagtggtgcaatcatagctcactgtaacctcaacctccctggctcaaatgataagagatcccccgaccacagcctcccaagtaggactataggcgcactcaccatgcct

SEQ ID NO: 8715 - DNA, 1164 bp, Homo sapiens
caatcttaaagatcctttacagtatcttttttttttttctgagtacctttaaatgagaattgatcaggtcttctcttggatatcaactgggcttcgcccttgaaaaaaagagggaaaaatgaaaatatatctctgcttcttgtcctggaaaaaggcaaaaaagaaaaaaaaaagcaagtataatatctgacaacaaggaaagaaaaaacccttaaatgtaggaatttttaaaatgtttctgattgccactgatatcaagcatttaaaagcctcagtgttatcatactgcatgctgtggaaaattaaagagcaatttaatgtttacattgtttttcctttccttggctgctaagctaaatcactttctctttttctgtttagaatgttagaagagaaggaagagccaggatttctcactggtttaaagattcctgccccatgggctgctggaaagactgtggaaacagtccaccccgtcagagacaactataaatttaaagaaacggtccatatcccaggagctcgctgcctgtaccttagatttgatagcagatgctcttcgcaatatgactatgacaaagtaagtaagaactgggttactattggttccacctcgagtaagctgattcttagatgcttcttatttttctttgctgctggtcaccattcttgactgatttctgtctgcagatatctctaaggagaactttcctaagataaagttcttatctttgaagggtagtgattgagggagttaaagaaacaccacctctgcagtctaagaacaatgttttaatgatatgttgaaagtgtactttgtaagctttcaggtgcttagatatatgagaggaaggaaatgttccttttcattctgcttaccccctgccctccctccgtgcttgaagttaccccagatgtgtgatgtccattcatctagaaaggtctcactgcccaattcttggggcttctcatgtatcttttgggaaaaggtggctttttagaagggtttcagaggtgctaggatctggtttatatttatttaaacatttgttctttttttgaggaagagtagtttccaacctggtggcttaacagttatgaacgaaaggaagcatcttaggggttgaagcattttcttctacttagaattgttgaattgtaacc

SEQ ID NO: 8716 - DNA, 2719 bp, Homo sapiens
taaaaagatcaagaacagacgcaagaaagtttatgtgaagacagaatttggatttggaaggcttgcaatgtggttgactaccttttgataagcaaaatttgaaaccatttaaagaccactgtattttaactcaacaatacctgcttcccaattactcatttcctcagataagaagaaatcatctctacaatgtagacaacattatattttatagaatttgtttgaaattgaggaagcagttaaattgtgcgctgtattttgcagattatggggattcaaattctagtaataggcttttttatttttatttttatacccttaaccagtttaattttttttttcctcattgttggggatgatgagaagaaatgatttgggaaaattaagtaacaacgacctagaaaagtgagaacaatctcatttaccatcatgtatccagtagtggataattcattttgatggcttctatttttggccaaatgagaattaagccagtgcctgagactgtcagaagttgacctttgcactggcattaaagagtcatagaaaaagaatcatggatatttatgaattaaggtaagaggtgtggcttttttttttttcttttttccagccgttgaccaattatagttcggctgttgactgagaagtttgtggtgggaaaacgtttgccatattttctttgcatttgaataattgtcttgtacttagaaaaaaggcgtctatgaatgaccagtgtttttggtcgccaaatgttgctgacaaacttatcccaaaactttagtggcttaaaaaaacctgcccccaactgttagtcaatctgagctgggctcagctgggctgttcttctgccagcctgcaggtggccactcatgtggtcagcaggtcggcggagagactgggatggctgggcttctctctctgcctgcagtcctgagtctctccttcttcgtgtagtctctttcagtggcctggctggcagggtagctagacctctcacatgcagctcagagctcccaagagctcaaaagcagaaatggccaggccttctgaaaacttaagtccagaattgtcacagtgtcccttctacttccctctattgatgatgatgatgatgatgatgatgatgatgatgatgatgatgatggttttttctaatcagaagaaagctggggtatgccctctacttactaaacaagtcacaagcccagctcagattcaagaaaagggtgtgaagtagaggtgcagttaagtggggggccactagtctaacagacggtcacaaccagtgccatggaaaaccaaggatattagcaaaagcagaagttgctagtgaccttgggaagccgaagctgcttacagtagctgggacaagctgaaagtcagactaagaaataaagagagggccttcaagaagcttcctgaatgatttctgctagccctgagcctatttttggaaccagcacttggggaaactgatcttgtgaggatggatgtgtttagggacacagggcttttgagagcagcaccaccccactggggcatccccagacttgggaaacgtgactctttcttaatgccactgggttttagtcaggccacagtgagaaggaacagccctaacaggcctccagccaggttgaatgagctcatttttgttgtagccaaccagtaagatttgctaatgttctacattaagtgccttctccaaagacatccctctttgcctcatatgttgaatcatccagtgcggatatttcaatgaaaatatcattggttgacttttgtgatggtaataatgctatggcatctttgccatgaagttgtggcctccttggattcttctgactttggcttctgaaaggaaggcctagatccagccctggtggtagttcctttctgaggtctctcagtcccttgagactttggggtagtttggctgccattctcactgacaaaatgtatatcagcccccacctccaccccccaatattccttgaactttgaattgcttcagaacacaggtgtggcctgaaggtattcccttattagggaagtgtcactgctgtcttctagtcaaacttgtaaagaaaaagattccagttcagtatttgcagcaagaagcttgaatgctgttctttttatcgcattgttacatcgactcattctccattttgctttggttttgtcttgacttgacttgactttgggggtaaagtctttcaccagcacacaagagtttgattgtacaaatatatcttctgcattaacatctctgcctgttgcttaagatcagttgcttttatactcagaatggaaatacctgatcttggctagttttgttataagatattgatttcatttagatttccctccacgaggtcagcaaactatcatgttcttatgtaaacttaggccaaggccagagttatcatagtccctaggttgctacggcttatcatgtgcttggtaaaaggtgatcgcaggttctcagacgagtttactttacatgagatggaatcaggcagagaggctgggatgatggagaaagctcgaggtgaagttttaaaaaaaaagttgtggaaaggaaagttccaaagaggtggtttctgaggaagtcagagcgcccagggccagagcagtcagtaatgggtgaatgaggttgtttggaaagtcggtgtgacagacacatggatgccatctacttctaggttgctgg

SEQ ID NO: 8717 - DNA, 1124 bp, Homo sapiens
cagaaataccccagccaaatctctggacaagttcattgaagactatctcttgccagacacgtgtttccgcatgcaaatcaaccatgccattgacatcatctgtgggttcctgaaggaaaggtgcttccgaggtagctcctaccctgtgtgtgtgtccaaggtggtaaaggtgagtccaggcctgcctggccaggggaggggtggctgaatgtgcaagagttgagattgagaatgagagagagagagagagagaagcaaaaacctagaacccagggtgcaaatgtgagtacagagagctgagatcttctgggatggtggtttcttatttatccacacagcatgttaaaatagattctggggtgaaatcctacatccctattattaacaagtgaccctcccccctacttcccgctgaagtttatgaaccactgtcctgggcgatgcccatttcagaaatagggaactgaatcccagctctggtaaacagtttgctaattcgtggccaggctaggggctcaccatttctgcagtgaagaatcatatgttttgaaagcaaatagcacctgctggctgcaagaccttgagcaagtcacttaactactctgtgttccaatttcctcagccataatccccaatactgttgcagtcttgccagtgcaccttaatgtagcagcttctcactgaattagtacccaaggttctttgtcctgcatccaagaaaattaaggaacatggacacaaacgtgagcttggagcaaaagttcagtaagcaaaagaagaaagctgtctccactgtggagagggaagtctgagtggattgccagattgcagctgaatgcaaaaaacttttataagaaaccactctcctccctgtaactgtttgagaaactttttatcagtaaagctgtgcaacttcccttaccttatgcagctgtgggtatatctctaggcaagcataaagcgctgcttctcttgtatgtataactgtggatttgttttaggtaagtcccactccctgcgccagtttcaggcaggccgctcctccagggcccagccttgaccatttacctaactgatttttcctctactttccctcaatacctcatagggccgtgtagattaag

SEQ ID NO: 8718 - DNA, 1098 bp, Homo sapiens
acaatgggaaaagaacacagatcctggaagaaggcccccaggtttgaattgtatttgccacctactagctgggtgatggggctgatatattatctcactgagcatccattttcccatctgtaaaatgggaactaatgataatggcatccaaatcatagcatcattgtgagcattataggagtttaagacatgcaatgccttcagaacagtggctagtgctccataatgttagtgattgctcctgtcattttatttagggaggtttgcctcactaagcatcaattattatttttgtcgtctttttcagggtggctcctcaggcaagggcaccaccctcagaggccgatctgacgctgacctggttgtcttcctcagtcctctcaccacttttcaggatcagttaaatcgccggggagagttcatccaggaaattaggagacagctggaagcctgtcaaagagagagagcattttccgtgaagtttgaggtccaggctccacgctggggcaacccccgtgcgctcagcttcgtactgagttcgctccagctcggggagggggtggagttcgatgtgctgcctgcctttgatgccctgggtgagagctcccagcttctttttctccctcttcccatttctgagcagaaatctcccacagtttgagagctttttgccccaacagggcatctctctaaagcagggtgggaggagatcttaggatctgtcccggggcaagaatgaatacggtcatgatctatcacaggagagacattaaacagcaaattggcataatgtggggacaaagacatttcttacagaacatctgcaaggcttactggttctgtttaaggcaaaatgtgtgaattttatctttctaaaatcaggcagcaaagatgtggcttaaagttcatgttactctcatctttgtcccaacatgagatctcatcaaacgtatgcagcacgttgggagatagatatttataatttgcaggaacatttggacaggaagtgtaacctctcagaggctcccttgccacatcaggagaattggtaaaaccacactacctgtatcatatcattattttaagtgataaatgatc

SEQ ID NO: 8719 - DNA, 1321 bp, Homo sapiens
agccattcaggggacctgcctggtggcagctgggatgaagagagatggcatgtcaggctggccccgaatcatagctccctgagagggccaagcagagagtactggaaacctccctaccaaaaagacagagacccgccccctcacacacaaacacacatgtcctgttgaactcatgcacgcacacccacgtgcctgtacttgcccccaggctggaagagaagagacagaaagaccccatgacccccccatgtggatccccatctgtgtctcagttgcatctgtacagccttgtctgcaaactggaggatgcggggcaagcccttaggggcctgccagggctcggggggcaaagagggactcgggaaactcagtgtaccccagatgcctcacccattccgtgtcatcacccatgtctgccacccactgattgggcaattgtgggcccatggggtggaagcccccagatgactgagcagttctacaaaagaatggccagcacgagcggggactagagggtcctgattttgtgtctgtgcctcttcatctctctggactctgatctccttctcccttcccatctccaggccttctgtctgtcccagataaaggcgctgttctcccatcctccctaccccatcctctccaccaaatcgctcccaattttgagagccaaaggctggcgcttctgacttcaggagcgaaaggaggaggcctagtttgggccgatgtattttaaagcagagtggacagcagagagtcaatttccctttcgttgggagtgggcagtggggtggctaattgtcttcggccaaccaggggcctgttgcccaggcaactcaccagctccgcctctgctgattggctgccacggtgggagtcagccaagatttaaagggatgccagcgattgctcttttcaaaacctaccagtcccactgtgggtggagaaataaatggtctttctcctcctcgcctggtcttttcctgccaagagaggggtgggtggctctgttcctgggggctgcagtcagccccgttggggagtgatggcttgcaagagaatgacttcagggtccttgcctcgggctggaaggggtgggggcggtgaagcagtggcagaccctcctagtcctagtctccaagaatgcagaggtgaaagtgcccttctctttcacaagagcacaaggcaatgcacacatctgctccctggcacaatgacaagaaacaaggaactcaggtgcagagctgggagcctcgagggaaatacggaggagctgggagacactgtgatcagctcatcaggatctcagagcttgtcagga

SEQ ID NO: 8720 - DNA, 1281 bp, Homo sapiens
aacttcttgcccacggtccaagaggtcacagctgggatttgaaccccagcggttctggccccgtgttattgaccactccatgaggctgcctaaaactttattagccacctactgtgtacagacactgggccacagcaataagcacagaacaggagtaggggcaggggaggagtctgcaagcttctgggaggaggggatcttgggagtgatcccaacagctgagctccctgaatccctgtcccagcaggtgcatcccggccccacgccccaggcacccctgcaggccgagtccgcccggaactcaagaccaagcagcagatcctgaagcagcggcgccgggcccagaagctgcacttcctgcagcgtggtggcctcaagcagctctctgcccgcaaccgccgccgcgtccaggagctgcagcagggcgccttcggccggggtgcccgctccaagaagggcaagatgcggaagaggatgtgaggaccaggacccagccccgtggctccttgattggccttagggtgggcatcagcagacgttcccgtgcaccactgtgtgcctggccctgtgctgggcactgggggcactccctgcaggagccatcatctgtgaaaaggagcactgtatggccacagaagggcagcagctgcgtcagcctaagacagagacatttgaacagggccttgaagggtgtgcaggagttcgccagcaaagccaggcaggccaagacttgagttggcaactcagctgctgctgcttccatgtgttctgggttcagaggtcatggctgcaccggtcagagccctgagtgcctcagggtttggcaatggaatttttaatgtaataaatctttattgagcactgctggtggccaggagtgcggtctacttggggaactggaatggagagacccaggtactaaaatcccagctaacgtggcagaggagttgcgggtctcctgagggtgagttctgctgccttgtccatttagcgatgaggaaagtgaagctcagagcacaaaccaggtgccagaggcgggagttggtcccccttcctcccactggacatggttgcagctgggagtgggctgggggaggggaacaggatgcccagcccagggggcaaggacacagctgctcccctctggctatgaagaggttaacgcggcccctccacacctggaggtcagaacctggcctgtcctctgtcttcttgccacccaccccctgtttgaggttctgagaaggtcaagggcagccccagcagctggattctcaggct

SEQ ID NO: 8721 - DNA, 1275 bp, Homo sapiens
aaggcagtggggcccctttccgttggtgcctgcctccctgtcagctacacctgggtctgttatctgaggacatggttcactgggtttcacttactccacacacagttaacaacactccctctgtgcagctgctggggtcaccagtgaataagaccaaaatagtaatttttaaacagttgtttttttagagagagttttgctcctttggccaggctggagtgcaatggcatgatcatggcttactgcaacctctgcctcctgggctcaagtgatccacccacctcagcctccgaagtacctgggactgtaggcacaagtcatgcctgaccatgccagctcattttttatttattttaattttttttgtagagatggtgtcttgctgtgttacccaggctagtctcgagtttctggtctcaagtgattttccagccttggtttcccgaaatgctggattacaggcgtgagccaccatgcccagtttaaatagtaatctgtaaagaacagctagcactctcatgagtgttccatgttgagactctgttctcagcactgtatatactgactcatgtgatcctcataataaggcacaaagaaggggcagttattcgtacagatgaggaaaatgaggcatagaaaagtttggtaacttgcccaaggtcacacagcttgtttgtagcagaatccggataaggcttgtgcactgaggtggcatttgcagcttccctgagagggccctctgcacacatcatctctgatcctcagacaaccctgcagagaggtgggaggtgttgtaagctccattcctccccaaactggcatcacccagcaagctgggattcagaccaagggtgccagactccagaacccgtggtcttgtctctgcacctcagtgcccgtcccccgccatggtctggcttcctttcctttctcctccaagtctccttctcactttgctaccatctttgctctgagcagctgctgacgacccagcgggtgagctgcgcccacatctacagtgccctagacccgacagcccgcaagatcaatctcgccaaattcacgcttggcaagtgctccactctcattgtgactgacctggccgcccgaggcctggacatcccgctgctggacaatgtcatcaactacagcttccccgccaagggcaaactcttcctgcaccgcgtgggtaagcagcccgtggctggccctggggcaggcaggggtgccggatcctggcagaagccgagggtacaaggcttaactcttgacact

SEQ ID NO: 8722 - DNA, 1276 bp, Homo sapiens
gaggctgcattgttgttgaggctgcattgttgtgttggccacagacggggcggggcctgtgacgggcagtgactcagcctctctcccctcattcttccacagctggagccagacggactgctggtgtgggtcctggcaggcgccctggggctcagcctcgtcttctccctggtctcagtcccattgcagtgcttccagctcagcagagtctatggcttctgcctgctcctcttctacctgaacttccttgtcgtggccctcctcactgaatttggagtgattcacctgaaaagcatgtgactgaagccgcttagtgctgtggcctcactgcaggcaggagccccgcccctcctgccgggggaggcccagggaccggagcatttctgcaaggcccttgtgggcacgagagtgcggcccttgctgctggagatctgaggtcactgctgtgagctgggagaactgctgtgtacctcttgctgccagcacccaacagccttgccgtggggaccttggaaacctggctttgctctggacaaagggttccagagagaagctagaagtcccccttgaatgacccccagagcccctctgagaagggctggagtttgggggaaggggatggctggatgtgctccaggccatgctggaggtacccccgaggcacaggcactgcccgttccccttgcctgggcttcaggccttctggcaccttctcaggacacaagtggctgcccaaccctgactcagagaatgagggtggcttggacccctgggaatcaggccgccgagggctgagctccagagccgcaccatctgccacaaacagaattcgagacatacttaattttgaatttctccttgccacgttaataaagccaaaagcagcgggtgctattcgtggcaacacacttcactgaacccacttgcttccaaaacgatgccagcccgaggcactgctacgccagcagctgccacatgggatggtggctcaggcgctccctccaggattctgcccctgcctgtccacagactcctttgtgctggaacctgggctcctccagctgccaggcaggagtcggtaggactgtgcctgtgcctccctcagcggggccctgggcggggttccaaggcctgcgagctgggaaaggacagatgaggggacctcgtgccttcttgctgtcatgcaatgaccccgccttatgttgccgaaataagcaactcttaggtttgcctgactgccttatgctggtaaagaaaagggattcaactgtctctt

SEQ ID NO: 8723 - DNA, 1170 bp, Homo sapiens
gcttagtgggctctgtaaaatgtggtgggcaagcctctctacgtctcaaactggtggcccagaggccaagtccacccctagaagtagagtttgttttgttttgttttgagggcttctgcaatcccgcccactgcccacttcccacatgtatctcacccacctgccccagaagcctgagactctgaatcttggctcaagtcccaagtcccttgcagccctggcattctggcctcaggctgggggccaggtgggactgggtaggttttcatgggttctcaggaagaagggcgtatctgatctgcacgctgaatgggcagggccttgggcccctccagcgagactgtgcagaacatggtttctccgtcagcttaactttgctgccgggaggcaggaaggcagttccttaactagagtcttccagccccttttgctgtgtccatgggttttcagtaatgttgtccccctttctcactcccaccttgcaggccaccggagccgccagctgtttggaactgagctactgcagaaagggaagtggagagtaagggccaggccccgtgggggcagatggccggcagaaggctgaatctgcgctgggcactgagtgtgctttgtgtgctgctaatggcggagacagtgtctgggactaggggctcgtctacaggagctcacattagcccccagtttccagcttcaggtgtgaaccagacccccgtggtagacgtgagtatcccggtaggaacctggggttgagtggggctgtgttcctccaatcgataaatatctattgagcatctactatgtgccaggcactgaccgcagcctgggatataccggggaacaatagagacaaaattcactactctcaagaagctgacagtctcctgaacagacagatcaagaagtaaacttatacactttgggaggccaaggcaggaggatcacttgaggccaggagctggagaccagcctggccatcgtgtcaaaaccccgtatctactaaaaatacaaaaattagctgggcatggtggcaggtgcctgtaatcatcagaaccctgaggcaggagaattgcttgaaaccgtgaggtggatgttgcagtgagccaggattgtaccactgcactccagcctgggcggcgaagcaagactctgtctcaacaacaaaaaaaa

SEQ ID NO: 8724 - DNA, 2012 bp, Homo sapiens
ggctcatgcctgtaatcccagcactttgggagcccaaggtgggcagatcacttgaggtcaggagtttgagaccagcctggccaacatggtgaaaacccgtctctactaataatacaaaaattagctaggcgtggtggcgggcgtctgtaatcccagctactcaggaggctgaggcatgagaattgcttgaacccgggaggcagaggttgcagtgagccaagatcacgtcactgcactccaacctgggtgacagagcagagactcaaaaaaaaaaaaagtgacagttcagaattgggctctggggtcaaggtcagggtgggaggctgggtgcctggattggggcaggccaggacccctgctcagctgcggctctgccctgtccccaggtgaccagcatgtcactggccaggatcctgagcctgctggcggccagcggtcccacgtgggaccaggtgcccccgttccagtggagcacctcgcccttcagcggcctgctgcacatgggccagccagacctctggaagttcgcgcctgtcaaggtttcatgggactgaagttctgtccctgctctgctgctttcgcccctgctgaccctcgtcagggtcacccccgtcccaaggccaccggacttctaactccagcccctcctgggggcttcgttctctgatctggggtctgagtcatctcctcctagagtgggtcacgaacctgatggggctcagaactgaccccctctctcccccgaggtgggtgggcaccgtggcgtctcttctgccctgccctaaatctcccactctctgtttctgtctgtttcctactgctgctctctcaacctcattcccacctctggggccccttcctcgtgcttctccttcctgagggtttgggaaggtcctggggcagactctggggctcccatggggtggaaggagcctgttccagcacccttctcccagctgcattcccacgggtggccctggagctggtgagctttgtctgggcgttgtcttcggctggcattgctcctcccagctctggcccctctgctccctcaggaagcagtcccctcgtctccctttctgggcagcttccttgaggacagaaacttgaaaacaaacacaaaccaaagtttctggccatctgtggctggagggttctgaatgtcctctctccatgtcaggcagagggtcagcccccatgcttctgcctcaggccccaccccaccccaccccaggcctgcccctcacctcagggccatacccacagcgccctgatggaggaaccagaccgcaggctgtgccaccattaaacaagagcggctgtggccccatgctgtgcttcttggggtggcagggaaggtggggtcagcgctttttctcctctcaggtttgggttctgcgccatcccccatgcagcctcctgtgcagccctctgtctgtccttctgtccattcattcatctgccaacatactcacccatcatccatctgcacagccttccacccacccatccgtcttccatcatccatccatccatctacctatccatttatcatccatccactcacccatccaaccacccatccaaccattcagccatctccatctgtccattttctttcttcttcttttttttttgtttttgttttttctgagtgggagtttcactctattgcccaggctggagtgcaatggcataatctctgctcactgcaacctctgcttcctgggttcaagcgattctcctgccttagcttcccaagtagctggggttacaggcatgagccaccatgcctggctaattttgtatttttagtagagacagggtttcaccatgttggccaggctggtctcgaactcctggcctcaagtgatccgcccgtcttggcctcccaaagtgcttggattacagatgtgagcccccgcacctggcctcatttgtccattttccatccacttacccacccacccatttactcatccagccattgactcatccatccacctatgaga

SEQ ID NO: 8725 - DNA, 1200 bp, Homo sapiens
agttccaacatttatgtccagagcaacttccagcaaggctggtctgggtctctgcccaccaggcggggaggtgttcaaagacatctccctcagtgcggatttatatatatatttttccttcactgtgtcaagtggaaacaaaaacaaaatctttcaaaaaaaaaatcgggacaagtgaacacattaacatgattctgtttgtgcagattaaaaactttatagggacttgcattatcggttctcaataaattactgagcagctttgtttggggagggaagtccctaccatccttgtttagtctatattaagaaaatctgtgtctttttaatattcttgtgatgttttcagagccgctgtaggtctcttcttgcatgtccacagtaatgtatttgtggtttttattttgaacgcttgcttttagagagaaaacaatatagccccctacccttttcccaatcctttgccctcaaatcagtgacccaagggagggggggatttaaagggaaggagtgggcaaaacacataaaatgaatttattatatctaagctctgtagcaggattcatgtcgttctttgacagttctttctctttcctgtatatgcaataacaaggttttaaaaaaataataaagaagtgagactattagacaaagtatttatgtaattatttgataactcttgtaaataggtggaatatgaatgcttggaaaattaaactttaatttattgacattgtacatagctctgtgtaaatagaattgcaactgtcaggttttgtgttcttgttttcctttagttgggtttatttccaggtcacagaattgctgttaacactagaaaacacacttcctgcaccaacaccaataccctttcaaaagagttgtctgcaacatttttgttttcttttttaatgtccaaaagtgggggaaagtgctatttcctattttcaccaaaattggggaaggagtgccactttccagctccacttcaaattccttaaaatataactgagattgctgtggggagggaggagggcagaggctgcggtttgactttttaatttttcttttgttatttgtatttgctagtctctgatttcctcaaaacgaagtggaatttactactgttgtcagtatcggtgttttgaattggtgcctgcctatagagatatattcacagttcaaaagtcaggtgctgag

SEQ ID NO: 8726 - DNA, 2090 bp, Homo sapiens
agtccatatctagaaggaaggaggaacatgagacaaaggatgagggaaagagcctggggcaagttaaggaatgcctttgagacctccttcctgctaagatctggaatgtattagaatctgagaaccagccttccctcttgaggctcacgcccctgctctgtgtgttctctttggcaggtttgttttggagcagtacaacgctctgtcctggctcacgtgcaatccggccacccaggaccgtacttcctgccttcccgtccactttgtggtgctcactcagttgtacaatgccatcatgaatatactttaattggaaaagcacttgttctctctggctcagttccttctccctgcaacctcagtccaaggaacctgctacactctgcaaataacccacatccttttcttcagaccactctccacagtcctgcactgtgattccttctcagcaggcacatgtcaattctgcagtgttcattaccagagtgactccttgacacttctctcatggacctggaaacttccataagtggtgactttcagccagtgcggtggtgtgtgtagccccaaccactggtccccaggaagtggtggtggttgatggcttttcagcgggaaacagaagagacagtgtccttttgcacaagagtctgtgttttcagcctctgtatacaattgagggcagtctagccctttggatgaaatcctcttagttactggtgtatggcctgtgggttacctgaactccataatctgggactttttaaaaataagaaccagctcaagtacatggtttcatactggggtttctgtctccctagtgttcccatccagattagcatgagtgctttggttgacttcaaacctgtgtgtcaatgcagaaggtctggagacagcttcattttgtttatttattttaatttgttttgtcatatggtttttgtgactttatttttttaattcacaaggaccaggtacagtagctgaaacccaattcagatccaccataggattctttgactacatacctctgtcctagaagccggaaaaggagtaaaaacacattggggagatcatgcctaaaagtaatatattcaaaaccacccagcagtaggttttgttaacaacaaactggattttaaaagttctgccatgttaagtggccagcatttcatgaaggataacatttttatacagaaggcagtcaagctcaactcagagccatggaggcaagtaccttaattagttttatatagtcacaacggaaatatattttctagtgaattcttattggaagccaggtctctcctctcattagatcaaaagggacttatgtacatacaacaattgaaagtgtttgctcatgaaatcagttataaatatggtgaattttttctggaccataggaatattatttcaaagaaatattacaacttaaccattaaattagtacttgaagttgagcctttgtggtgggactttttaaaaaaatgcctttttaaagcattaatggctaattgaagtattttatgactcctcattcctggcccagagggttgtctttgaaaccctgtttctaacccttgtgttgtgtgtttctgtctgaggacagtgggtgtgtactggcctcccgggagccactgtgaccaggcctttgagctcttgtcatctgtggagagaatcatgcaaattttaaaagttcttccaagagacttccatgtcctggttattaacaaaaaaggaaaaatgtaataattgatatgattttgtaaaagtatttttcttgaaataatctaaagtttaaaacattatattaaaaaaaaagttgtgtggtgggaatgtgaaagcagagaaataacttgtaaatggataattttgttctctgtaccaccagttgaagggggggttgactttcgcaatgtataggataaaaaatctgatatatcaaaccatttgtatctaatgtgtacagtgtaaaattgactttaaaaatattgcagtgctattttttcttaatcagaaaggaaaattctcaaggccttttgaagagcataagaagatgaagattgtaaacttgtataaaattatct

SEQ ID NO: 8727 - DNA, 1096 bp, Homo sapiens
tcccatgatgactgtggaatatatagcttctcattttttagggcaggcacatggaatcagtctgaaaggagactatcacaagtgattgattttctcttttcaaacaagcctctactgtagaatttataagttgctccatgtgcatctccatgtttgcagaatacataagcatgactgtggagatagtattttgggtattgtaatcagagtattgcagcctgaaagcataatgtttttacaagtgaccattctagattctggttcagtccgacactgcagaatatcactaaagtcacctctttgcatgtattctttcagcaccttatttagccactctgcagcttgatagcagcctattgataccacctaaataccagaccccaccagcagcagcacagggacaagctacgccagggaatgctgggcccttagctccaaatggatcagcagctcccccagctggcagtgcatttaatcccacctcgaatagtagttctacaaatcctgcagcaagtagttctgcatctggttcctctgtgccaccggtctcatcgtctgcctctgctcctggtattagccagataagcactacctcttcttcaggattcagtggtagtgttggagggcagaaccccagcactgggggcatttctgcggatagaacgcaagggaacataggctgtggtggagacactgaccctgggcagagctcttctcagccctcacaggatggacaagagaggtatgttattcactaattgagatgagtggcttcagctcagaccctttctctcttcttcttctgcaccttttctcccttgacctcatgattctgtgaatcctatgaagtgctctatttctcttctcaaaagaaaggggcaatggtcgatctaaagctgcagtgttaaaaatttgagacttcttataaattattatgaattataaactttattattaaacttacttactatcaacttaattagtaacaactttgtacaacataaccacagaaaagaaaggggagttgaaaaagatacctcccattttagaggagtacattgccattttccatctgccctcgatgctctctggcttg

SEQ ID NO: 8728 - DNA, 1532 bp, Homo sapiens
cagtgatagcagaaacaaatgataagaaatacacagtacatggctggggtgatcatgtgtctagttcagcatctgtgacatgctgcccttcctcacttggtgccttctctttttgtagtaacgtgcctagtgttgggagcctagcagatccagactatctgaacacaccacagatgaacacacccgtgacgttgaacagcgctgccccagccagcaatagtggggcaggagtcctaccatctccagcaacccctcgcttctctgtccccacaccacgaacccccaggaccccaagaactcccagaggtgggggcactgccagtggtcaagggtctgttaagtatgatagcaccgatcaaggatcaccagcctccaccccctctactacacggcccctcaactctgtggagcccgccaccatgcagccaattcccgaagcccacagcctctatgttaccctgattctctccgattccgtgatgaatatctttaaagacagaaactttgacagctgttgcatctgtgcctgcaacatgaacatcaaaggggcggatgtcgggctttacatccccgattcttccaatgaggaccagtaccgctgtacctgtgggtttagtgcgattatgaaccgcaaacttggctacaattcaggactcttccttgaagatgagttggatatttttgggaagaattctgatattggtcaggctgcagagaggcgcttaatgatgtgtcagtccaccttccttcctcaggtggaaggaaccaaaaaaccccaggagccacccataagccttctcctcctcctccagaatcaacacacacaaccttttgcttcactgaatttcctggactacatttcctctaacaatcgccaaactcttccctgtgtaagctggagttatgaccgggtgcaagcagataataatgattactggacggaatgctttaatgcgttggagcaggggcggcagtatgtggataaccccactggtggaaaagtggacgaagctctggtgagaagtgccactgtgcactcttggcctcacagcaatggtaggtgtcccagaacacaaatttactttgaggagtatcttggtatgatcataacttaaaagctttctttactgtatttgacaaaaaattttaatttcatgtctttcgggggaaaaaaaagaacctaaagtgagagctgtattgattttatcctaaacttatggactgggagaatgttttatattgaaatgcctttggagaagagtaattgttttctgaaattttcctcttgtaactcataagtaagcagtctatgttgggaacctgtgaccgctgagtatcagagtcgtcaggagcttacagactgataatttgcacactcttgcatgcttaaatccaccattcttccagatcaagtttccaaggaacctcttccatgaagccttctagccatttccagagtctcttctcccttctctgttttccccctttgttgtatcacttataacaaaatcacattttactttgcattgtgg

SEQ ID NO: 8729 - DNA, 1204 bp, Homo sapiens
ctccaccatctttggaacagcatcctgcattttctcctgtgatgaattataaagatgggatcagctcagagacagtgacagcattaggcatgatggagagccctatggtcagtatggtttcaacacaactcacagaattcaaaatggaagtggaagatggattaggaagtcccaagcccgaggaaattaaggtagttgtcaatatattaacatttccagggcagagcagtttccaagtggattcacatacatctgctttaaaatggtattgtctgtgtgccatatatacataagttcctaagaatccttttaattagaacatgaggcacaccagcaggcatattaaatagtgtcttttgattgatttaacatttctgcattagcattttctaatgatcataggagagaaatactgaaatacgatcattttggttgctgtttttatgatagcactatgccactgtggtgtgttctacagagtttaccaatattaacactgaccccactttgttgtcacaggacttttcatatgtgcacaaagttccatcctttcaaccttttgtgggatcctccatgtttgctccactgaagatgttgccgagccattgtttgctacctctgaagatacctgatgcctgtctgtttcggccttcatgggcaattcctcctaaaattgaacaactgcccatgccccctgcagccactttcattagagatggctacaagtatgtatagggattgtgtcatttacttgccatatttgatgcaatttttatcttaactaaatgtttgttaaaaatgatgacaaggtccgggcgcggtggctcatgcctgtaatcccagcactttgggaggtggaggcgggcagatcacttgaggtcaggagtttgagaccagcctggccaacatggtgaaaccccgtctctactaaaaatacaaaaaattagctgggcttggtggcaggagtctgtaatcctagctactcgggaggctgaggcaggagaatcgcttgaacccgggaggtggaggttgcagtgagccaagatcgcgccactgccctccagcctgggcgacagagtgagactctgtctcagaaagaaaaaaaagaaagaaaaaatgatgacaagtagcatatcatttgaaactttcctttattggtcgttcatgtttttgtgcaaattattttgtgctggaaaatgtgcat

SEQ ID NO: 8730 - DNA, 1195 bp, Homo sapiens
tcatatttcacactttgggttggtgttcatgtgttttgtttggctgaatttattatacagtcagaggatggatttggtaccaaggatgtcactacaccaggtcattccacgccggtgcctgatgggaaaaatgccatgtctattttcagttctgctactaaaacaggtgtgtacaatgattatttgcctcacttggattgttgctaaaatgaaatgcaaaggagatgcttctcaatgtaaaattttattcttattgtaataagaatttcatctcatctttaatatatttttcatagtttgtttttcagttcctttcaaaactgataaacatatttggaaataattgtctctaaatttaactaaaaccatagggaaaaactcacaggcaggtcatgttcattgagatccgtgtcctctccctactcctttgcgcttggtggagttgtttattctgtgtcttttgcctcctttcctacagatgtccggcaggataatgctgctggcagagctggctccagtagccttacacaggtaacagatttggcaccttccctgcatgacttagacaacatctttgataattctgatgacgacgaacttggggtgagtttgccgtagctacataaacaaaaatttcgctacatgaaaggactttatatcagtgttgtagtatttctttatagtttggtgtcctgaatttgggggctcttatttcaggttctgaatgttctttataaatgtctgtatactggaatctagtcatgctgtataaaaaaagtttgtatacttggaaaagattgtaaaggttattagtgtagtgtatccacctcgagttttgttcattgaaggatctttttcattagtgtattccagttgtacatattaaaatctctcacatttattgtaataaattcttctaaatatcacaggactactagaaatgtattacattgtcccttaggtttgatttttaaagtaatgcccacataactttttattcatctaataagtcagaggttaggtatgcaaatatgatttatactttttaagatcatggcatcattgtaggggaatagaatttatatacatagaagttaaatactacaaggcagcatacaattaaaatgacagagaagaataattattataattctttggagatcagcagaactaagagtcaggaaatgtgtgtcct

SEQ ID NO: 8731 - DNA, 1210 bp, Homo sapiens
aaattcaggaaataaatttgatgttctgggaagatgtaatttcctgacagtctctaaaatcatgtcctttagaccttcaaaacatgtaaagacatttgtgtaaatctcacacttttggaatttttttcctcttgattttccctctaaaaaacattttataactttgctattaatttgtgacattctttttacctttcaatagaactttaacaaaattagtctttgcgatactcttaaatagattaatttgagaattttaaatgattttaaactttgaagaagcagattgtaaagacatttatgggaggagtgttacaccatgcctcatatttcagactttaaaaccaagacacattacttttttttgtacgtaagtattttctaactttgggcaaatacttaaattccactctctgtttcagcgtgagattatttaagtcatttaaattaactcatgaactttgctttagaaaaatgttttaaaagtttctttttatttggatgtcctttttactggttctttttttttcttttttcttttttttttcagttgtggaagaaggactctgggaaaatggcctttcctatgaatgtaggacgctgctcttcaaagcgatccacaatctgttagaaaggtaagagaaggaacagcagacagtggtttgcagacaaccaagtatattgctagataccgagagtttcctgtaattttcaaaaacttttcacttgcaatgatttattgctagtatgaaaattacataaatctttagtttctctttctattgatataatttgaaatttagggaagttttgggaatggtacaaagaactcccatattccctgcccttcaacggtagtttttatttttaaaatttattccctaaatcatttgcatatttgtaaactcaagattgatgttcttttttacccttaagtatttggtgtatgtttcctaaggacaaaggtatattagcacagtatcatgataaaaattaggaaatgtaacattgataaaatgccattatctaacccgtagttcaattcagatgtcattggttgtcccagttacatccattatagcttaacctcctaagattaatccatgatcatacattgtatttagttttcatgtctctttaaatccagaacagttctttagccttttttttctttcttgacattgatatttttgatgagttcaaaccttat

SEQ ID NO: 8732 - DNA, 1381 bp, Homo sapiens
gttaaaaaacatgaataaattgctgataactttgtatcagttttcttaattgcttctacctaaatagacttttggcattcatgatgaaacactctcgtacttcatgctaactgcttccctaattaaaaaaggacttaaactgtggcttgtggatgggaagaaattatttgaaagaaattatttcatatatacaaacttatttttaaaatcttacttgatttctaaatataatttgtgagttgaatattgaatgataacatagaaaatagttttctgcatagagactttatagtaagtgtttagacaaattaaattattcaacaggaaataatgattatcagcttgttttattttagtatttaatgtaaagagctatgtagaaatcttgatagaaagtttctcccaccttaaaattcgagaagattgacatacattcttcactgggaggaatcttatgatatgaagtttcgtgtaaatatttattttagcacaattgcttttctgtatggaagactgtttttagtggtctgtaagtaaaatgagaaaacgattacaattttttgtctttttccaggctgaactcacgggaatcaaatggcgtaggtacaattttggagggcatggggactgtggacccataatttcagccccagcccaagatgatccaattctgttaagtttcatccgctgtctgcaagctaacctgctttgtgtatggcgtcgtgatgtcaaaccagattgcaaagagttatggatattctggtggggagatgaacccaacctagtgggtgtaatacatcatgaactgcagggtaaggtttctgtttttttcttaaaaattatttgcatcatatttttttgaacattgataaatttcaaacagattattaagacttgtctaaaagaacgatcttaagtgtttcatggatgtctctctcaaaaggaacattctcacccctcttcctcccatccctgtttttttttcctaactcttgtccttttccagttatgctgagaatcagaaccttgtgaaccgctgctgttaaatgagagtattgtgtctcctgggtgcggtggggtggaaaccaggctaagatccactgtttttaaatgatagtgaattgtgagtaactaacaagacagtgaattgaacagttactgtttttttccttggactgtggttgttatggttcactgccagctgaactctttggtggaaaattggagagtgatacagaaatttagttttgagcctaattggacaaaattgtgagattacattgaatagtattttgaggaaagatgaatatatgggatctggtctgaattgggtgtagcaaattttcttttgcttttatttctgtttttcatgtaatttggt

SEQ ID NO: 8733 - DNA, 1124 bp, Homo sapiens
attgacaagagcactgaccttaatgaccttgagtaaattaccctctccggctttggtttcctcatttgtcaattaagggtgatggctagcgtatcttgcagatccaaattccaatttttgtaacaagccaaaagtccccctggctgttaaagcaagaccagagccctcgtatcccagcggctgggtcccaggcttttgattttcacaggacaaatgtagcccagccatctggagcccgtttttctccaaaccagggcttcctccttctctcttgcagatttcaactggggctcaccattttctgcctcttcctcctccagttttaaagagacaccatatccttctctgctgggaccaacttcccatgtactgctgccctgcacctgtgaaaacagctgctgtgttttctgtcataaaaatagctgccttttggcagagaagcacacaacggtactacgtttctgagccttaatgcagtgctcaattatttaggtgtgcttcacctgagatacacagagcatcttggaactcctactaagcagggcttctacaggcattgctcagctcagtaaaaggttttcctttctctgcttttgtgattaccaggcagaaaccttaaaatgtatgaacttacaaagaaattaaattgtgccaaattagattcccagcccctagagataaccactaattaaagttccgctggagcgttttgcctgtattttgtatataaacgtggattttgtatttgtatgtaaataaaggtaggaccctgctgtccatattattttaaaataattagctcctgttagattgatttaatccaatgatagcgaattcatttgcagagcaggcaagcgcactttccacttctatcatcctgcctggaagattgaagcccagttagaggttaaaaccctttcataattgcacaggagtttagctttgcctgctttttccttgtctgattttatgcagtggggaaggaagtctttttgttctgcacaaataaattataggcatttgtcgcggccggagttgacctgcattagggatgctgaagaaacctgtcacggcagggtgtctctcggcgtgactcgactttcctgagagagcagagatcggga

SEQ ID NO: 8734 - DNA, 1124 bp, Homo sapiens
cttttcccgcctgtgacgtaaattcagatgagaactcatgctggctcatctgcaagcttcctgatgctttgcgagctttcccattcattccaaatcagaagcagtcagtggccccgtggtttccagacggctttctctttgttaagaaattagaatacctgatttccctgcgttttccttgtggcctgagtgtgcaccttggcttgaggaattcgctggatttccttctctcttcctttgcatttctttttggcactcttaatagccatgtccctatactatcagtaacctgaaaaagatcaggaaattaagtggcagaacatcttcacgggagctcagtgataaggatcatgccctccacgatggtgaaatgaaagtatttgatgtcggcctggtgtgtggaattgtgggcccacacatttctcttcctctctcagatcctggtgtatagcctggaagcaggacgccgcctcttgaagctgggtaacgttctccgtgacttcacgtgtgtcaacctcagcgacagccctcccaacctcatggtcagtggcaacatggacgggaggtacgtgagttggaagggcattgccttgcagccccatggcttctgccaaggcccggcccccactgcgctgctcacactgcccggttctcactcaacagctctgcccacctgagttcagccccgatcccataaacactctagactcagagaacaaagtcctgtattaggtaatagttggatgtagctatgtctctgcttcatttctgaagcaccacgggaaggttttcttttaagccatttggtggccgcagttggtagaaggtccagggagaccacttggaatatcttttgtcccctgctgcaaaatttgtttggcacttgaaagctcactttctaatattaaaaacagtaacctaagggatgaatcatgttcagcaaaatagggtttcctgccaaacgatgtcaagagtgtatttcagaacacggtggtgtccctctggtgatggaaggaaagagagacttcatgtgaacagattccactttctatttagctgattagcagccttctctttaatgcactggcttagggagtcggattttcccggtataggggcctgtg

SEQ ID NO: 8735 - DNA, 1153 bp, Homo sapiens
cctagttactttgctctcaacatttaaaataatgcagttgctctagtgaatggggcgttaggggcctgtctctgcacctgtctgtccatctgcatgcagtattctcacccatgttgaatgcctgctgcttgtttaccctttggaaaccctggggtgaccaaggtttggaaagccacctgagaccacttcatagcaagggaaggctttaagcagttactagaaagagatggggatttggcccctggctcctccagcctgaatgagctatttaatccactgtccatgttcctcatcagtcaaatccaaagtcaaaggatttgaacctgcatctggaaacgtaaccactcacagcacctggcccgccaaggttgggaggattgtacactactttcatttaaaggggaaagtttgataatacggaattaattaatatgaatgagatgcattaataagaacctgagcatgctgagagttgcaattgttggttttctggtttgattgatttccttttttcttagacacatcaaagtcaagaaagatggttttacctttactgacccagctgtacatatgtatctagactgtttttaaatgtctttcttcatgaatgcttcatggggctccaggaagcctgtatcacctgtgtaagttggtatttgggcactttatatttttctaaaaacgtgttttggatcctgtactctaataaatcataagtttctttttaaaaattttccaaaacttttctccattttaaaaagccctgttataaacgttgaactttcacaatgttaaaatgttaaatatttggatatagcaacttcttttctcttcaaatgaatgccaagatttttttgtacaatgattaataaatggaacttatccagagaaaccacgcaaatggcctgcccaatttcgtttgaggacagaaagcccagccatgacttgagtagaatgtctctcacctctcttcggatctaaatatgaaaagtatgttctgctgaatttttctgagcattggtgagcggacagcctacctgtaaaccatgacctccttgccaaacgttaattttatcagctcactagtaacctttgagaattatctggttgtcatgcaaagattgcactttctgaattatgttaaaacacatgt

SEQ ID NO: 8736 - DNA, 1181 bp, Homo sapiens
agggtaaggcttgaagcagcttcactcacagatgggagaaaagcttaggccttggcattgaagatgcaggaattttcaagtggtcatgatagtgatagctcttgtgctgtgaaatgaaaggctaggaatggtgacacaaagcctttttggaaatgcatttggggctgggtgtggtggctcatgcctataatcccagcacttttggaggctgaggcggtagatcacttgaggtcaggagttcaagaccagcctggccaacatggcgaaaccccgtctctactaaaaatacaaaaattagccgggcgtggtggtgggtgcctgtagttccagctactcgggaggctgaggcatgagaattgcttgaacccgggaggcagaggttgcagtgagccgaggtcatgccactgtactctagcctgggtgacagagggagattccatcttaaaaaaaaaaaaaaagaaagaaagaaaaagaaaacgcagttggctttattctctactagaaggagttacaactctatctttcagaaagcccttactgaagatgaaacaaagaaaaataaagaattggagtccaacacgtgcagcttcaagttgaaagagaaacagttgtgttgggattaaaagccttactttaaaaagtctcttgcccgggtttggattcaaaattctctgcagtatgtttgttctggaacttgttccctttgccttaactgctcctctagatattacagagttgaaaactctgaaggggttggcactgcatgatatcctgacagagatacacttgtttgtgcatagaggtaacttacattatcccccagctgagaagctgtggagaaggtagcctgctttggggttaaggatggttaggacaggaggcttcattcttgaagcaaagaaactaatgaattgtaaatcagacccttcttgttagcagttctgtcttgccactgtttaaaattttgttccagagctgggtacggtggctcaagcctgtaatcctagcactttgggaggccaaagcaggcagatcacctgaggtcaggagttgaagaccagcctgggcaacatggtgaaaccccgtctctactaaaaatacaaaaaattagcctggcatggtggcgcacgcctgtaatcccagctacgtgggaggctgaggtgggagaatcatttgaacct

SEQ ID NO: 8737 - DNA, 1558 bp, Homo sapiens
atgaaagagttcctcacatacaggactttttaagcaacaccacatcttgtgcttctttgtagcagggtaaatcgtcctgtcaaagggagttgctggaataatgggccaaacatctggtcttgcattgaaatagcatttctttgggattgtgaatagaatgtagcaaaaccagattccagtgtactagtcatggatctttctctccctggcatgtgaaagtcagtcttagaggaagagattccacttgcacggcaacagagccttacgttaaattttcagtccagttatgaacagcaagtgttgaactctttctgcttgttttgattcaaagtgcagttactgatgttgttttgattatgcaactaagtaggcctccagagcctctctagtggcagagcagctcacactccctccgctgggaacgatggcttctgcctagtacctatccttgtgtttctgatgcagtggtagcattggttcaagttctctcctgctgtggtcagagttgcttcgatgttggccaagtgcttttcttcttgggctcccttctgacctgcaggacagttttcctggagccatttggtatgaggtattaatttagcttaactaaattacaggggactcagaggccgtgctcctgaccgatccagacactattactggctttttttttttttttttaacaatggtgtgcatgtgcaggaaatgacaaatttgtatgtcagattatacaaggatgtattcttaaaccgcatgactattcagatggctactgagttatcagtggccatttattagcatcatatttatttgtattttctcaacagatgttaaggtacaactgtgtttttctcgattatctaaaaaccatagtacttaaattgaacagttgcaaagatgtcttaattgtgtaaagaattggtgtagtcatgactttagctgatactcttatgtacgagatctgtctctgctgtttaacttcattggattaatcagctggtttcaactctactgcgaaacaaaaatagctccttaaaagtactgttctccttcagtggcatgtagttatctaatcaagacacctcattcaaacaaaacctgccttaggaaaatttaatatattttaaattattttaaaagaaatacaacatcttattctttagctttcttaatcggtgctttatggaggccagtgtaacgttacatgactcgttgagaaagttgaggaatttcctctaccacctttgttgcttgaagaaaaacatgtcttttcaaaatgagaggctttcattgaagaaaagaaaaaaacaacagttaaaagcttttggctctctgtttcatttttttccattaagaaaaaaaaaagtccccttttaaaacaagcagggctgggtgtgacggcacatgcctgtaatcccagcactttgggaggctgaggtgggaggactgcttgagcccaggagttcaagatcagcctgggcaacagagtgagataagacccaatctttatttaaaaaataaataaataaatagccaaaaaaacttagtgtggtgctgg

SEQ ID NO: 8738 - DNA, 1158 bp, Homo sapiens
ccaaatacctgtctggaccctcggtgtcctccttgtaaatggtgtggtctgggtgcctccatgttgaaacattcgataaaaatggatgatgtccccatctcaagtgctgggctgtgtgtacatcttccctctgcctctccccacaggcctccaccgctatgtctggctggtttacgagcaggacaggccgctaaagtgtgacgagcccatcctcagcaaccgatctggagaccaccgtggcaaattcaaggtggcgtccttccgtaaaaagtatgagctcagggccccggtggctggcacgtgttaccaggccgagtgggatgactatgtgcccaaactgtacgagcagctgtctgggaagtagggggttagcttggggacctgaactgtcctggaggccccaagccatgttccccagttcagtgttgcatgtataatagatttctcctcttcctgccccccttggcatgggtgagacctgaccagtcagatggtagttgagggtgacttttcctgctgcctggcctttataattttactcactcactctgatttatgttttgatcaaatttgaacttcattttggggggtattttggtactgtgatggggtcatcaaattattaatctgaaaatagcaacccagaatgtaaaaaagaaaaaactggggggaaaaagaccaggtctacagtgatagagcaaagcatcaaagaatctttaagggaggtttaaaaaaaaaaaaaaaaaaaaagattggttgcctctgcctttgtgatcctgagtccagaatggtacacaatgtgattttatggtgatgtcactcacctagacaaccagaggctggcattgaggctaacctccaacacagtgcatctcagatgcctcagtaggcatcagtatgtcactctggtccctttaaagagcaatcctggaagaagcaggagggagggtggctttgctgttgttgggacatggcaatctagaccggtagcagcgctcgctgacagcttgggaggaaacctgagatctgtgttttttaaattgatcgttcttcatgggggtaagaaaagctggtctggagttgctgaatgttgcattaattgtgctgtttgcttgtagttgaataaaaatagaaacctgaatgaaggaactgagtccc

SEQ ID NO: 8739 - DNA, 1816 bp, Homo sapiens
gttcaaagatgcttcactttttgataggctaaatagacatctccactcccattttaatgtatagtttatctatattcttttctggatacatgtaaagattgtaatataaaaaatgattagggtttaatatatcaaaccaaacaaaaaatgtcatattcccaaatgacccattctggcttcaccttgtaaactgtccatcaatggagaaccagttaaataaataaatatgatatgaccatataataaaataaccacttaaggaatgaggtaatctatgtgcaatgcaatatgaaaagatgttaaaaatgttttggtcaaaaacaagctataaagtagaatccaatttttgcaaaatagtaataatgtgagtatacgtgtagaaaaaattataaaagaattgcttcttttccgagaaaacaacaaatggcggatgacgccggtgcagcgggggggcacggaggccctggtggccctgggatggggaaccgcggtggcttccgcggaggtttcggcagtggcatccggggccggggtcgcggccgtggacggggccggggccgaggccgcggagctcgcggaggcaaggccgaggataaggagtggatgcccgtcaccaagttgggccgcttggtcaaggacatgaagatcaagtccctggaggagatctatctcttctccctgcccattaaggaatcagagatcattgatttcttcctgggggcctctctcaaggatgaggttttgaagattatgccagtgcagaagcagacccgtgccagccagcgcaccaggttcaaggcgtttgttgctatcggggactacaatggccacgtcggtctgggtgttaagtgctccaaggaggtggccaccgccatccgtggggccatcatcctggccaagctctccattgtccccgtgcgcagaggctactgggggaacaagatcggcaagccccacactgtcccttgcaaggtgacaggccgctgcggctctgtgctggtgcgcctcatccctgcacccaggggcactggcatcgtctccgcacctgtgcctaagaagctgctcatgatggctggtatcgatgactgctacacctcagcccggggctgcactgccaccctgggcaacttcgccaaggccacctttgatgccatttctaagacctacagctacctgacccccgacctctggaaggagactgtatttaccaagtctccctatcaggaattcactgaccacctcgttaagacccacaccagagtctccgtgcagcggactcaggatccagctgtggctacaacatagggtttttatacaagaaaaataaagtgaattaagcgtgaaaaaaaaattataaaagaatttataccagaatatatatcagtgataatccctggagcagtgctatctgatagaactttctttgatgatgggacagttctatttctagattgtccaaaagagtaacatgtgaaatgtggctagtgtgactgagaaaataaattttaaattttaatagttaacgtgcctacttgctattgtattgaacagtacagcagaaagtaagattaatcctaagggggactttggttttcaggattacttatattttataataagactgtattacatatatacatgcctacatttatgtatgtatatatgtgtattttttatctatagaggttgccttgtctcataattatgtctacttgtcttctccatactccaaatgtaacagttcattgaaagtacatatgaaaaccattaataattcaagtaatagtcttttcctctcaacttactcaagatatac

SEQ ID NO: 8740 - DNA, 1954 bp, Homo sapiens
agcaaggaaaatacttccaaatttgaaagtttgtgtttatgaatagatgtctcttgagtgttgataacacagtaatcaaaccaaatttaaaagcatctttaagatcaaggcagaaatggaacccaagattgctgtgctttccattttcgtaatcacaggtgtgagagagatggctgagaaacgagttcaaggctgatgcctgttcccagcggcatgcctttagatggcccgaggtcaggggtgcttatgaagccctcacaagttgagacagtttattccagcaagaggctaccagccttctgcttgcatctcactcgtgcagatattttgatggtgtaggagatttgctcttctgtatttaacttttcatcttgttccctttcctctcccctgcagatctgggtgaggaagacaagtgacagcaccaagatgaggatctacctgggccagcttcagcgcgggctcttcgtgatccgccggcgctcagctgcttgactttctacagtgctcttctcttgaccctttttctggagtgggttttatttttgttttgtttcgttttctccttaatagaaaaatgttaacttactgggaatagctactcagccttggaaatggagagcactgcagtgaattctttagggcacttttgtggccggatgcttccaactttgtcagtcttttctgcctcaacttcttccagacatcagtcaccatgagactgttttactttcaggcgtattggggggtttgatttactttccttttatttctttattttttgcttatacttgtttttgaaaacctcctctgagtttgaagggacagctatttttattgattatctttaagtctctctaccatggagaagagcaggaagggatacactctccagtgcattttcatgttttgaatctgattagtggatcacgtagctactttccctgtcgcgtccaattcactatttgcccagaagcttggggcagaggtcctagcaggagatgatgaattctcgtggctctcggccttctcagagaaataaatgctttgtgtaacatctgtgcacaccatccattccgctcgctgagcgatggaaaagcttgcctggaagactatgtgcactgaagtaaatggggttgggggaggggacatttcatatttataatgtgctgaaggtaccatattttaaatgttatttaatgcaggtgatttattcaaacatttgttctagcttaagctggaataagcagtggtcatttcagaagttttcatttgtaattccttcctctcccttgttcccaagtaggtagtagtaagtatgtgccacaggctgattatctgggtaatcttttacgggtgggaggtgagattgatagtgcaataatcagtgatctatagaccctcatgcacgattcaagtttcactcttgtggctgatgccattattgcacattggccattccaaacctgtggagaactttgttgtcaggccctgagcgctcacagcttcatttggcccaggttgaagacaaggaaagctctgctgtggctgcctctggactgacaccctccctaatgagtcctgatgaaacagcctttcctacatccttccctcactcccatgattggagaaatgattcattgggtgatgagtgttggggttttctatactcatgttgccatcttgagatgttcaaaaaatttggggttagagcaactgttagcgtctctatgagcaatcagtagaacttacacatcctaggaaatctttctttgtaagtaattcttttggtctcaagtgattctcttcatgttgtctcttgatgtacatacccccaagcaagttggggggactgtgatgacaattaaatcaccttctctgaagttctggctctgcagagaccaaaccttactgacttgtacagacttgtacaagtaaagacttatacagatag

SEQ ID NO: 8741 - DNA, 1241 bp, Homo sapiens
ttaagcaatattaacaacaataaatgaataaaatcgtgtgtttctcctaggcttcctgcagaggtggatcctgtgacagtatttgcctcactttccccagagggtctgctgatcatcgaagctccccaggtccctccttactcaacatttggagagagcagtttcaacaacgagcttccccaggacagccaggaagtcacctgtacctgagatgccagtactggcccatccttgttttgtccccaaccctagggcttctctgattccaggatacattactttagctgaactcagatttagtgcaagtaaaatgttagagggtgcgggggtgaggactgaccacagattccctggatagtgtagtggtagatttctccacaggatagcgcaattggcaaatcatgcttggttgtgttaggccaaaatactagttttgctttctttaccttttctatcttgatgaaaatgttgcacattctatagttgcaaaacacataaaaggggacttaacatttcacgttgtatcttacttgcagtgaatgcaagggttacttttctctggggacctcccccatcacccaggttcctactctgggctcccgattcccatggctcccaaaccatgccgcatggtttggttaatgaaacccagtagctaaccccactgtgcttccacatgcctggcctaaaatgggtgatatacaggtcttatatccccatatggaatttatccatcaaccacataaaaacaaacagtgccttctgccctctgcccagatgtgtccagcacgttctcaaagtttccacattagcactccctaaggacgctgggagcctgtcagtttatgatctgacctaggtcccccctttcttctgtcccctgtgtttaagtcgggatttttacagagggagctgtctccagacagctccatcaggaaccaagcaaaggccagatagcctgacagataggctagtggtattgtgtatatgggcgggacgtgtgtgtcattattatttgagttatgctgttgtttaggggtaaataacagtaaataattaataataataataataataataaaggagctgacgttcttagccttgtgtggttcttttaatgaggaactaaatgtaataccacctagatatacaacatcagttagcaatgctgtggcttaaagtaatgttgcgcggagccgcgatgcctaaaggagggagaaagggaggccacaaaggctggg

SEQ ID NO: 8742 - DNA, 1189 bp, Homo sapiens
ttccagcaacatttttagagggggatggccccggtggccctcccctcaattccacaccccagacccaacctaccagtctctgttcttcaatgatccagcctgactctacctacttcctcttcagattccttcaccctatttaccttcctcaagtactggagaataaaattgaactgaatgtttgatgtctgtctgggaaagagctggggccatggaattcaggtgtggtatttagatcctaataacaatagttactatttattgagtttctattatgcaatagatccagtgctgagtgctttacctagataatgttatttcaatctcatgataacttggttaagtaggcactgatattaacttaatttcacaccgattaagctacagcatatttatcaatattatatatatattgctttggatggatggttgggtgggtgggtgggtggacggatgggcagatgggtggatgggtgggtgggtagatgtatgtatggatggatggatggatggatggatggatggatggtttgcatagttgcatggttggatggttgcatggttggatgaatggatggatggatgaatgaatggatggtggatggatggatggatggatggatagatggatggatgaatgatggatggatgaatggacagatggcacattccccaacaaggcaatggtatgcaaaaaaattttagccttgaatcctcgtatattttctgtgggtcttagttatagaaagaagcttatcttcctgtcatctcaaaatgtgtgtagactctcataacctcttctctcatattggtcttatgctcacctacattctcactaagttataggaactgtaggcattttaactcccttagtgatggccacactgaattaaaaattggacaactggacttgatttgctcttgtgcctggattatcagagcatttatgtagactaggcttgaatctctccctctggcaatctaaaagtaggaaggagagttaaatttgaattattctttagtctaagcaatcttacactcatccattcacctattcagtcatttattcatttaatgaatatttattaagagcccaatatgcaccaaccaagttctaggtgttaaggatacagcaatgaacaaggcagacaaggtctctgttctcatggagtttgccattttttaaaat

SEQ ID NO: 8743 - DNA, 1150 bp, Homo sapiens
tttgctttctaagactatggccatctccaataataaggtcctagtgatagtgtcatgggcatttttagcttaattagtggatggtgataccagtctattcttaatttgcattttctttccacattatattatttccgtcaatttgatctcattcgaagtcatccgtttcatgcagtgattacttttgattgcttttgccatattttttagatgtgtcctgagttagagagaaactgagtctttttcttccactgctcgtgtttagagttaagtggctgggcataggagcttggacatggctctcacggtcaggtgggcaaactcatgagcggcacgttgattgccagtgtcacgtgggttcagaaatccatagccctagaagcaatttcttatttgaaatgaatgtgcttggcgtgtaactggattcctttcctcttttaggtaatcacagacctggaggagcagctaaaccagctgaccgaggacaacgctgaactcaacaaccaaaacttctacttgtccaaacaactcgatgaggcttctggcgccaacgacgagattgtacaactgcgaagtgaagtggaccatctccgccgggagatcacggaacgagagatgcagcttaccagccagaagcaagtaaggagggttaacaaggtcgtgagatccctggaggacttttagaaggattttaggagtgcttggtgcgttctcccaagggttccaacactgaacctcatacagtaattgggctctttttaaaatcatgtcttttttccaagcctttagggttttaaaaatgtattttaaaagtgtgtagttcttattaattttgattttaaaaaatagggccagtgtggcagctcttccctgtcatcccagtactttgggaggccgaggcagaaggatcacttgagcccaggagttcaggatcagtctgggcaatatagtgagaccccatctcttaaaaaaaataaaaataaaaaagataaaaattagctgggcttggtggtgcatgccagtagttccagcttttcaggatgctgaggcgggaggaacgcttgaacccaggaggtcgaggctgcagtgaactgtgatcatgccactgtactccagcctgggtgacagagctggaccctgtctcgaaaaa

SEQ ID NO: 8744 - DNA, 1209 bp, Homo sapiens
agtgacttagcatttggtgactgtccttaacgaagaactgtgcgctcctgggcgaagaaacaatggtatttccatcccaacttaacttttggcgaattagccttagcccagaccaccaggtggtttcggaggctacttgagatgtgattgctcctaatgaacctccacgggcctttttaacctgtcgatgtgtttatttcagatggagcaggaaatgacccggttacatcggagagtgtcagaggtggaggctgtgcttagtcagaaggaggtggagctgaaggcctctgagactcagagatccctcctggagcaggaccttgctacctacatcacagaatgcagtgtgagccttccctgaagcccccttcccttggaggtggcacttcctgttgtgtgtgtctcatcctgtttcatgatggctccatgaggcacatcacagccaatggcagagagtagagagagggagagcacaaaagcaagatctgtgttttgcagagtagtgagagccaggcgtaaggtccccaagaaatgagattggactcatttccagcagaaagtgcaggtagacggctggtaccatggagtctggagatgggagtaatccatctttgccgcaagttgcaaaagatcttaacatctcccatcccagcctctgtggtctgcgttgtgtctgacatgagcagccttgagaaccagactcccaactatgtacaagaaaacttactttcaatcttcctgacatcaaattttccattggccagaaccagtgtagtgacaagaaaatagccttgaaaacccagaccctctgtcattatttaccatgtgactttcattttttctttccttcacaagagtagactgtcttcttctccattgtcttgttaaatttttcattcaggtgttttttaatgtgcccaattaaacagtctcaagaagttgaatcacacatttctaaagtttttttcacaagggagaggaaatctatagaacgtggctgattaagaataactgctatgtttccattccagacttggctgcctttcagtggtgggtgaagttattcagctatgtatttcagatatagatttcagtgccattgaagcattaagggattcttatggatgaaaggtgtccaggaaaaataagccaggaggtagaaatagaccacttggagtcttaaatgacaactgggcagaggatatgaag

SEQ ID NO: 8745 - DNA, 1063 bp, Homo sapiens
tgggacaggccttcactttggagccacgggatggggtgggggagccccatgggcctgggaaggagggtgctgtggagggggctgcagggctgaccagcaggcagcctcatctggtcgggggcgggggcggcaggagcagaagcggggtctccgtccttgggactgtcctggttggccacgggccctgaggatgcacggtgcctggggctcctgtgccggtgggcggggggcatgctggcctctgagcgatcaggcgaggccagcgagggtgtgcttgcaaattcaagcaataagaggggggttcctgggggcttccagcccaggctagaagcccccatggcttctggcagctggacatcagccccaggtattggggtgattttggtcatgacagtgtgcctgtcccactgttacacgcatgaatgggggttatggggtgggggtggggactcagggctggaccgacgtcctagtggacctgatgtgaaattcctgtcaaacaaacaccacttttcaatggtttgctaggagtatttctgtattgaaagtttctaattatgctttttaaaaaaatactaaaaataaaggttcaagctgccaaattttcttccagggtctgtttgctctccctccagagatgtgctgagtggccgtggcttcttcccacccaccgtgtcctgctcttccctgttcttggcctaagtcttgcacaggagcctgtcgaggcccttgggacacttccagaagccaggtccattttctccatgaacaggtgggccagggttgagtctccccctagttggactgggagcacatgtggtaagatgccaggggaagctccgtgtttatcctccacatgcctggaaggatgcagtggaagcctttgcctggcgtggtttctttctggcttgaagtttctgccaagctttagggccctgctggcctgggaagcagcgttggcaggcctgccttgcggatggcacgctgcagcactggcagggggcagtgccaggcgggaggggcaggggaggatgcccttcctggccaaatcccttggttaagt

SEQ ID NO: 8746 - DNA, 1126 bp, Homo sapiens
ttgtaggagtccctgagcaattgcagagggccttgaaggaaccagtcggagaggggacttacttgccctccctgttccgtgggcagtgaggtttgcatgctaggtgcccctgccaagcactccttgccagcagaatggggaggtcagggtccacagtggaacaggcctggagaaagcaggagtcgggcctcacctgagccgcctcctgtgttgttgcaggacttggctccgtacctgcccagcgtgacgcctggcctgaaagcatcgcttttggaccctgtgcctgaggtgagtctgaggtaggctgggggatgggccaggcccctcatccagtccccataaatggattcctgagaattccccaaagctgcttttgtgtctgttgggtaaagagaaagaggccctcggtgccccttcctgctcccatgtggctaccttgttttgagcctcatcttctcacaccatctctgctctcggttacctgacaggtgcggaccgtatctgcaaaggcccttggggccatggtgaagggcatgggggagtcgtgctttgaggacttgctgccgtggctgatggagacactgacctatgagcagagctctgtggatcgctcaggcgctgcacagggtaaggccagagcaggtccagtggccagcctgggaatgctctaaggggccctcagatccagtggactcattctgtcctttgttgcagggttggctgaggtcatggccggtttgggggtggagaagttggagaagttgatgccagaaatcgtggctacagccagcaaagtggacattgcaccccatgtccgagatggctacattatgatgtttaactacctgcccatcacctttggagacaagtttactccttatgtggggcccatcatcccctgtatcctcaaagtaggtaccatgaccttggcaagggtagagtccttgaggagggcaggaggcaagtgctcacctggagagctagagatccctgctggctggggttggttggcagagccctcagccttcagtgagccccatgttttttgggctgggggcctgggggtggcagctctggctgacccaccctctgtgtgcccaggctcttgctgatgagaatgagtttg

SEQ ID NO: 8747 - DNA, 1095 bp, Homo sapiens
caccctagtagctggggttacaggtgcccaccaccatacccagctaatttttgtatttttagtagagacagggtttcaccatgttggccaagatggtctctatttcctgacctcgtgatctgcctgcctcagcctcccaaagtgttgggattatgggtgtgagccaccgcgcccggccaaggtttggcttttttaactgttagtgccaagaagtgaaggtggctcccctgtgctgtcctccctttcgctcagccacattcctttgctggggcttcttgagctgaggcagagggtgctgcctcctcatggggcatctactagttccacagctgtttctgagtgtttccagaggggtgggaggtggcagggaggttgctgtcccttctgttctctgtggctacccccaggggacattctcttcccagccgtcccaccttcttttcccctaggagccctctttgccttcgagatgctctgcaccatgctggggaaactttttgagccgtatgtggttcacgtgctgccccatctgctcctgtgctttggggatggaaaccagtatgtgcgtgaggtaagtccccggactgctcgggagaacagcatggaaactttatgagatgtgttcccagctgtgtctgcaggccttggcacagggtctgacataatagaaccccagtaagcgttggttataggaggaacgctaggactggtgtcaggccttgccccttgcttgggtgaggaggcccctgaatgtgttttctccccccttgaggctgcagatgactgtgccaaggctgtgatgagcaacttgagtgctcacggggtgaagctggtgctcccctccttactggctgccctggaggaggaatcgtggcggaccaaagctggtaagaccactcgctctgcctctcttcccagcttcctgttatgaaaaccagcctcagcaaggatcctgggtagccacagctcttgtcctgtgagctccccagaccagggatagggttaagactctgcctttttaaaaatttgagatggagtcttgctctatcacccaggctggtctttacctttggggctcaaaccattctcacagga

SEQ ID NO: 8748 - DNA, 1111 bp, Homo sapiens
aagctttctttctgagtggatttagtctttagagtcccttccttggtcccctgccccactgcccaggcctaggttttccatttagaccagaaatggcaccatatgggccaaagcttttgtcgtcagcagattgtagtgtgcaccctcagaggtatacaacactgtgtatacctgtttgcttctctggtgccctgtgacatccgcaggcagtggctgagatggggcttgggacatctagtggtgggtgctgtgtagaatggtcagaccccccaccaaccatgaaacggctgcagcggagccacagcattgacaggtgggcccttccccaggtccaggagtccgtagccagctgcttgccaccccttgtgccagccatcaaggaggatgctggagggatgatccagaggcttatgcagcagctgctggagtcagacaagtacgcagagcgcaaaggggccgcctatggcctggcgggcctggtgaagggcctgggcatcctctcgctgaagcaacaggagatgatggcggcactgactgatgccatccaagataagaagaacttccgccggcgagagggtgagcatctctgagcttggggctgcccagcatgggaagttggtccccaggttgccagaggaaggaatctgaccgtggcgccccaggtggaggccgttgcttgtgcgtgtactacagagggccccgctgtgtgcgacccagtccagctgcgtccttgctgctttccttggacttgcaaatttttttttcttttctgttttttttttttgagacggagtctcgctctgtcgcccaggctagagtgcagtggcgtgatcttggctcactgcaagctcagcctcctgggttcatgccattctcctgccttagcctcccaagtagctgggaccacaggcgcccgccaccacgcccggctaattttttgtatttttagtagaggcggggtttcaccgtgttagccaggatggtctcgatctcctgacctcgtgatctgtccgcctcagcctcccaaagtgctgggattacaggcatgaaccaccgcgcccggccacaaatttctaactcagcaacacccttagctgagagaggtttggct

SEQ ID NO: 8749 - DNA, 1154 bp, Homo sapiens
ctcctggaccagttcctggtgccttctttacccctgcaggctttttagatgcaaagccacaggtgcttccttcttccaggcacatctcacagcctgtgggtcccattgcaggaagctgggcatccatttctactccagcaaggaccccagggaagaactgagtgaggggccgctgtgtccgtagcatatttggttcctgtgttccaagcctgcacagggctcttagcagtattatctcatgtgtctccacacaggtgctgcccttagaggctttggtgactgatgctggagaggtgactgaggcaggcaaggcctacgtgcctccacgggtcctgcaggaggctctgtgtgtcatctccggtgtgccagggctcaagggtgatgtcaccgacactgaacaactggcccaggaaatgctgatcatctcccaccacccatccttaggtccgtggctgcggtgggtgtgggagagcccagagctttaggggatggggtaagagcaggccaggcagaaggcctcaaagagctcccttccccttcagttgccgtgcagtctggactttggccagcacttcttgccaggatgaagatcgatcctgaagcctttatcaccaggcacctggatcagatcattcccaggatgaccacacagagtcccctaaaccaggtgacgggcacatgagctggtctggcctcaggtccgggagggggccctctcatcacagtgtacaggaagagaggattcaaagaagcaggtgaagatggatgaaatgtaggcttggacccttggttgcacgtgacagaaatgtaaactggtttaagcacaaaagggaacttactgcctcatttacctgcaaagtccaaggatatgactggctacaggggttcacatgttgcccttggaacattgtaggtgatgtctctcttactctgtcccatccatctttgtctgttgtctctgttttccacgatgtgggctccattctcaggctttccctttctggtagcacaagagctgctagagttccaggctttgtcttgccatcagctcctaggggaatagcttgcatatttcaataatgtctactggcttggggtcgctttgaccctgattaatctgacttgggtgccatgctcatctctgcacccatcct

SEQ ID NO: 8750 - DNA, 1764 bp, Homo sapiens
gtgagactctgtctcacaaaaaaaataatgccctttaaataatgaataatagtgatagaaaatgtcatttcttggacaaatgaaaaattgaaattaatgtatataattagatattattagctactcttaggtagcttcatttgttgaaagtttgacaagtgaatgaagttcacatctggaaatcgttgaacatttttcgttcatggaactcaatggctacgttagtcgtttatgcttttcactgttgtggtaggggctttggaagtaaatgccatcaacaatggatacagaagacctggatttggaataagggcaaaatttatttgatggggctgaattgctctgccaggagcatttggtatgagatgaaatggcctctcttgagactgagctgccaacctggcaattattgtctgctaagggttctctttattcacccttacttggacttcctttcctgtagggaatctcacgtaaaatgaaatcttccctcccccagggtgtccgcaatgttgccagtgtctgtctgcagattggctacccaactgttgcatcagtaccccattctatcatcaacgggtacaaacgagtcctggccttgtctgtggagacggattacaccttcccacttgctgaaaaggtaaaaggatcccaccaggaccacagtgggcctgactgtgacaaattagcagggtgatgtggccttctaccttactgcttttatagttgtattttatatagcagataattttgtgaggggatatttgagaggttgggaggcagggaaggcgtttctcacttgagaaatgacaagagacccaaagagggggttaatgggcaagagctgggccttaggaaccctgcctcactaggccatacccaagctgtcctgcttgggctgcttctgacaggaaaggcttcacacggactttgatattgttggtccttaaactctaccaaggcaggagggtggtgggtaatagaggagtgtggatgaccattttgaccacttcccccctcctttcaggtcaaggccttcttggctgatccatctgcctttgtggctgctgcccctgtggctgctgccaccacagctgctcctgctgctgctgcagccccagctaaggttgaagccaaggaagagtcggaggagtcggacgaggatatgggatttggtctctttgactaatcaccaaaaagcaaccaacttagccagttttatttgcaaaacaaggaaataaaggcttacttctttaaaaagtctctggactcttaattttgtaattttttttcctttttgacacagggtctggctgttgcccaggctggagtgtggtggtgtaatcataactcactgcacccttgaactcctgggatcaagggatcctcgtatctcagcctcccaagtagctgggactacaggcacacaccatgacactcagctactaatttttaaattttttttttgtagagatattgcacaagctggtctcaaattcctggcctcaaggaatcctgcctcagcctcccaaagtgctaggattacaggcttgagccaccatgtgcctggcccttaattttgaggtttatagtgccatatgctagaaacgaaagccatggtaaaaccagagctttgtatttaggtgttgatgtttgggtatctaaatgaagctaccaatcaaacatcctatacagttttctagacacagttgtaactattacactagaattactgtttctatggctgctgcatacttggagtag

SEQ ID NO: 8751 - DNA, 1946 bp, Homo sapiens
atagcttgtattacattttcccacacttagaaggttttcagacacaaaacccaaaggaattgtgtaacaatccggataaacacgcctagattgtttttacaaataataatgttgctatatttgcttaacgtggtgcttttaatgctgtgaatctagccctcctcttgaccaacttacttggaacattccttttttatcctgttaaccattttagtgaatcagaagcatgcctggtaattgggaaaaattaaaaactaagtaaaaaaagaaaaaactccttgattgaatgtagaaacctaattttcagcgttcatacccagctagccaatcatccagtttggcagtgttacaacgtagctcccaatctccctctgacttcaaaagcttagaagaaagggagtgggatggaaacaaattgtggggttcagtttcttctggcattttttccctctctcttcctgttaaacttggctcctctggcttgttttttgtagcaactattggatgattatccgaaatgtttcattgtgggagcagacaatgtgggctccaagcagatgcagcagatccgcatgtcccttcgcgggaaggctgtggtgctgatgggcaagaacaccatgatgcgcaaggccatccgagggcacctggaaaacaacccagctctggagaagtcagttcccctggcagttttgtcctttctccccagtgcccgtctccctcttcctggagaatggtgctgaaaggtgattgtctcccataaacttctctttgcagactgctgcctcatatccgggggaatgtgggctttgtgttcaccaaggaggacctcactgagatcagggacatgttgctggccaataaggtaaggggacaattgggttggctaaagagactttgttgttgctccttaaagcaaaatggaccattctcaggttgtgtgagtggagaggcttttctcactgtttgttgtctttgtcaggtgccagctgctgcccgtgctggtgccattgccccatgtgaagtcactgtgccagcccagaacactggtctcgggcccgagaagacctcctttttccaggctttaggtatcaccactaaaatctccaggggcaccattgaaatcctggtgagtggacctggtttgcctgtgctaaccaggcaaatggggagctgcttttagtggccatggatctgctggttgtccaacaggtgtttactgccccactattatctggttcagagtgatgtgcagctgatcaagactggagacaaagtgggagccagcgaagccacgctgctgaacatgctcaacatctcccccttctcctttgggctggtcatccagcaggtgttcgacaatggcagcatctacaaccctgaagtgcttgatatcacagaggaaactctgcattctcgcttcctggaggtatatgctgtcagccttgccccctcttacactgatggttgagagcatgacaaggttcagactgagtccctgtaaccaaggactgtgttttcatctgtctacctacctcatctgtaaaatgtcagtaacaacataagattgttgaaggattttttttttttttttttggagacagagtcttgctgtgtcgcccaggctggagtgcagtggcacaatctcccggctcactgcaagctccgcctccgggttcacaccattctcctgcctcagcctcctgagtagctgggactacaggcacccgccactacgcccggctaatttttttgtatttttaggtttcaccgcgttagccaggatggtgtcgatctcctgacctcgtgatccgcccaactcggcctcccaaagtgctgggattacaggcatgagccaccacgcctggccaaaggatttaatgaattaatggatgtacagtgctggggctgttattctagggcctgcattgagactcacattttgccat

SEQ ID NO: 8752 - DNA, 1213 bp, Homo sapiens
ggttgcagtgagctgagatcgcaccattgcagtccagcctgggtgacaagagggagactctgtctcaaaaaataaaaataaaataaataaataatttttaaaaagtacatttaaaaaaatgtcactactggacgggtgtggtggctagtgcctataatctcagcacttagggaagccaggcgggaggatcacttgagttcaggaaaacagcccatctctacaaaacattaaaaaattatccagttgtagaggtgccaacctgtagtcctaggtactggggatgttgaggaaggaagattgcttgagcccaggagttggaggctgcagtgagccatgatcacaccattacactccagcctgggtgacagagcaagtccttgttccaaaaaagaaagagaggagcgcagcactgccgcctggcccctccagcttcccggaccacggccaacctcgagcgcaccttcatcaccatcaggccggacagcatgcagtgcggcctggtgggcaagatcatcaagcgcttcgagcagaaggggttccgcctcgtggccatgaagttcctcccggcctctgaagaacacctgaagcagcactacattgacctgaaggaccgcccattcttccctgggctggtgaagtacatgaactcagggccggtcgtggccatggtctgggaggggctgaacgtcgtgaagacaggccgagtgatgcttggggagaccaatccagcagattctaagccaggcaccattcgtggggacttttgcattcaggttggcaggaacatcattcatggcagtgattcagtaaaaagtgctgaaaaagaaatcagcctacggtttaagcctgaagaactggttgactacaagtcttgtgctcatgactgggtctatgaataagaggtggacacagcagcagtctccttcagcacggtgtggtgtgtccctggacacagctcttcattctactgacttagaggcaacaggattgatcattcttttatagagcatatttgccaataaagcttttggaagctggaaaaaaaaaagagagaaagagagaaggggagggaggggaggaagggagggagggaggaaggaaggaaggaaggaaggaaggaaggaaggaaggaaggaaggaaggaaggaaggggaaagttaaatagaaagaaagagacacagacgggccgcgagcggtagctcatgcctgtaat

SEQ ID NO: 8753 - DNA, 1341 bp, Homo sapiens
ttttaaagaaaccttttttaaactatttctaggtttgtgaatgtgaagccccaggccgcagggggcaaggggccaggtgccccccaccagctgagaacaaagtgtctatctgggtgtgggcccctggccgcctccctccagccctggagaggagggcagggctgcggggaggccaggccgagcccctggaaccatcccgtcctgtatcatatgtaaatactgtgaggtgatgtgcccacccctctctaagacccctcgggggtgaggggctcccccctcccctgtttctgtcccctcagacaccgttactgtaagcttgcaggcctcagctgtggccacggcaggcccgctctctcaggccctcagggtcaaggccttggttggacctgcccactccaaaaacccagtgtgggggcaaagggcgtgggaagagcagggcttgcccagcgacactgctggacaggaattaactctccaaaggtctcccctgctccctacctaggttggggcttcatggtttctgctcagtctgtcccccttccccctcgacccccgcaatgagtgggcaccaggggacgctctggcgagggcagaccccaggggaaagcaaagggcgtctcagggaacccccacattctctcactgaagtttcccaccaggatgaccccacagccagagtcccttggcagcccctcaccccagaccccccttctaaggaaaaagagaggttcagagcgttggaccttcatgaacagtggcctggctggcgtggcagggccaaggcccacccactgccatcccccttctgtgtgtccctctcccccagttatgaggcccagggcctgagctctcttccccagcattgcccccacccggaaaccccacctttggagagttaattgtctgtgtgaggtgcttaacctatcagccctgagaacacaaagcaataatctttgttactgagatgcgcggctgttcgtgttttgggttttttttttttttaatgtttcctaataaaagagaagctgcattttattggtttttatttttaattttctacacgtttgagctgagtcctgagacacttagcttccctctccctcattcccggacccttccaccccactgggcccaaccatgggctcaggaccctggaattccgttttctgatttgctttgggattttttttttttttaagatgttacatggtgtttcgaagccagcaagttaccatcctccggtgtctcttctctccacatctgtaacttctttttccaggttttattttcagttttaaattcctaataaattatttgaaaacgttgctgggcttgtgaatg

SEQ ID NO: 8754 - DNA, 1160 bp, Homo sapiens
tgggaattgccgcggattagccatgcgctcctggggtaattaggaccatgtgttcttcctaaaacagggctggggccacagggctgccagaggttgtgttgggaggaggctgatgaggaaaatgtcggcactgagttcagggagactctgtgatggaccttggggggtctcccaggagggccagtgaggtcttagtgttaggctgtgggtctgggtcactggcccgcccccttccctgtgttagtccttagggaaggcattttctggacatagtccctagggagggaggcaggaaggaggcacactcgagccagccagggtgtgggtgcacagctgcccatgacaggcctagaggcgggggtccaagagggagcttgcggggggggggcctttaaagaggctggggccacagagagcttgtcagctggcatcctggcaggggggctcgagcccctgctggtggcggtaggccacaggactcagatgcccactttctcattccctcccctaacagatggtgactcgaacgaagaagatctttgtgggggggctgtcggtgaacaccacggtggaggacgtgaagcaatattttgagcagtttgggaaggtgggtttaaactgggggcgcttgctgctggggctgtgaacacactgtagaatggggcactagcaagccgaatccagccaggtcattccattcctgcaaaagatgagagtggggctggatcctgctgtgggggcagaccaggccaatccaccttgcagcctcctggctcatctgtgagcttcagactcaggatatccctcgggacagagaagccacacagtagctggccctgttgttgcccttccactgtatttttctcttacttatcttcattctcacaagggaggcagtgctcccacagccagttcaatcaagtcagcccgtggcctcctgggagtttgcacctgtccaggccacaggctattgaacctttccccactccttccaggcgaggatgataaggaggcaataaatatgactcccaattgcactcggcaccctatttgcacaggtggggagcttggagccagagctggggggctgctggtcccctgggtattggggggaactgatgagagcatcccccaattcctgatcaggcccagaggattgg

SEQ ID NO: 8755 - DNA, 1140 bp, Homo sapiens
cggcagcgccaactccgctcgcacctgcggctcaaacttttgtgaggctgctcccggagcggcgggaacccggccggagccgtcccccttccagcccagctcggccctcggcttcccggggccccggtgggcgccaggaggctcagcgggaacggggcgagggcggtggggggcggcggcagtggagaacgcgcgggcagcttggcgcgggggcggccgggccgctccggggtcaccgggggcaaaggacgggggggggggaagggcgcggggcccgggctggtccgaaggcgggtgtgtggttacagaagggctgcgcgaatacttcggccagttcggggaggtgaaggagtgtctggtgatgcgggaccccctgaccaagagatccaggtgagcccctcaccccctcctcctgctcccggctcgcccccctccacccgccactcactgccttgtaaccatctgcctctccctcactacggcgcgcaggggtttcggcttcgtcactttcatggaccaggcgggggtggataaagtgctggcgcaatcgcggcacgagctcgactccaaaacagtgagtggccctcggggcttcgggggtcctttgggagagggaggctgccggaggagagggtcaggactctccccaggggacagctggacggggtccatgaggaaggagggagtttttctgagtaagagggctgccatgctctgaaactttgtcactagagttgggggggagagggaggagaaaaatccctggcctgccatgagatgctacatcccccctcccctagtcctggtgaggggagaggcagccgccaccctctccctagaagtactaatcatgatgcctcagagcagagcttggggtggggctaggtccctcccccagcccaaattgggtgagtcagggtagcactgacccacccggtggcttctgtgaactctaactagtatttggctctgcgacaccccctcttcatccagaccaatggcaaagcatcccttgaagccccctccctctctccttccctcctcccccgacttttggtcaatgagctccttgctttgtgtggaagacagggacctgctttgcccacggaggggatttatgagaaaggctctagcttgcct

SEQ ID NO: 8756 - DNA, 1260 bp, Homo sapiens
gtgggctgcagtttcccagcccagatattgtttgaagtctgggatggtgccagaaatctgcatttaattaagcatctccctcccctaatactgccaccattttgatataggtgatttgaggattacactttcataaacacagcactggatatactagttactagggagaggatgatgagtaactaacttgagcttgcattttctgccatccatatttgtttctggaattaaaactgtcctgtagccaggataactttaagggctcccctggtagttataagagctccttaaataatgggaaggttgaactacaccagtagataaaggactaatttccattttgtttttatatatgatctgtcaccccgttataagcagttcatgacggtgttctttctaaattattttctggaattatctaactgacatcttcactccacagccgtttccctggggagatggtaaccatactctattccataaccctcatgtgaatccacttccaactggctacgaagatgaataaagagaatctggaccactacccgggcaccagggaccacagcactggtttggaccgttactctgcacatggaccagaaaaagtatatgggaccttaagctcaccttctttacttgtatcaaatgatgactggtatactggtctcccatccctttgcttgtggcaggagatggcttaaataaataacttaaatttagattggtcatgagctgagagttactttctttggttgtgttttttcgcagaaattagcatttgagcttcaagtcagtgtccaagttgaaaagaaattggcattagttatttctgtttccacagtgaaggtctaggctgctgtttagtgttacaggtccaattcagcccattgaataagtgtttataacagcccctcttggtttattgtgcctgatgtggataaagggaccaagtggagtggtgctaattaagcatcaagattagtccttggtcaggtgcggtggctcatgcctgtaatcccagcactttgggaggctgaggctggcagatcacctgaggtcaggagttggagatcagccgggccaacatgatgaaatcctgtctctactaaaaatacaaaaattagttgggtgtggtggcgcactcctatagctgggtgtagaggcttgaacccgggaggtggaggttgcagtgagccaagatcgtgccactgcactccagcctgggcaacagagtgagactctgtctcaaaaaacaaaaga

SEQ ID NO: 8757 - DNA, 1153 bp, Homo sapiens
cttcattcttgaaatgggatagtaagagtacctacctcataatgttatgaaggtttaatgagatagcctcatgccaggcacagagtacacagtaagtgctcaatacttaactattattgttagatgttggtttgcttattcttctggctctgatttttttcccctttactctttttgtttttgtttgcatttcagggtgaaacttcctacatccgagtttatcctgagagaagcaccagctatggctactcacggtctcggtctgggtcaaggggccgtgactctccataccaaagcaggggttccccacactacttctctcctttcaggccctactgagacaggtgatgggaattttttctttattttttaggttaactgagctgctttgtgctcagaatctacattccagattgaggatttagtgtcttaggaaatttttttaattttttttttttaaagaagaaaaaaaactacataatttctaccagggccatattagcagtgaaacattttaaactgcagaaattgtggttttggttcagaaacaagttgtatatttttcacccctgattatgggaaaaaaatcagttctgtctttgtgggttgctctactatggagatcaacagttactgtgactgagtcggcccattctgtttagaaatatattttaaatgtttagtaattgacatgtgtggttgtccttgattaagttcacagatttcaccaaataggcacactaatttaaaaaatcactgagttgtagtcataacttgtacccagttaggagcaggggtagataactttatttatatggggatagacagttgctctgatgttggtttgagaacgtaaactccaagagcgggttctgggttctcttttaattcaaggccaagcttgtaaattaggctgccttaaagaaaaaagcattgcagataaaggaagggaatgggaaaaataaacacacggtggcttttgcctgtgatcctagccctttgggaggccaaggcatgccagaggatcccttgaggccaggagttcacgaccagataggcaacatagcaaaacccccacctctacttaaaaaaaaattaactggacgtggtgatgcacatatgtagtcccagttacttaggaggctgaggtggg

SEQ ID NO: 8758 - DNA, 1085 bp, Homo sapiens
ttcatgtctggtttcaaaattcccatgtcctgtgaaaccctgtcaagcaataaataattggtactgttaaatttcataatggaaaaaattggaactcaaagtattaggagtttggcattgattttaaaggacaaagaaagaggctatgaattctcaaagatactaaacctgtaatgggatggacttcttgctctgttgaaaaggcctggtctctggaagatgaacttaaaaccagcttctcaaggtggttcatttaccacacatacttcagtgctcttttctgatttcatgtcccttatcaaggtttatgatttggggaccctcaggatttaagtgatcatggagaaaggaccataggtattgctggctcttaacagggcagttaacatagctgaaggatgtgggctttcttatgttctccatgcctaggacttcctccgtcaggcagctggcaggacctgaaggatcacatgcgagaagctggggatgtctgttatgctgatgtgcagaaggatggagtggggatggtcgagtatctcagaaaagaagacatggaatatgccctgcgtaaactggatgacaccaaattccgctctcatgaggtgggtccttgccttctgttgaggagcttgtactcaaatcactccacttgaacctgacctagcagaggtagcaagaggccatgccatttggtaacctcacagtaccataagagatctatcttaggtggacaaagccatggaatttgctatgcctaagtccttcagggtcatagctgaaagaagtatgcattcatggtacgtttgttttttaatatgctttattctgcatattagtatcacattacacagtttggtcatggtatttgtaacctggagagaatactagtgcagtcggtcttcataccaccccattcacaaccagcttaaatggcagtatccctctgtgaactcaactacccctcctgtgggtccaggctgagctctacaggtcagcctcttcatctcagcccttctaggtcctgctgtcagggctgagctgtcacttcacttttttcccagagtagtgcagcatcctctctgaaa

SEQ ID NO: 8759 - DNA, 1153 bp, Homo sapiens
catcttaggaggaagactgcataagaggaaatgctacatacttttttttttttttgagctgaggtcgcgccactgcactccagcctgggtgacagagtgagactctgtctcaaaaaaaaaaaaaaaaaattcctcttcctggccgggcgaggtggctcatgcctgtaatcccagcactttgggaggctgaggtgagtggatcacctgaggtcaagagttggagaccagcatggtcaacatggcgaaaccctgtctctactaaaaatacaaaaatcagctgggtgtggtttaatcccacacgcctgtaatcccagctactcaggaggctgaggcaggagagtcacttgaacctgggaggcagaggttgcagtgagccaagatcgtgccattgcactccagcctggatgacagagtaagactccgtctcaaaaaaaaaagctgtgtaaaaggagggttttttttgggtttctgctataaatcagtgtcatcctaatctgaaatactgattcattctcattctctctaggtagcagaggctcaacgggcagagtttagccctgcccagttctctggtcctaagaagatcaacctgaaccacttgttgaatttcacttttgaaccccgtggccagacgggtcactttgaaggcagtggacatggtagctggggaaagaggaacaagtggggacataagccttttaacaaggaactctttttacaggccaagtgagtattgctacccctcagaggaaagggaaagtaggactctccggatagctgtggtgcctctgtgagaggctttttttaagctattgtgggaaagaagcagaaagggaattggtctcgttctttttctgttcaccactgccccgcccttcctttcttttacccactttccaggtggatgtttttggtacttaatataatgcttaaataacttagtatcatgataaggtagaaaacatgtttggaattggacctagatttgaatcttgtttcggcctttgaccttaagtaacttaacagctttgagatttagcctctcctttataaggaagaggaaaggtttttttttttttttttttttttttttttttttttttttttttttttttttttttttttttttgagatgtagtctcgctctgccacc

SEQ ID NO: 8760 - DNA, 1149 bp, Homo sapiens
ctgttgtgtattagttttattatatttaacggttattatggtttccttgatgctttgcttaaagagctatcatacaaagccaggcgcggtggctcacgccggtaattccaggactttgggaggccgaggcgggcggatcacaaggtcaggagatcaagaccatcctggctaacacagtgaaaccccgtctctactaaaaaattagctgagcgtggtggcaggcgcctgtagtcccagctactccagaggctgaggcaggagaatggcgtgaaccaaggagatggaccgtctcaaaaaaaaaaaaaaaagaaaaaaatgatcatacatgtacctacgttgtaaacaattttagaaagatatgttgagtataaggatgtacggggatagagatgagagagatgcggatgagagagtagagaggcctaaaactttgacagtccctaatcagttcttcaagcagtgaaccttctggtggcattttgtttcagcgcatttgtagccatgaagtgccatcttgcccaatatgcctctatccacctactgcagccaagataacccgttgtggacacatcttctgctgggcatgcatcctgcactatctttcactgagtgagaagacgtggagtaaatgtcccatctgttacagttctgtgcataagaaggatctcaagaggtgagattgagacatttactcagttagatcccaatctcttcactccttgccctgctacatatgagtgtccatgtttcagtgttgttgccacagagtcacatcagtatgttgttggtgataccattacgatgcagctgatgaagagggagaaaggggtgttggtggctttgcccaaatccaaatggatgaatgtagaccatcccattcatctaggaggtgagttctttaaattttggggacaaataatcctgggtacattctttaaggtgattgaatatatctaagcatcagaaagtgaagcctttgggcagggcacatctggcatgttcatattagtcataggattccagtaggttagggtggggtttgtagagagtagattaattattggtttcaagtttgtttaatctatacatcctaatttttcattttacaaggttttattacatagtgtctttcactgtgcccaatcttag

SEQ ID NO: 8761 - DNA, 1315 bp, Homo sapiens
tcattgccttttaacttttggtcctgttgagaggccattctaagcccttgcccttcaagctaagtgtgtgtctggaaacttaaccttctctggtgttctctctggccacgttagactcgggaagaggctctgtcgggattggccggaagcagaagggaggtcactggtgttgtggctgctctggaacaactggtgctgatggctcccttggcgaaggagtctgtttttcaacccaggaaggttagtgtgttcctgttactaagtggctgccgttcctcaaatgctgtcattgagctggtaggcattactgtgagatctaaaccttctcaagagaagaggggacaatgagtattttctgtatgcttgttattagttctttccccaggggtgttaaatcagtgaacacgacagctaagataaacatctagggagcttggctcttaggtctgcatttgccacattgctttcggaaagcaggagatatcctttctgttgacttagagtttgctgcaacagggtgtgctggagtatctgtctgccttcgatgaagaaaccacggaagtttgttctctggacactccttctagacctcttgctctccctctggtagaagaggaggaagcagtgtctgaaccagagcctgaggggttgccagaggcctgtgatgacttggagttagcagatgacaatcttaaagaggggaccatttgcactgagtccagccagcaggaacccatcaccaagtcaggcttcacacgcctcagcagctctccttgttactacttttaccaaggtgagggtgccggaagagagggctgggttgccgcagaggtgtttcagaggtgacccggtgctctaagcagaggagcgccactagatcctgtggcttgggtggcttgagcccttgggcatggggaggggtggggagcctcctggggactggccaagactggtgtgtgatagagccccttgtcctcagcggaagatggacagcatatgttcctgcaccctgtgaatgtgcgctgcctcgtgcgggagtacggcagcctggagaggagccccgagaagatctcagcaactgtggtggagattgctggctactccatgtctgaggtgaggccttcctgtagaaatggagggtcaggcagcagtattaacctaatctctttgaggtaggcctagccatcctaagttcacaaaccttcaaggcctttagtttttgtatttttagtctttctgtcagtgatggtgctgtgaattctttgtaagtgaagtgtcccctcagcatgccagggttctgttaaatcagttaatg

SEQ ID NO: 8762 - DNA, 1134 bp, Homo sapiens
tcaagtctgcagtgagctggcctgggcggcagagcaagaccatgtctcagaaaaaaaaaattgggcttcattttctactatttcaggccaagtgtctttcaatagggagatctgctttatcttccttcccagttatttattctgtcagtggttcccaggtttttttctgttctgtttttctgccaacaaataactttatcttctctgttcgtccccctcagctgtggggccttgaaaaaatcagaaacagctgatgggctttagattatttgttgctggactcagttcactcctttgcagtacaaaccaaaaataactggatttggttgcttattccaccttgctgtaggttgacagtttctctttggcttttcaaaatgaggataattgagcactactgtttccagccccagtgctggctgtgttatgtatatattgttggatatcggggttaggaccccctgctttcagagttaggcttgcttttgttgagtattggtcctttttccaatgtaggatgttcgacagcgtcacagatatctctctcacttgccactcacctgtgagttcagcatctgtgaactggctttgcaacctcctgtggtctctaaggaaaccctagagatgttctcaggtgagaatgcccctgctctgcttctctttatagtagggttcagggattcttgtggctagacacccagtgggggaggaaacttatggaactgtatcatgagtcttagtacctcctaaacacttcatctgttcatctagtccagctgggcctactgttgtgggtttagctgctaatactgggaggaggtaatgaccatgttgtcctgggtctacctctttacaacctgaccaatctgcagatgacattgagaagaggaaacgtcagcgccaaaagaaggctcgggaggaacgccgccgagagcgcaggattgagatagaggagaacaagaaacagggcaagtgtaagttcaggaactttcatctttgactagcactgctgtacgtcgttgtatagaactctgtgtctgggacctgggagccagaccttagccacttgttttcttcaacttttaaatgtgaatcatgagagcacctccttaataggcttgcttgcaaatataa

SEQ ID NO: 8763 - DNA, 1082 bp, Homo sapiens
tagaaggacagttattgtaaatttgggttttagcttttgtctgcatcctctagacctttgggggtacgcatgtgtgatgtcctcaactgttggaaactatttgaaaaattcaggccaggtgtggtggctcacgtctataatcccaacactttgggaggccaaggtgggcagatcacttgagctcaggagttcaagaccaggctggacaacatggtgaaacctcatctctttaaaaattcaaaaaattagctaggtgtggtggcacgtgcctgtggtcccggctactcgggaggctgaggtgggaggatcgcttgagcctgggaggcagaggatgcagtgaacagagatcgtaccactacactccagcctgggtgacagagtgagaccccatctcaaaaaaaaaaaaaaaaaattgaattctgtaaatgggtttacaagggttatctttcctttgcagacccagaagtccacattcccctcgagaatctacagcagtttcctgccttcaattcttatacctgctcctctgattctgctttgggtcccaccagcaccgagggccatggggccctctccatttctcctctcagcagaagtccaggttcccatgcaggtaaacaggtgaaatttaatgaattcacccatcagttagaccttatgcaaagctttggtgtctgagtttacaaccccggcccactcagcatggtgtggacttcaggggcataaccttactttggtagtcctgaggtacatcaaattcttttattcatctttcccacttgctatactgactgctttaccctgccagcttctaagcacctcaaggagctctttaggcaggatagttgaaaatggagtcttccctttgacccacctatttttgtttctagtttttgtttgagatactcccctgtatgcctaaacatctttgtacatgtctctttattgtagcatcgttttaatagctcaaaaaaaaaaaacagtttagaaagcctaccaataagaaaatgactaaattatagtatttatactgtaaaatgtttcacaccagaaggccgggcgtggtggcttatgcctgtaat

SEQ ID NO: 8764 - DNA, 1140 bp, Homo sapiens
tttttaggggtcccaggaagggcagaaaaacttaaccagaaagtcggaattcccaatttgagggtctcagtaagaatctcttgtgccttctgtgcagtgttctttacccatttcctaaggaacaaacagcttatggtttactaccttgtgggtttcattgccatttccattagccaggatatagaggacatgactagaacagtgtgttaaggagagaagtacctggaaaatcttttcaaaggtgatagttggttctgtgcctctccagttagtcaaggtaggtctgaaaaagaagttggaccagctacttaaattctctcccccacttctttcccactttggcagatgctgagggttggaaaagcaaaagcagatgtgtggcccaaaactgctccaaagaaaggtgaggatggtccactggtgaagggggagtttggcttctttccataaaaggctgtttctagaaaaagagttgtttctatagttttaacactggtattttttagatgagaacagcttagttcctcctgcccctgtggacagcgacggggagagtgataattcagaccgtgttcctgtgcccagttttcaaaattccttcagccaagctattgaagcagccttcatgaaactggacacaccagctacttcagatcccctctctggtaagggcagaggctggagtgcccagggttgtcaaacatactacacatgtactgccattcccgcctggattcagtggcagacatcactaattaggctctttcccttctgaacccttcagcacactctagtgtcatttaaataatactccatttggtatgtcagataggacctatttgccaccccagagaaattgatgacgcctgaaagtgaaattctgaggaactcttccaagatacagtggggtgtacaacctgtatcctttagaatcttgagttggtacagggtggctaattagatggagaagtcagtctcgaagcctgttgcactctgttcatgactagacaagaatcacatatgtatggcgtgctatgtgcctagcactgtgctaattctcccaacaaccacgttaaatgggtgtacctcacgttacagatggggaaactgaggtccagggaggtaaaagtgatttgccca

SEQ ID NO: 8765 - DNA, 1208 bp, Homo sapiens
ttgaagagacaaggtcttgctctgtcacccaggctggagtgcagggtacaatcatagctcactgcagcctcaaactcctgggctcaagtgatcctcctgccctagcctcctgagtatctatgaccaggggcacagctgccatgcctggctaattttaaaatttttaatagagatggggtcttgctatgttgcccaggctggtcttgaactcctggcctcaactgatcctcccacctcagcctcttgaagtgctgggattacaggcataagccgccatacccagctgttcagcccttttaaaatttcctactgaaggctgagccctctgtccctcctgcctatctgcccggctcaagttagcttaagtaagctttaaagcacgtcgaaatccctggatcccttgctatcctcaaacctcaaggtagtatcagctcctgcacctgcccccaaagcaggatgggatttcttcaaagtgtgtgatttttccatagggaccaggttttgccggctcctgtctcctgtttccaacgacagaggcatatcccaaggtcgacaagtgggtgctatgcccggactggcctgcagggggcaggaaccaccagatttgactgagttgatgccctgctgaataaatggatgccacgcttggccctttaataccaatgctgggcaggggaagacggcgctttctagatgcttggcacagtgccaagccctttgcatgtattatctcattagctcctcacaagagccctgtgggaggtgctattagaatccctattttataaatgaagaaactgaagccgagaaagatcaacatgtcctctaggccacatggttactgagcagcagacaagattttttttttttttttaaatagagatgaggtctcactatgttgtccaggctggtctcgaactcctgggctcaatgatcctcctgccttggcctccaaggattacaggtgtgagccaccatgcccggcccaggatatgatttgaatccaagtcagcgtgactcctcagtccaagcctttttttttttttttttttttttttgagatgaagtctcactctgtcgctcagcctggagtgcaatgacgcgatctcgactcactgcaatctccgcctcccgggttcaagggattctcttgcctcagcctctcgagtagcggcgactgcaggcacctgccaccacgcccagctaac

SEQ ID NO: 8766 - DNA, 1496 bp, Homo sapiens
acactggctgcaggttagaattacctgggagtactaagcaacaccaatgcccagtgcccattggagacagaattaagttagaatttctggggaagctccccagttatgccagtctacagccagcattgagaatctctgctttatgctgtgctgttttggcctttacatatatccacccattcatacctggaccttaacctgagcttccctctggggtccctagtgagcactattgtttcaaaggaacctacatatggtctattttctagattttgcctgcaagtctttcctgatcccctagactcagacagattcccctcactcacattcccagagtttttgtgttttcccttcatagcatttatctgaaatgtaatcagataactgtgtcccagctctaatatctcctgcccacctgctagaatgtaagcgtcctgaaatcaggaactgtgtttctcttatcccccaacaacgttcccagagccaagcacggtgcctgacatttctccactggacaagtgatacttctttcttccatttaaataattactgatccagtagctattcggtgtcttacactttctcatgtatgctatataagcaagctaggaaaagccccatttttccagtggcggaaactgaagttcaggaatgggaggcagccacccagtcagaagctggcagcgctgggcatggtgtctcatgtctgtaatcccagcacttcgggaggccaaggcaggtggatcacctgaggtcaggagttcaagagtagcctgttcaacatggtgaaaccccatctctactaaaaatacaaaaattagccaggcatgaagttgtgcgtctgtaatcctagctactcgggaggctgagccaggagaatcgcttcaacccaggaggcagaggttgcagtgagctgagattgcggcactgcactccagcctgggcaacagagcaagacactgtctaaaaaaaaaaaaaaaagaagctggcagagctagactcaaccccagacctccccgtccttcccattcattggagtccactgacccctgcctgggcctgcttccttcatgctgtttccaggagacacgcatcatcaccctcttttctgttctttagtcatcaatacccgccccccaggctcctcctcctccatctccccctccagaggtttggcccaaacaaggctgctgagtaactcccctgattaaaccattgcgtggttgtcagcagcagcaccggggaggtccaggagttatccagggacctccttcccagctccctaggagtgagcaccctctgggcagcgcccccacccatcttcctaacaggagttctgagcagcccccccacacgggagaaaagttcctgggaaaggaggctctccgggctgaaaactgagctagcgtgcaagaatgggcttgggaggagttctgcttccagtctatctctggtgccccctgctggaaaaagctgggtgcaggaaacagggacac

SEQ ID NO: 8767 - DNA, 1554 bp, Homo sapiens
agcctctcctggaaaggcctggatatggtttctaaaatctcagctgagaacttcagaaaacagcagcagtattttccttttcctagtgctaaaatccctttccctagaaattggctcaccttgggaaacccagggaaagaatcagcaggttctctgccctccctaggggttggggaaggacccaccccggtcagcacagtgccttttcctctcctgctctgagccagggtggggcattccctctagattcaggtttgggcaggggtcctatagtccctgccatggggctgcttccctgtcccttccctcccctttgctggcctactctggcataattcaagtgtcttcttgccttggggatccttagtggcatcaaatggcaacatggaatattgtcctccatgcccctccagaaggacctaggagagtaggtgagctttccaaagtgagagacgaatctttctttctttttttttttaaagggcaggatgggtatgctttgggctttctccttctgtggccccggaggaaggagagactgaggcaaggcaaagtgatagtacacggaagcagaaccggaaacacccaggaactgttcagaaatctcagaagaaatctgcttctcttcgatggaaagatataattaacgatcaaagagctctaagaaaattgcaaagaagccttaatgttcaagctttagaaagatcagagcaatttttctctttcagtccaaactaagactctctgtatttaaatctctctggggcaagagggctagatttcctcattttgttatgagactagattggtaccagtagatcagctgcctagcgagggcaggtttcttctttgcatctgtgtggcttgcttccagtctggcctgtcctttccagctgccttttgtctagcctgctatggggggccagattatcttgataagagcaggtgatttggggactagctgggttggcaggaaaagagcaggatggatctcttgggacaggttcccccaggagtataaacacaaggagccaggattgtgctggcagccaaggaaacagtagtgcctgtttgagttggcagagagggccttggcacctcttgcatccaggcagtcttgtgagatgggggcacatagcactggggaaagcagaactccattctcacctctattttgagcttcagtgctttatttcagtatgaggaaaaacaacaacaaactgaagtgcgctttccgtcctttcaaaggacaactgtcgggaagggagagccgagttgcgaggtaggaggggagcactggcagggagagacattcttgactcctctcttccctggtgtgttgtgatccagggaatgaaaagaaatttgaccctggattggttctctccttggacttaaggaatcttaccttttccttccacaaagttctcccaggcaaggaccagctgcccattctgagcccagggcagcctcttcaaccattattggtctaacctggcttgtcaggaaaccaagcccacccttccacattgggcctggctgctctattctgta

SEQ ID NO: 8768 - DNA, 1100 bp, Homo sapiens
gttgtcagggttgtgtgtggaggtgggcacagtgaggctcagatttctgaatttggagtggaatgtctagaggtgggccactgaccagaggccagggctggctttggtcagctgagagcactgagtaaataggttggtggggtccatgttgggaagaggggtgagcacatttccctggtatcttggctgaagaatccaggctggagatgacagaggaggccatggtggagagttgattgcatccttatgttgaaatggagatcatgttcagctggggggcctctgtggtctccccagctgtcaagggctgcctccctctgttctgacctcatcgttattctggcagagtatactctgaagcgctggcttattttggaggggatgcaaagttttctcccacctaccctgtggggcagactcaaacataattctttgcttttttcttccccctttgcctgacttgcagttcgtctaatgattgaaaatccttacgagacccgctctgacagcttctactttgttgacaacaagctgataatgcacaacaaggctgattatgcctataatggaggccagtaagtgctgcaagagtagataggggaggtgctttgccgcggccacaagatcctggcacacggagatgatcgaagctgcagtttgtcaacacacatctggaacctggccccaggaagccaaggctggggtggcagtttcctgcgcgccaaaggagctgccaaacagtgctgtgttttcttccccagtattttttcttccctttttttcctgccccgtaggttgcagaggtactatagtaaagtaaaaggttaggataagggtcctggaatccagataaaaaagtttattttccgtagttctggctgcctgttggttgtcttgacgaccaggcatagctgtgcctggtgagaaggctctggccaggcccaccagcaggtcagcagctcttaaggttcctgggtgctgtgggaagctgaaaggtaggcctcttccaggtagctcctcctctcacctccggcattgccatcagcgcagtctgccctcggtctgtgtgaagtcttaaaccaactggaagacacttgaaa

SEQ ID NO: 8769 - DNA, 1137 bp, Homo sapiens
tgggtctgtgtgggcagggaacggcagtgatgcaggagctgcgtccaccaccgcccgggccgagggcgactcatgggttctgaatggaaccaaagcctggatcaccaatgcctgggaggcttcggctgccgtggtctttgccagcacggacagagccctgcaaaacaaggtgggcccacccagagaggggttcagccggatcctgggctgctgtcatttctgtttctagggccttctctccttggcccgactggacctatttttgctctggggcaagtgggctgtccctgtccctcctcagctgccactgaagcctgcaccttccccagaagccggcagagggtgtcaaggcctgagcttctgagggaggtggggaggggaccgggttggtgttgggtgtgctggtgtgagggtgtggctgaggggcagctctgagaaaaccacccgcctctcctttcagggcatcagtgccttcctggtccccatgccaacgcctgggctcacgttggggaagaaagaagacaagctgggcatccggggctcatccacggccaacctcatctttgaggactgtcgcatccccaaggacagcatcctgggggagccagggatgggcttcaagatagccatggtgagcccggcagtgggggtggcaccttgaggccaggcccgcgccccggctggcgggccactgaccagggcggtccccacagcaaaccctggacatgggccgcatcggcatcgcctcccaggccctgggcattgcccagaccgccctcgattgtgctgtgaactacgctgagaatcgcatggccttcggggcgcccctcaccaagctccaggtcatccaggtaatggtggcagctttaggagctgggcctagaggctggacagcgggcggagagtgtggcctcctgactgctctccgtcctcctccccctcccttctgtcccctggaggggcagctgctgacctgtggtgtggggtggggctattgcagttcaagttggcagacatggccctggccctggagagtgcccggctgctgacctggcgcgctgccatgctgaaggataacaagaagcctttcatcaaggtgcccacaggggtccccgagccatggcccagaatgtggtg

SEQ ID NO: 8770 - DNA, 1843 bp, Homo sapiens
gcaggagaattgcccgagcccaggagtttgagaccagcctggccaatatataggaagacttcatacctggaaaaaaaattttttttttttaaagaatcagacagctgtgtgtgcctcatgtttaaatctgtaacttagaaagtcccttgtttcccagggcgacctccggcggatgtggtctgagcctttccactccaagtccagcagctcccgattcctggaagtatgatggatcacgtggaaagtgaccagatggccgtcatagtccttttctctcaactcatggtttgtttcctcttagagctggcctggtactcagaaatgtacctgtgtttaaggaactgccgtgtgactggatttggcatttaaagggagctcgtttgcaggagagaggtgctggagccctgtttggttccttctcttcctgcggatgtagaggtggggccccttccaagagggacaggcctctccccagcgcgccttcctcccacgtttttatggatctgcaccagactgttaccttctgggggagatggagatttgactgtttaaaaactgaaaacagcgaggagtctttctagaacttttgaacactaaaaggatgaaaaaaattagcaaaccgaagtttcttcaatgacccctcgagaactttgggaccagtttcctataggggactcagtttcagagaactgagacagaagctcttctgtcgttatattcttctttcctttttttggatttattaaatattttctgtggtgtgaagtgacttattaaatccacagacattgagtgacttcttacaacatccacataagaatttgttgtaatgagttcatgtccacccagatgttgtgttggcagtgaacaagggcacggtttttatacatacgtacatatatatatataaacacacacatagatatatatgaataaacaaaaatgaaatcctgctaagatcacgctgtgtagctgacaggggcttgctgtcgttttgagcatgtcgagcagtttactgtggcttccttgtatatggataagctgctgtccttccccttcacaactgaccccgcagttacaaactagtatagcatttgtgctgattgatgatagactcatggacttcaggagcccttacttggttttgatcagtgtagcaaattagggatgaagagttcaaaccttttggccctttctttcttttctaggcttctccctcgcagggtgttccgtagtttcttctcgagccaatgcatgtattatagcagcaggtgtctttgtgctttctcatcatagtaacgtactacttgtaaatacatttttctattttctatttttttgtatttttttttttgacattttgtttcattggtgtgctgtatattttccatgccctcactcctttaagaaaaaaaaaaaggaaaaaagcaacacaatcctgtccttgctgttgtgattatagtcttggtttacctgtggtgacaaccgggtgttggggacacatgtcaaatgcccctctgagatgggccctaaattccagtaactggggaaagaaccagctgctgtgtcctgagagcctggccctgtgctgtggtctctgctgcaagcccagatttctgggagtaactagtgttaggtctgctgacctttacctaagcagcccctgcctggtaagaaggtgcccattgttcagaggcaaagagaagcctgcggttggcatgaggatgcctgacaacaaaggctggagaagggccctgagttccagcctctccccaagggtccccgccccagtggctgcctctgtcttgacctgtgtaatgaattagtgtgctgtgtcactgtg

SEQ ID NO: 8771 - DNA, 1859 bp, Homo sapiens
tccatctgatcagctgtggtgtgaggacttctcagacaaaggcaaggcctcgtgcccctgcccagcccattcatggagccctgggccttcttggcttccatagatcctaagctcttgactgtagtttagccagacttgttttgctatcttataagcagttcagaattagggaatgctggttttgaagagcaaaggacaggtagtctagagagggtcgtctggcctgcttgctgggtctttgtaacccagcacttcctcttgccctcctggctttatgtttatggggagaggactcaatagctccaccccttctggcaccagatggggcttggttagtttgcaataagcaccttgcagaggttaaagccagcgggtccctagtcttaggcccagcctgcttgtgtgggctctggcctggcctggtggctggcccagggggcagcagtgcttagagcttctgcagggcttctcttgtttacacagctgcatcagacaatgccatttctccccaccacggaaccttccatctaagatttcttccagggaatgccagcaatcaggcagcacccagctgtgggggcagtggggtgggggagacccacattgatgactttttttttttcttttaatgaagaaacaccaaagaaagctgtggaaaggacctgccccacatgaaaaggataagccaagatggctgtaaacacagagcatttgagctgccactcttggagcacattgatttttcaaaagccagctctgtcaggaaaggaggtgctgttatgagcagctcttccagtgggcaaagaggacgcccataatttcttccattgctagctcatctgtgggaccaatttggtgtaagcaacctgtggcctgcacttgtggcctcgaaggaagcacaaaccctccatccacttcccatttcctctgcccttttccacctcccccttccatcccaccagctgccagtggctcccagaaagccttattgagccccttgttgacacttggggctgcggaggcctctccctactggtctggcctttcctgagaggcaggtcttccgtcctcagagcctttctggaacaaggagaatgcctgtgcaggtggacacacaggcctggcctgtcgctctcacttgtcttccagcggggagcttcacgttgccgagtggaagaaccatgacctccacttgcttccaaggtgctagggaagtttcagggtacgctggttcccctctccagctggaggccgagtttctggggactgcagatttttctactctgtgatcgattcaatgcccgatgcttctgtttcattcccgaccctttctactatgcattttccttttatcaggtgtataaagttaaatactgtgtatttatcactaaaaagtacatgaacttaagagacaactaagcctttcgtgtttttccacaggtgtttaagcttctctgtacagttgaaataaacagacagcaaaatggtgccaagcctgggcctcttggggaggtttgtattggtgattgtttatttaggccgcctgccctgatgtctgtattccttcctcaggctgacagcgaggtcagatgcccaagtcaaggctaatgtattcagcaaatctctaatttagagcatgtcctaggaccttgctactcagtgtggctcccagaccagtagcgccagtgtcacctgtgagtgggttagaaacgcaggtgccggccgggcacggtggctcacacctgcaatcccagcactttgggaggccaaggtgggaggattgcttgagcctaggagtttgagaccagcctggacaacatggcaagaccccatctcttaaaaaaaaaaaaaaaaattaa

SEQ ID NO: 8772 - DNA, 1164 bp, Homo sapiens
atctctggttatttgttttttcctttgttgttttaaaggggacaaaaaaaaaaaaaggacttgactccatgacgtcgaccgtggccgctggctggctggacaggcgggtgtgaggagttgcagacccaaacccacgtgcattttgggacaattgctttttaaaacgtttttatgccaaaaatccttcattgtgattttcagaaccacgtcagatataccaagtgactgtgtgtggggtttgacaactgtggaaaggcgagcagaaaactccggcggtctgaggccatggaggtggttgctgcatttgagagggagtagggggctagatgtggctcctagtgcaaaccggaaaccatggcaccttccagagccgtggtctcaaggagtcagagcagggctggccctcagtagctgcagggagctttgatgcaacttatttgtaagaaggatttttaaattttttatgggtagaattgtagtcaggaaaacagaaagggcttgaaatttaataagtgctgctggaaggggattttccaagcctggaagggtattcagcagctgtggtggggaaacatttctcctgaaagactgaacgtgtttcttcatgacagctgctcaaagcaggtttctgagatagctgaccgagctctggtaaatctctttgtcaaattacgaaaacttcagggtgaaatcctatgcttccatgtacattacatggcttaagattaaacaaaaacatttttcaagtctctaactagagtgaactctagagcacagtagttcagaaactatttagagcttccaggatatatttcacagcttcaggcatgtgatcagttagagccgatgaaacctatgcccgcctgtatatatattagcagcttagctagttcataacctgtatattctaaagactgctaaggttttgttttcattttaaatcctagctgattgttgtggtcaatgaaatacccagtttctggagggccaggtgggaaatgctttcactggaccaacacacaaatgatcatcctgaggatctgagcttccctagactccacacaataaccttggggcacccttttagagaagactgttgaaacccacagcactcgttggggtatgaggaaaccagggcttggcacaggaagttcccctttgtag

SEQ ID NO: 8773 - DNA, 2499 bp, Homo sapiens
tcttgctgtgttgcccaggctggtcttgaactcatggcctcaagtgatcttcctgcctcatgctcccaaagtgttgggattataggcatgagccactgtgcccagctctagtgtaccattttaattctctcttttttttttaaacatactaacaccaaccggaatctcttgtttcttttgctttattcttttgagttattttctggattgttacctttctcccacctagttcaacccctcagaatcaccaagctaaaggatattaatgctggatctttttgtaaagacaagaaccttttcatagtgtgaataaccgccccctgctatatttgtcatagtctgaaatcagattgtcacatgttgtgttttctaggaatgtggttcctgttttaacgtagtacatgtcaggtaaaaggtaagccagagatagccattcaggagagaactgccagaaatgaaacgcttcctggtgaagggcagtgggtttgggtatgtacagtgccatgatgtttctttttcagctcattcttggaatcccagaacaggccttaagtcttctccacatggccatcgagcccatcttggctgacggggctatcctggacaaaggtcgtgccatgttcttagtggccaagtgccaggtggcttcagcagcttcctacgatcagccgaagaaagcagaaggtaggaagctgtacgaagactgttaggcaatgctattccagaaagcattgaaagtttaggacccagaagaagaaaagacattaaatttgggacagcatttaagttctgagtgttcacaaatatatattaaaatttcatgcagcatttaaagtgctttcacatgcatgcttggcagaaagattgaggacaagtgaatggctattttaaccctatagagccaagtaccaggctagaagtcaggagttaaagacttttttttttttgagacaaagtctcactctgtagctcaggctggagtgcagtggcgtgatctcggctcactgcaacctccgccttccaggttcaagcaattctcctgcctcagcctcctgaatatgtaaaggcgcacaccaccaagactggctaatttttgtatttttagtagggctttctccatgttggtcaggctgatcttgaactcctgaccttgtgatctgcccacctcagcctcccaaagtgctgggattataggtgtgagccactgcgcccggccttttttttttttttttttttttgagatggagtcactctgtcgcccaggctggagtgcagcggcgtgatctcagctcactgcaacctctgcctcccgggttcaagtgactctcctgcctcagcctcccaagtagctgggattacaggtgcctgccaccacacctggctaatttttgtatttttagtagagacaaggtttcaccatgttggccaggctggcgtcgaactcctgacctcaggtgatccacccgcctcggcctcccaaagtgctaggattacaggcatgagccacttcgcccagtcttaaagacctttttgaaaacctcaccctagtggtttgttttttctctctcaaagaatggagaatataaaagaatcttctggtagttgttgaacaaataaaactaaataccacgttttgaaaactatacgtgaagggttgagttaaatgtgtgtgttattttcccctttccgtcagctctggaggctgccatcgagaacctcaatgaagccaagaactattttgcaaaggttgactgcaaagagcgcatcagggacgtcgtttacttccaggccagactctaccataccctggggaagacccaggagaggaaccggtgtgcgatgctcttccggcagctgcatcaggagctgccctctcatggggtacccttgataaaccatctctagagaggacatccctgctgggctgctgtgcagagtataagattttggacttgttcatgtcccctctctccctataaatgatgtatttgtgacaccctatcttgtcaataaacagcattctgattagtttgtcttattttgttgctagtaactacgtatttgttttattccccttttcttcccttttggtagcaaaggacaccaactttttcttaataaatgggtattttgctaacaagttagtgcaagcatctcagattatgttctctctgggcaaaattgccaatatcttgattagaaattgtacacactccatcattatgtaaattcatttagcacctattctcagacaagagctcttcctggaattggtagatctctccagggtggtcagtgcaggtctgtatgaggcttggactttcttctgaggcctccctgccttgttggactgaaccagcgcttgtggttcctgtggctgctcacgaggacttgttggtccctgactggagattaagaaggaaaagattttttcataatttttggaccaatgaccaggagcatttttcagtccctttctagatgttggctttcttatat

SEQ ID NO: 8774 - DNA, 1157 bp, Homo sapiens
gataaaaatagcttttattataatataaagtgggacataatctcccctcagaaaaataatattgagctaaaaaggaacttgtcaaaggatgcttacaagtatgatattatttatataaagtttaaaaacacaggctcatactctatgttgtttagagacaagggtatatgttgtaaaagtataaaaaacctgaatgagaatgataaataccaaattgagtgcctactttgaaaaaagagaaagagacgtagaatttgcaaaggacttcattggtatctaatagtatatgaagcagataaagcaaaatgtgagttgacaaagttgatgattggcacacatgtatctgctattttattctctgtgctttttcacatacttgagatattttaaaaaaattttaaatccccccaaaaaagaatatgtgtgaattattgtaaggatatttgctaagcaatccaaaatactttcatatactcattaagatgaacattcgccattttgtacttaattgtgtttttttttcttactagttatggatgctatgtgatcaaaaaatacagtttgacagagcaatgaatgatggcaaatatcatttggctgattcacttgttacaggaatcacagctctcaatagcatagagggtgtttataggtaagaaaccttgaaaactctaaccccagaataaaataattgttaaatggttttgtttttgttttatatgtgcattaatttattttagcttagaaaaaaactttattttcttaataaataagaaaatacaggtaagcagctgggcatggtgacttacacctgtaactgggcatggtgacttacacctgtaatcccagcactttgggaggctgaggcgggcgcatcacttgaagtcaggagtttgagaccagcctggccaacatggtgaaaccctctctctactaaaagtacaaaaaattagccaggcatggtggtgggtgcctgtaatcccagctacttgggaggctgagggaggagaattgcttgaacccatgaggcggaggttgcagtgagccaagatcgcaccattgcctccagcccaggcaacagagtgagactccatctccaaaaaaaaaaaaagaaaatacagataagcaaaatgaagaaaataagtatctcccagaga

SEQ ID NO: 8775 - DNA, 1119 bp, Homo sapiens
ctgtcgctacctcacccctcacttagacagtctgtttctaggaattcagtaatgaaaggaagtgccttttttaccagtcttgtttttgtatttcagataattttttggcacggtgtgctctgaaacagctgcagacactggccactgcttacattgccagagcagtctgtgccaggatggcatcgggtctgaattcacccgtgaaaactaattaacatactatgactgcagggaacatggggtgggggcggggggatctgggagcgtgtactcccagctgtgccctaaccactacgtgtctcctcgcgctgcacatccaggatgcttttctgcctttcttatcctgagggcaaggttgctggcactgggaggcatctgctcccaagaaagccagagcctgtgaggtgtatgactttacgcctccactcaagatagctgacgggcatggccaaagcgcagccaggtctgctgctgaaaggaaatcctgttccctctccccacccagcaccatggcactgcaacaggcccagatgttgctgagcatgaacagcctggaggcggtgaatgcgggcgtgcagcagaacaacacagagtcctttgctgtcgcactctgccacctcgcagagctacacgcggagcaggtaggcaggtggccgggcccacgtgcttctggagcaatggaggctctaccatttctttcctctaatgcttgaggaaagcactggacacgtgttggacagttctgctcgacactgtggctgaaagagtgaaatcccaccagtggaaggggaccaagggtggagtctgcaaagttggttgaatttgaggtctttttttggcatcaatgaagggaattctaagaggtcagccagtttcatgtaactaaggaaataaataggattctttgacatttaaggtagcagaggtttgtgtgttttaggagagaggagagtataatagaagtatatctgaaatcataataactaatgttggttgtaaatttgttctgtgccagtccctgtgcctattttatgggtactgtctcatagaatccacttcatgggctcaggtttgttgttatccctatttcacagaactaaagactgaggtcctgggagc

SEQ ID NO: 8776 - DNA, 1334 bp, Homo sapiens
gtagcttgtccattgattcacacctgggaaagaaactcatacgtacagaattgattataatgacaaaagtggctccttgaagtaagcgcaggcttaactacaatttttgccatgaatttaagctggcattttttagttgagctttcatccttgaagatgacaccaaaagctaatgacaagataattttgttgctcatgataggcatccttttttgatctcctattacatatgtgcgcagcactgtttgacatctattatttcattgtaatccttacgataattctttatgataggtttgatgcccattttacagatgaggaagctgaggcttagctaagaagctaagtgactggccctaagtcacacagtaagtagcagaggcagtgtttaagtccaggtccatctaatgctaaagccctgctggctctttcccgtgtaccctctgcctctctcccagacccagtttttcaggaacacatctcgtatggctcagggttaaggccaggttataggtactttccttttaaatagtgctgtcactgtgcatgtgctgaaatgtgaaatccaccacatttctgaagagcaaaacaaattctgtcatgtaatctctatcttgggtcgtgggtatatctgtccccttagtacctcgcctccctgggaatacagtcccttgttcaacagagagcttttgctgggaagacggcaaacaagctgatggatgccctaaaggactccgacctcctgcactggaaacacagcctgtcagagctcatcgatatcagcatcgcacagaaaacggccatctggaggctgtatggccgcaggtaggtctcccaaggccctgggggtgtgaattctttagagagaagcaggagctagcaagctggttctgtgaaaggccatacatacaagatttacctgccttggatagatgttgttcctgcaggggactatgttttagactataaaacattttgtattttgcacagactgaaaacttttttcccatgcatgttccttcttactcctcccaaccactttgtgaggtaatgggtgggtgatctccatgctgggagagtaaaccagggttcacacatctgatctacccgcgatcgcaaacgcagttaacaagtgacagagaaaggactcaaacccacgtcatctgactccaagcaccgggctcctctgctctgtgacaggaaccttcctgtttataggaggcatgatccatggttgctctagttgagtgtcacctgaaccccaaaactattgtgtaaaagaaagttgcttttctgttaactgaggtgttttctgtggaatattttcatcttat

SEQ ID NO: 8777 - DNA, 1424 bp, Homo sapiens
gtggggtcagattggcaattttactatagtttgatagtgccacagggggggtaagtgcagagggcttatgggagcatggaggggcttataggatctcaccttcatctagaaggtgacagaagcaggtggcccagaggatgagctaggcatgggcgtcggtttgctcagctttgggtagtatatggctggggagcgatgggtgggaggcttggtgtttctggaagaggaaacagtgttgtagatggtcaagaggagagcatgtggcagggtccaccttcagtgttacctagagtgagggaaggccagccaaggctggcgagatgaggggccagagcctgaagggacccctgtagaaaagaaaataatcaggtgatgctagttagtatatcttttcatatgtttattgaccctttctttctactgagttaccatttttaaatttcaggcttctttgctaaagaatgatgagactaaggccctcactccagcttccttgcagaaggaattaaacaatttgttgaaatttaatcctgattttgctgaagcggtaagtctttcccagaatttgttgctgtgttggaaaggaatgacaaggcaactttttttgtttgtttgtttttggaaacagagtcttactctgttgccaggctggagtgcagtggcacgaccttggctcactgcaacctccgactccctggttcaagtgattctcctgcctcagcctcccaggtagctgggattacaggcacgtgccaccacgcccagctaatttttgtatttttagtagagatggggtttcaccatgttggccaggatggtcttgatctcctgacctcatgatctgcccgcgtcggcctcccaaagtgttgggattacaggcgtgagccactgcgcctggccaaggctactttttatattgagtagctgtgcaaatgagaatcagcccattggcccaggttcttgaaggaaatcgtgttcttggtaggcaaacaactcggtataggttgcaaagctcctccctccctcctcgggccataggcgatttcttcttactcttgatgttctctttcagtcatcatcctcctgatgttgtaaagtttggactggagataatatactagactgatgcaaaaaacagtgtttgtttgtttgttttggagactgagtttcgctcttgttgcccaggctggcgtgcagtggtgcgatcttggctcactgcaacctctgcctcccgggttctcagtgattctcctgcctcagcctctcgagtagctgggagtacaggcacacgccacaatgctcagctaattttttgtatttttagtagagacggggtttcaccatgttggccaggctggtctcgaactcctgacctcaggtgatccaccctcctcggcctcccaaagtgctgggattacaggcat

SEQ ID NO: 8778 - DNA, 2280 bp, Homo sapiens
gtgatcttcccacctcagactcccaagtagctgggactacaagcatacaccaccaaacctggctaattttttgtatttttagtagagatgggattttgctttgttgcctaggctggtcttgaactcctgggctcaagcaatccctccgcttccacctcgcaaagtgctgggattacaagtgtgagcaaccgcacctggctgaaaaatgggtaacattaagcatactgttttatagcttttttccccaaattttattattccttatggatccatcttactctttttagtcattgcagataattgaatgtttattggttgatgtgatagtttgacaaattttatgatcaagaaaacaacaatgatacttttcagaaatacgggagtaacattttgaattatgaagtttgttttatgagccaccattttatacaaatctctgaattgcctgtaaaatacattatttgaggtaattgaggaatatgaaacatgagaaattattcaaagggcctttctaaaatatgcacctcgattttctcattcagaatcaaactgatggctgaaggcgagttgaaggatatggaacagttttttgatgacctttcagattctttctctggaactgaaccagaggttcacaaaacaagtgtagtaggtatgaaactcttctaagaagagcagagagtattttcattgaagtgagcagctttctaagtcatgtctatcattgttctgctatatctgtgaacagacacagtggggatgttggaggtgttgcagtttgtatttattgccttactgttttgatctatatttaaatcattaactgtggaaaagcaccttctgttttgtctacaatagtaagagtcagagcctggtcctggggtttttaggggttcccagctctttctcacagtcctctggatcacttgcctgcatggtccatctgtaagtgagggtcaccagcccagacttatgaagagaggtaagtaaaaatacattattgatatagtatgcaaagtgagggcatacgtggtgtttctttgatgcttttctattagctttatcccatgctctatccctctggcttttttgcatggtaatttttatgttattcagcgtgagctatttctctctctcttcctatgtgccaggctctggacgtgtaagatagacatggaatttcctcttatggagattacctctggttgggggagccagttggtaaaagtaaacacataaatatcatttcagatagtgtaacagccatgaagaaagtaaaatggaagccttcaggtggaggtggggtgggtagattgtgccctgtataagaagaaaccagctttgtaaaggactggggaagaacattccaggaggagggaatggcaactgcaagtgtctctttcttactcttctgaaggaagaattccagcagacagtcattgccattgtggagttgccattgcgtagcctggatgtcagttaatgctttccccttgtctctcgtcttattttgtaggtttgtttctgcgtcacatgatcttggcctacagtaagctttctttcagccaagtgtttaaactgtacactgcccttcagcagtacttccagaatggtgagaaaaagacagtggaggatgctgatatggaactgaccagtagagatgagggtgaaagaaaaatggaaaaagaagaacttgatgtatctgtaaggtaatttggcttttctgacagggatccttttcctgtgaaatagtataatttcaagtgcaataagtccttgttcatttagaattcacgtgctggcttatgccctttttacccttccagatctgggaagttaactgataagggctgcaccagtgggtcccttgccctctgacttgtgattggccaatgggaggcactggcaggaaatcccaagggccagggagaatgacgtggagtgtggattcattggctccctttcttgggggtcctggggggctggctgtagggtcacagcttctgtcaggtcgctctttctgcactccttcagggggttcggtgactaggagcaagtgtttgcaggccccaggtgaaaggtaccccactgttatcagtcctggggactgtattgtgtcttatgacttctctgtcctttcccctacttttgtcaattgatcctttgttaaactcttctcagactactcaatttgaatgtgttctttgttttctgctgggtccctgactggtattgttcatcacatcagagtgaagtaacacttgattaattcagtgaaaa

SEQ ID NO: 8779 - DNA, 1130 bp, Homo sapiens
gggttgtaacaaatagttaattatagtaagaaaaaccaaattgaataattttctaactcacttggcagtggtggtctcgcagccataatgaacatcacataatgaagttactcctttccagatctataaacaggctcatgtaactaactgatactcagtaaaatggtacacagctttctcaaaaataaatttgacttaattgtgacaaaaacaacccagtttttaaaagcctaaggaaaaatactacagggaaaaaatgaaaagataaacctacaggacttttggttttcttcattctctttgtataaccggtttactttctctaccagttcccatttttcacaacagccagaatagttgacaaaattccgagccagaatttccttcagctggcgcacgctcattccttccacatcatcaaggcttgacaagtcagacagtgaagctctcactctctccttggagagcccggggttctgaaaccacagagcatccattagccctggtcccataagtccagaccctccccactctaaactcatcactggccctgaatattctcccagccatctcagcagtcctagaagtgtttcagtatactgtcctacattcaaaccagaagaaacatcctgtactaatctagcgaatgtccacagggcactgtcccttcctgtcaggctgacatgtcagggaaaccaaattttataggtggcctcacccgatcctctgcgttttcttcttcatcatcatcatcctcatcatcgtcgtcatcatcatcttctgtgtttgctgaagtgatttcactttgtacctacacttatacaacgtatctgattaggtcaggaatcaatctgtatttatcactagagaaaaccttgtcattgatgctccccatgatgaccagaaagccagcataatgcacatctttggattcagaatgctgctgacccttccaaaaagttgggccctacaaaattgcatgaagaacctaccttccataaagttagctcaaaacacaaattcctgtgtgtgtgtaaagttataaaatctaaccagagtattaactctctcaggaaggtcccataatggaatgccaaagccattaaggatatgggacagcactgtgtcat

SEQ ID NO: 8780 - DNA, 1192 bp, Homo sapiens
ttctgaatccaaagatgtgcattatgctggctttctggtcatcatggggagcatcaatgacaaggttttctctagtgataaatacagattgattcctgacctaatcagatacgttgtataagtgtaggtacaaagtgaaatcacttcagcaaacacagaagatgatgatgacgacgatgatgaggatgatgatgatgaagaagaaaacgcagaggatcgggtgaggccacctataaaatttggtttccctgacatgtcagcctgacaggaagggacagtgccctgtggacattcgctagattagtacaggatgtttcttctggtttgaatgtaggacagtatactgaaacacttctaggactgctgagatggctgggagaatattcagggccagtgatgagtttagagtggggagggtctggacttatgggaccagggctaatggatgctctgtggtttcagaaccccgggctctccaaggagagagtgagagcttcactgtctgacttgtcaagccttgatgatgtggaaggaatgagcgtgcgccagctgaaggaaattctggctcggaattttgtcaactattctggctgttgtgaaaaatgggaactggtagagaaagtaaaccggttatacaaagagaatgaagaaaaccaaaagtcctgtaggtttatcttttcattttttccctgtagtatttttccttaggcttttaaaaactgggttgtttttgtcacaattaagtcaaatttatttttgagaaagctgtgtaccattttactgagtatcagttagttacatgagcctgtttatagatctggaaaggagtaacttcattatgtgatgttcattatggctgcgagaccaccactgccaagtgagttagaaaattattcaatttggtttttcttactataattaactatttgttacaaccctaattaaattcctcgtctctgtaaaaatgcttattttctcactaatgcctttggccggccagtaccttggttctctcaacttttaaatctaacagtagggggaaaattccctatagcccagatgttacatagttcttagcatcaactatctgtagatttctgtgtaagtcacaaaaagctgaggttaagaacttctgaactaggctgggcttggtggctcacaactgtaattctaggactttgggaggctgagg

SEQ ID NO: 8781 - DNA, 1196 bp, Homo sapiens
tcaccgcaacctccgcctccagggttcaagcgattctcctgcctcagcctccgagtagctgggattacaggcatgtgccaccacgcccggataattttgtatttttagtagagacagggtttctccatgttggtcaggctggtctcaaactgacctcaggtgatccgcccacctcggcctcccaaagtgctgggattacaggcatgagccaccgcgcctggccggacaataatgttttgagctgttgctgagtctggcttttgtgacgggaacttttagcactcaaggagtggccttgtctctggcctgtccccgagtgctcatgggcagccaaggcctggggactgctcaggcagggtagatgtatttgccaggccagctcccgtccctgggacctcagggagtagcttcatccctgaaggctgagtgtcttctgcctcatgtgggtggcccctctgcagggttctcaggcatccagggaagtgggtgccacagcgttgcctccagcctcactggggctggctggactttgctctgacaacacagcagtggctgggcccctgcaactctccagggctcagtttccctgttggccgcactatggcataggcccctgtgtggacaccgatgagctgaccccacaaatgccacccggccgctcccccaggcttcagtggcctaacagctgttgtgtcaggaaccagcttaaagaatctttcttgctttctcaaactctccaggaattcctggtgactggaagggggagtgactcaggccctcaacctctagcaggtaagggagctacctcctgggtgggcatgcccagttcctcagtgggcccagcgcggcccagcctccgaggaagctctgagcagctggcttggctccgaggtatttttagctacagatccagcccccctccatcaccacaacagtcgagtccaaatcaaacgcgctccaggcaggtggggctggggttctgccagcctcctggccagcaggggtgggtgggcagactggggccagtatcagctgttctgcctggacccaggccgggctgggaaggcacacttgtgcttatttcccgcctccacttctgtgcaagcttgtgctgtcataagcagagatcacagccccatttcttggatggagaaagtggacactgaggtctgaggcttttgaggacagtcaggagc

SEQ ID NO: 8782 - DNA, 1150 bp, Homo sapiens
gacctggaagtggagccggagccccctatgatgctccccttgccgctgcaaccaccattgccgcccccacgaccaccccggccacccagcccaccgccggagcctgagaccacagatgcctcacacccatctgtccctccggagccccttgccgaggaccaccccccgcatactccaggcctctgtggcagcctggccaagtcgcagagcacagagacggtgccagccacaccaggcggggagcccccgctatcagggggcagcagtggcctgtccctgagctctccgcaagtgcccggcagccccttctcctacccagccccgtcccctagcttgagcagtgggggcctccctcggacacctggccgggacttcagcttcacacccaccttctccgagcccagcgggcccttgctcctgcccgtctgcccactccccactggccgacgcgatgaacgctccgggcccctggcctccccggtgctcctggagacgggcctgcccctccctctgccccttcccctgcccttgcccttggcattgcccgccgtcttgcgggcccaggctcgtgcgcccaccccgctgccacccctgctgcccgcccccctggcctcttgccctcccccaatgaagaggaagccgggccggccccggcgatccccaccatctatgctctccttggatgggcccttggtccgaccaccagcaggggccgcccttggaagggaactcctgctcctgccgggccagccacagacccccgtcttccccagcacccatgacccccggacggtgaccctggacttccggaacgcggggatcccagcccctccaccaccccttcccccccagccacccccacccccacctcccccacctgtagagcccaccaagctgccctttaaggagctagacaaccagtggccctccgaggccattcctccgggcccccgtgggcgcgatgaggtcactgaggaatacatggagttggccaagagccgggggccgtggcgccggccacctaagaagcgccatgaggacctggtgccacctgcgggctcgcccgaactctcgccaccccagcccctcttccggccccgctcggagtttgaggagatgaccatcctgtatgacatctggaacggtggca

SEQ ID NO: 8783 - DNA, 1104 bp, Homo sapiens
tcccgccattacgggttgtcagaccgtctgcgtgtggcattttttggcttataagcttcacccactcacccccaacccacaccccacatccccctgccggcagcccctcaacctaagaaggccagagcatatttattttcggagggagcagattacttctcccagagaaaggaaaatcttggaaaagatttaaaaacacaaatctaagccttgacggtttttttttcccttttgacccccttcccatctcttcagaatttattcccatggcttttttttttcttgtgcgtgtataaaatcaaaaggaaggggaaaaaggtttttgaagttcagaaccaacttctgtatatagaggctgccgcaaaggactttctcttgggaacattgtttcttgtagaaacatgcgggaagacattttttgctcatttctttgtacttccaaaaaaaaaggaaaaaaaagacaaaagcaagtccccccgtaccccagaaagcagaggaggcgtgtaaataatttctggaaagtgactgttgtgacccggagtcctcatcaagatgagcgcgctccatgagggagctgctcccaccctgcggacgcaggcggccggagcctctggtatctcagcttgtgtcaagcttgttatcatgtaaattctgtacaaagaattgttatttttctcttttttgttgttggtggttttgttgtgtgttttttgttgttttttttttattcctttcccccaggccctctctatttgagactgtgcccgccggtttcaagatcaaggaaattggtggcaacaagacacagatggggtacctgggcacagcggcgaacttctcttccgtttgcggttttctgcctaattgtgcaactgaggaaataatttatttttcacatgaggaaatgcgtagcttgtagagacggctgattcaagttacatgtacagcctccaaagggctgtctccattctgtccccttcccataaaagaagtgggggtgttcgagaagaccagggaagggacccttgcctcacccctccccctggcctcaccttgctcccagccatcgtgcccagtgttaacctcggctggccttcactaagg

SEQ ID NO: 8784 - DNA, 1098 bp, Homo sapiens
ctcatcctcctgagtagctgagattacaggcatgtgccaccacacctggctaattttgtatcttcagtagagatggggtttcaccacattggccaggctggtctcgaactcctgacctctggtgatccacctgcctcggcctcccaaggtgctgggattacagatgtgagccattgcacccagcctctctatcttttttttaaagttagtcacaacctacagtgtgaaaacatggtcctggccatctctttcctgggtctataacatgtctccttcaagaagtcacacaaatggttttaggtgccttggtggctttgtcttcctgtcccctggggttgagaacaagctgtctcactggcagagaggcagcctctgcagggtgggccaggccctgtggcccagggctgcacctgaacatcctccttatcctggcagctgccttttcaggccaaccacaagcggtgatcatgacgtcagggcctctgaagagagaagggatgttggcctccaccgtgtcccagtccaacgtggtcattgcgcctgctgccatcgccagggtgaggagggccctaggcagacctgcagtgtccttctcaccccggagcactctgatcttgggcggccctcacctgagacgactggtgtgccgccctgctgtatatcagcagtcaggggtgacctgtctcccatgtcactgcaggctcctggggtcccggagttccacagcagcatcctggtgacagatctcggccatggcacgagcagcccgcctgcccccgtctcccggctcttcccaagcacagcgcaagaccccctggggaagggcgagcaggtcccgctgcatgggggcagcccccaggtcactgtcacagggcccagtgagtgttcactcggcgggatggttggggcatcgcaagggaagtaactgggcctgccgtagaccatggggggtgcttgctgggtccccaggacggagcctgggcttaggacacacagtgaggtcttgtaggcctgctgataacacagtctgggaacacgctctgtgggtggcaggatgaaatgtggtggcactggcagggcaaaaagtagtgaacatgt

SEQ ID NO: 8785 - DNA, 1108 bp, Homo sapiens
ggcagcactctgtggtggtcagccctcagagctgtttctaggcatctctcagatcagacagcaaagaatctacccagatctgggctgggtggaggtgtggctgggctgggggccattctgagcctgcagtgagagtttggcccagcctcagtccttgctcttctctggctacctctgcagggagctgcaggggcaagcactctctccagcactcaggaagcccggccgagggtacctcctcgtggaaagaatgcactttaaagctctgctgaggagttcggagcccaggctttcaggcgacctctgccctccctgcctctcctcaccctccctctcttcctgcagggcctgggaagggctttgagggagcctgggagccatgtgaagaggggcacgcctgggctgtcccacagtttagatccagttggaggttctccctggctcctgcaggcctgcggggatctctccccacttcaggcctccggccagctgcctgccctcttgtctgtgcttcagccctgcacaaaagcagcttggtgacaccactcagccacccagagtacgtgtttacaggctttccagatcaccttcctgtggggtgaacgtaatgaggcggggctggtccttggaatttcccctggaaaatggtaacagactccatccttgacccggggatgagcatgaaggcattgtcccaaaggcagaggccaccgtggtaggaattccaccaaggccagaagggaaaaaggaagaacccaccgtgtctggctgtgcgggccctggggagggtcgtgagtgcagcccctctctacttctgtgcctttgtaaaacgtgtagataaccgcagtggttggctgagccaagaactctcctaaatcagtggctttctccccaccccttgctggggagtcatttttaaaaaaatctgtgggatataaaattggcctcctgctgcttcagcctacctctccctctgctgacttaatgtcgtgattctgtttcttcagatatttaaggctgttaggttgtgtgagccttgaagtgtgtgtgtgtgtcccagcgactgtccactgtccaggagatgcatgtctttgtattggagatattt

SEQ ID NO: 8786 - DNA, 2047 bp, Homo sapiens
aaaaaaaaaaaaaaaatttagccgtgtgtagcagtgagtgcctgtggtcccagctacttgggcctgaggctggaggattgcttgagcctagaagttgcagtgagctatgatcatgccacactgtactccagcctggatgacagagtgaaaccctgcctctaaataaaagaaaatagaggcagactgtggtggctcacgcctgtaatcccagcactttggtaggccaaggcgggtggatcacctgcagtcaggagttcacaaccagcctgaccaacatggtgaaaccctgtctatactaaaaatacaaaacattagccacgtgtggtggtacacgcctgtaatcccagctactcgggaggctgagtcaggagaatcacttgaacctgggaggcggaggttgcagtgagctgagattgtaccactgcactccagcctgggtgacagagcaaaaccctatctcaaaaaaaaaaagaagaaaaaaatagaaaatccaaaaagaaaaaccagaaggcctgctggcgtataaatccctgggcgggtttctgataaattgccctgtgctgtcagcccctgcactgcactgctgccttccatggtgggtgggagaccccagagcggggcaggcgccactgagggcttttcttggagtcggccagcaggccacgcagcatccggcaccctgggcgggctggctagctgccttcttaggacatctctactttgaaggattttaccgcaggaagcaatagcagcgctggccattggtgctgatgacagcattgggtctggttgaggggaaggggctggaaagcagcagacccccccagtgctgcgcatggtcccggagctgtcagccaggggagtggggtcagccgtcagccagccctcccatttcccgcccatgggccctgaccacactcccttttctagaagtcaatcctaaggtttctctgctctggctaagaggatgtaaatttggattcttagagggcatggcacccccagtccctgcccagataaagtagcacagtggcaggcagcacctctgtctgttgctgacgttggggggcttacacacccacctcatctccgtgcacagccatgactggccctgccggcagctggggtgcaggtaagggtctctctcatagaggggagctgcagctgagaactggcgaggccccttcctccaaggccctagctggcccccgggtgaacctgaggtggcaggttcaggttttcaagatggtgaggtctcgctgtctgctggacagtacgttaggctctcagaactcatgggtgtggagctgggcctgtcccgggccagtggacccctgtgtgtgggggatttggggtgctgtgggcctggttatgcactggcagatggaccttgctttggtccagctcttttccttaccctggctctgacgtgggaaggcttggagggcccgtctcatcacccccgttcgccctcagctgtccctttcccttgtcgcctggccgctgcctcgcccgcctgaggcctcctagcaggcagcctgggtgtgagttgagcctctctcttttccctctggtgggaaagtggcctttccctcaacacctgctccccggccccagaggaacccacctgttttggagctcagcttggcccagcgtttccttggggaagggaaaggagggctggacagcactgatccgggcaggcagcgtgtgcagcagtggccagccagagtgccaaagatgcacggggatgtggtgtgtggctccgggccctcgacatctctgctttgggggatttttaccttgtctgcacacttgtcaggggagaggggacagcaaggtgggaggttgaagagctttgaggctcagcagcatgtttgtggcattcggtggacaccatggccttgggcggctggacaggtttttgtgatgtgagggacacgcatggggcacatggtaagcttggcaagggctccaggaacgctgacgaagggttttaggacccccacccccatgcctgtaccagggctggcctccagagcgggtg

SEQ ID NO: 8787 - DNA, 1237 bp, Homo sapiens
gaaagaatgaagagtggcagagataataattgaaagattagtttctcatggaattaatttggccttgatattcagtatttggaaatgtcttaaagaaaaccattttcattgtagaaaatccttttttaaatacttgttatatcccagggagattagtttataccttccacctcaggcagtcatcagctgctttagagaatggaatccaccctgcccctccattttttggttcctggggctcaattcaagtctggtcaagtctccctggctggggattctgtcctgggaacagatactcagttgtagtctcatgtgtctgcactcacccaagactctatatacttgcttgctcagagcatagttagggcagctcctaaaaatgcattcagcagaagactgaaaaacttcaattgcttcatttgtatgcaaatagaaaatggtagataattatatattatacgcctttgtgtaagttcatttaatacttgaagcagtctttgtctcaaaagagtatgcccttactgagaaaggatatgtgaacggtacatttattgttggggagagtggattgtttacatcatgtctggacttttgtctagttgggtagacagttctacaccagcagcccccttaataaagaagtctacacagacactgttttgtgtcttgctatagagtgttgaattctaaccaacagagaattaagtattttgttaattgtggagcaaaagagtaatggttgaaagagggatgatttaaaacagcacatttaattctcagagaaaactgggacagtctcattgtgagttctattcgattcagatctgccctcactgcaaatggattatgattaagcatgatgtgttggtcggtcttgttctcagttgtacactaaagaccagcctgtcaccaggaggaagtgtttgtattgagcagagtttaattcaagaagaaattatttttttgagatgaggtcttattctgttgcccaggctggagtgcagtggcacaatcatagctcaccacagccttgaacttctgggctcaagcagtcctcctgcctcagtctcacgagtagctgggactatagcaaagcaccaccacacccagcaatttttttttcttccttttagagacagggtctttgttgctcaaactcctggcctcaagagaaataattctttttttctttttcattaaatttattatctttttaattttctgttggctagggtgg

SEQ ID NO: 8788 - DNA, 1184 bp, Homo sapiens
acagttttctcccagaagccccggctctgcccaggagaggtgcttccacggctgcacccaccctggggctgccagcctcagcgcctggtctgacaggcagcagttttggaaaatgaacttgagtccccaattttcctggcacagtgtgaaataactggaaatgattttattgtctgtcgctgcaccccagccccaggaacagagatgggcccctgggaggcccccatggcctggcaataattggccttttccctcacaggagtgctacctggagggtgaccagacgagcctgtaccacgcagccaaggggctgatgaccctgcaagctctgtatggaacgatcccccagatctttgggaaaggagaatgcgctcgggtgagaaccggctgctttgtggtggtaaaggagggcccttcacaccccaaaagggaggaggaacgggaagctccttacaaacaaattcagttgatcttaattatttatgaatactgtactcatgaatttgcctactgattaaaatgcacttataaccctccaagtcagtactcatggtgcttttgtcggcgtgcacagtggtgacagtttgagtaaccactgcgcatgttcccaactgaggcagctgacactccaccttcccatttcagctctcagactgcaaacaagtgtacttttcacagtctcactgtcatattttccacacgtgtgtactttttttggtgatttcactgtttaaaatggcctgcaaatgtaggactgaggtgcagtcgggtgtcttgtgcacaagaaggctgtggtgtgcctggcggagacattacgtgtgtcagagacgcttcgttcaggcacgagtcacagagctgctggctgtcagttcagtgtgagtgatcaacaattatgttaagtcaggcatctttaagcagaaacacatataaaactgggttacgtattgatcaattgacagaaacgttgagaccagaggctcccaggaacctaagtctgcgtttctcctaggaacagtggttccatcttcgctaatttagtgtttgcagtgacttcatagaacataactactgcgaatcacaagaatagactgacctgattttatgcctcattggcaaatggcagctgccttggtgcaagtgtcgggatgggtgccaacagcaaggtgcttttctagagctgctta

SEQ ID NO: 8789 - DNA, 1181 bp, Homo sapiens
aatctgtttacttgatctaaaaaaaagtatttttatttaatttctgaaatatttctgagttgcatgaaaccattcttttcaaatgtgtcatgatgtagcctcggaatgctgctcgaataagtgaaaagagaaaagagtatatggatgcctgtggagaagcaaacaatcagaatttccagcagcgataccacgcagaagaagtagaagaaagatttggaagattcaagccaggagttattaggtactaatggcattttaccatagaaggtcatttttatttccctagcatttggaatgttctgtgtctctttgggctaattatcaggatataagtgtactctggcaaagccctaggtaatatacattaattcatttagaaacacttctttaaattttaatttatatttgttagacgtcatggtatgtaatataagcaagaaatgttttaaaataccagaatactatgtgttttcatgcaaataagaattcagtatttttcttcctcctttatttttacttagtgaggaacttcaagatgcactaggtgtgacagacaagagtcttccaccttttatctatcggatgcgccagctagggtacccaccagggtggctcaaagaggctgaattggagaattcggggcttgcactctatgatggaaaaggtatagtatcttaagttagagaagtcaccttaagtgtttcctttttttttttaattaaagaatcacaacaaaatgtgataggaatggccggcttctttaatgtgtgctaactaaaaaatatcatgatgatgtttccttggtaaattttacaaggaaggaataaaatttcagtgagtttgtagattatctgatggttttctgggcttgctcaggtactgtctaggccagagtatcacctctccagccagtcctcataagctcttatctttgtcagtaataataacagacataaatcctaaatgccaggagacctgtaaaatgtaaaatacagaaaacctctaatagtctagaacttctctcctagatacctaccctagaaagatattcacacatatgaaaaggaaattgtatgtatacaagaatctttttgtatcattgaatatgatagtgaaaaatctacgacaacattaaggccctaaaaaagaatggttaaataaattggtagttctgagctgtg

SEQ ID NO: 8790 - DNA, 1792 bp, Homo sapiens
gttaatgaaactactttagacaattattagtgagttttaatttttatgtcagtgtacttagactgacatatgggtcattttaccctaccactctttgaaacaagccagaatagcttgatggttgttcacatacagaacagttcttgacatgttacagttgttactcttcattttgggaggttttacattttagtaatcacctaacagaaatagaggcaggaataaaggaaaatgggacctagtaattatgtagttctgcctttctgtgaatatgttagttttttatttagatatatgaaatattgaaataaaatcctgagacatcttattttctcttttgtaggtgcaaagaagttccagctgatagacaatctactttttgttcttgatactgatgtatgtttcttgtttctccttcaatgtttttacttgatatgttttacaacaaaaatgtcagacttacaaaggcaagggttttagctagggtggataactatcttgtgtactgtgctttttttcagtatatgtaccaaaaagttgatcctgaaatgtaatttttttttttttttttgagatagagtttcgctcttgtttcccaggctggagtgcaatggtgcgatctcggctcactgcaacctccacctcccgggttcaagcgattctcctgcctcagcctcctgagtagctgggattacaggcgcccatcaccacgcccggctaattttttgtatttttagtagagacggggtttcaccatgttggccaggctggtctcgaactcctgaccccaggtggtccacccaccttggcctcccaaagtgctgggattacaggtgtgagccactgcgcctggtctgaaatgtaaatttttaatcattaagaagacacgtaggctaggcgtggtggctagcctactaaaaatacaaaaaatacaaaaatacaaaaaattagctgggcgtggtggtgggcgcctgtaatcccagctactcaggaatctgaggcaggagaatcgcttgaacctgggaggtggaggttgcagtgagccgagatcgcaccattgcactccagcctgggcgacaagagcaaaactctgtctcaaaaaaaaaggacatgtaaatgaaatgtctctattgcagaacgtgctgagtttatgggatatttacactctaactcctgtatggaactggccctctcttcacgtagaagagtttcttcttactacagaagcagactctccttcatcagtcacgtggtatgttatgactatggctagtagtcatttcccttctgttagtaccaggtatcttgtctggttttgttcaggtcatttattatgttttacattctaaacaacactgtgaaacagtctgacagagtaaagaccgtttgcaaaattcactgggaacagttaggcaatatgaacttccaagtcattttgttagaaactgtcagtctgggcataaacgtgcagaaatggaatacagtgtctattacattttattttttatggaagagtgttactttagtttatatcttgtaattggcaaagcctacttttttaatcaatagataatattgtatgtttttgttgtgtaaaagtttacttgaattatttaaaggttcttttctcttttaggcaaggaattacaaatctcaaattaatagctctgacagcttcagctaataagaaggtattggaaaattttattttgtgcttgcctatattatgtgttagaaaaagcattagtgaatacaaaagtagatgttaaatagtacagcatattagctctta

SEQ ID NO: 8791 - DNA, 1127 bp, Homo sapiens
ctgtgggactgaatcttccttccatgatacatgatctagcaagccaagctgccaccatttgcagtccaggtgacaatatttataatatacgtagttttatattctctggttcatgtcatacttgtctcccaaatgctgtctctttacaattggacatcacggtaatcagactagagatagtatctgcatttcacaaagggatgcttataattgattctctttgaggattattgtttgaaagtatttcaaaatactaacaatgtcatttctgactgttgacattactcacttttgtaggattatgaaattccttgcctcccatatctgatcttattttcaagtcaagcttgagaaaaaatttaactttttagggtagtcaaagctatatggaacctttctatctacattgtggccttccttagaattttaaatggtaattattaaaaggttgttttcattatcctaaagacatgaaatatgagtttaatgatttttctccattttgtttcagattttttactagatgctttagaactatgtaaacatactttaatggctgtagagctttccagacaatgccaaatggatgactgtggaatcctcatgaaagtaagttacttttgagttttttcccttaaatcctgggcaacgcattatgcaccttttttttttttcggacagggttttgttctgtcacccaggctggagtgcagtggcatgatcaaggcttactgcagtcttgaactgggcttaagcagtcctcccacctcagccttctgagtagctgggactataagtgtgtgccaccacatctgactaattaaaaaaaaattttttttttgcagagacagggtctcaccatcttgtctaggctggtcttcaattcctgggctcaagtgattcccccacctcagcctctcaaagtgctcggattacaggcatgagccactgcacctgggccgttttttaatcatttgcaaagtttatgaaaatactgaatccacctcttatgttttcttaccctagaccggaaaacaacgtaagggcatgaggccacttctctgttccagtcacttgattggctttaatttgcactatctttcaaaacattgggcctccagcaaggc

SEQ ID NO: 8792 - DNA, 1215 bp, Homo sapiens
aagaaaatatatcaattcaaaagattatacaaagtgtcctaatataaaatataaacataggaaagataagagcgtagagaatttagatctgtagcctctatatttaaaatgaaatcaagtattttgaattatatctcaaattatttgaagagcagataactgtcaagctcttatttacaaaacatctaccaacaacagggcaccagtggtttctcctcataggattcctttaatcattgtatataaattatagtttagatgaataatgttaaagagaatactagaaaaggttttgatcctctttctgaaaacaagatggtctcaggaatggaaacttttgatggtatactattagatgattttatgacagtttaggattgggttactcttactggacaaaagttttttattttaatataggcattgagtattctgaaacatttgaagtcatacagaagaatttctcctcccgtggatctagaatatcagtatatgttggaacatgtcataactttgccatcagctgcccaaactagactgccttttcacctgatattctttggcacagcacagaacttctggaaaattctctgtatgtgttcattaactttttatgaattttactggatagccaaattttttttcttaagcaaatcgtactttccttgtttcctttctagctacagaactcagtgaagaatctttcccaacattgctcttaatttcgaaattaatgaaggtaatggattaaaacattgtaagacatttctgtatcctgcaattaattctgaccccgtatagaagatttttctgctgctttcatgtaaaaccttatatgtgaatatgtgcttcagccataaccttccttttctttgaagttctctctggacactctgtacgtgtctacagcaaaacacgttttcgaaaaaaaactgaagccaaagctcctgaagttaacacaagctaaatcctcaacactgattaacaaggaaataactaagatcacgcagaccatcgaatcctgcttactctctatagtcaacccagagtgggctgtagctattgccatcagccttgcccaggatatccctgaaggtatgagctcttcttttaaaattgtagttaaaaaaaaaaaaaaagtactctttttgcatctttaaggagaagcaggatggtagttttcaaatgtatttgcttgctctcttaactgtggtg

SEQ ID NO: 8793 - DNA, 1264 bp, Homo sapiens
ttggggagaggtcaccatagtcaccgcctgacctggctgctgctcttgcttcagagccacaagcaaagtttgcactgggcccactgccgagtccagaggccggagaacggccactggtgtgggaggggagcgcacgagtgggactttgcacagcaaattgtgtccccagctcctcctctcccgcctgcctggagccggccctgaaggtttctatgaagaaataatcccccaatatttttactacgtgtgtgattttcctgttttatattgaaaaaacttttttgacactcccaagaccattcagggaaattttataaaaaatgcagatactgtcttgagcagatcgaaatgccgatgaagtggatgcaatttccttttgtgcaagcagtgcacggtgcccccccctcgggtgtccgtgctgtgccttagcttccccaggtgccgggactcacacctgctaggggctgggcaaggccccggctctgctttctctgaagggcttgtccaagttcattgccctgttacaggtggtcaagacgtccggccgccttgacccaggctacccttagccaatatcctctgcccctgggtggctggtggctgggcctcagggtgggcaacgttaggggtttggcgaaagcccgccccatgggattgagggacggggctgcactccaaccgtctgcacctgctcttcccccacccctgtgggacctcatcttcacgtgccatgtgtgctgaaggcccagggcccagcagggggcagtggcacctgttgacggaaaaggccgaggtgcttaccagtggaccttctggcccgcccctcccctgtcacttgtcgggcatccagggccccgacctgtgcctagccgccagggtgacagaaggcagaactgaagcggggtctgggccacgggccaggccactgccttttgtcctcagtgaccgtacattcctgctctcggacttgaactctactgtaactgttttcttaaaggaaatgaagctgtacaggacgattcactgccatgccagtcaggcgggcttgccatgttctgtgaatctcgagtgagcggtgccacccgcccccatacctccgccaccggccgctgtcggggatgccacagcctgccacggtcgcagccagacgtgagcttggcattgaagttgcaaagcggcccctggccgggctcgccgtcgctgtccagggccgtgtccggtgctgtggctgtaaagctgtaggaccctttttaataaatagaga

SEQ ID NO: 8794 - DNA, 1147 bp, Homo sapiens
ccacccgcatggcgctgcgcaagggcagcttcggcctgcccggccagggcgactttctgcgctcccggaaccacctgcttcgcaccatctcggcccagcccagcgggcccagccaccggcacgagcggacacagagccaggcggatggcgagcagcggggccagcgcagcatgagtgtggcggccggctgctggggccgcgccatgactggccgcctggagccgggggcagccgcgggccccaagtagggcaccgtgagtgcagcgcggggtctccatggtgctaggccagggtggccagccccgccaggaggcctggcctgggcacacgcactgacgtgggcctgggagattgtcccagggccttgtggaggacacgggccgcaccacacagtgctccctgccctgcctcacgtcctcgggcctgacgggtccggcttgtcatggaagctggcagggaccaccagccccaggatggcagagggaccagaacctcccactcagactggcccgggaggttctcccagacattttgccctgtgtggatctccaagtgtcctggtgccaggtgtgggcccaggcgcagcctgccacctccccatccactggccaccctcactcccaggtcccctcccatttggtagcagctccaacaggggtccagcctgcatcttgttaactcgagtttctcaactgttcaacctcactggttttgcactgatttttgagagcggagacccattaccacctcctatggctacagccccgttgacatgcatgaaactcagtacctgctgacccaggacctacaaccacactgaaggctccagtgcggcagagcctcgtgcaagcaggagagaaaggctgtatcttaatttctgcaccccggaccctgcccacctgtctgcctgccccgcctggagcccaggccagtgttgtttccagcctcaggccacgggctggacgggcctggccgcctcttccgctccctgccatcagtcaaggccgcccgcccacgtttctacgcctttctacttctcaatctgatttctatgaggtttttttaaacgagcaatccttggctgcttccttttcttaactctttcagtactgagagcagcccctccacactgaaaacacccagcact

SEQ ID NO: 8795 - DNA, 1286 bp, Homo sapiens
aatgccagatcctagctgccttgttggttttgaaggatttccatctttttacaagatgagaagttacagttcatctcccctgttcagatgaaacccttgttttcaaaatggttacagtttcgtttttcctcccatggttcacttggctctgaacctacagtctcaaagattgagaaaagattttgcagttaattaggatttgcattttaagtagttaggaactgcccaggttttttttgttttttaagcattgatttaaaagatgcacggaaagttatcttacagcaaactgtagtttgcctccaagacaccattgtctccctttaatcttctcttttgtatacatttgttacccatggtgttctttgttccttttcataagctaataccactgtagggattttgttttgaacgcatattgacagcacgctttacttagtagccggttcccatttgccatacaatgtaggttctgcttaatgtaacttcttttttgcttaagcatttgcatgactattagtgcttcaaagtcaatttttaaaaatgcacaagttataaatacagaagaaagagcaacccaccaaacctaacaaggacccccgaacactttcatactaagactgtaagtagatctcagttctgcgtttattgtaagttgataaaaacatctggaagaaaatgactaaaactgtttgcatctttgtatgtatttattacttgatgtaataaagcttattttcattaacaatttgtattaaaatgtgggttccttgaattcttacgtgctgttttatttttttgagacagggtcttgttttgccacccaggctggagtgcagtaatataatcttggctcaccgcagcctcaacctcctgggctcaagcaatcctcccatctcagcctccctagtggctggaactacaggtgtgtgccactatgcctgaataatttttaaaagactttttgtattgaatgaatgggtgtgtgatggaaaaaaaattttttttgcagagatgaggtctcactatgttgcctaggctggatcctgggctcaagtgatccttccaccttagcctctcaaagtactgggattataggtgtgagctaccacgcctggtgtaaagaagtgctattttaaataatctctcatgaaagtgtttgaaatgcttgttccccggtgccgtgaagaaatagcacttgaacataaatttaatttactcagcaaggccatttttacttcccgcagaaagggtacattcgccagcagttttgccacgagagtaca

SEQ ID NO: 8796 - DNA, 1119 bp, Homo sapiens
aactcggagcccttccgccatctctctccaggactagacacccccccgcccccgaacaagggagtggcctggacagagcactggggtcaccgagctattgctcctcgtcccccagccaaaatgggacgatttctccttcctcctccctctcagccctgcaaaacctaaccccagtatcatcaaatagtaggaactggagcccatagaccttctcttgggaagcactgcctctaacaaatggagaaactgaggactggagggcggggagcctgtctgaggtcacacagccaggagtggcacagctggggctggcacgaagtccagtggggaggacagaaaaggggaggtgaggagcagtgggcagagcagttggggaagaggacgggggcacaccgagggaatgcgagggtgcgtgggaagtggccagcacccctcctgccagggcgctgggatcttgcaaacgcctggggtgctgtgcgcgatgctacccccagcgactggccctggagccagagaggtgtagtgaccaggatcagaacccaggtctgtgccggcagagcctgtgttcgccatgccatgcttgctgccacatcagaagctcaggaaactggggtttggctgatgtagttagggggctctgggggacatcaccctgcccaattcctgcagtggccatggacgtgccagatatcgtgggcgttgtgcgtccccctcccaagcaacccgcccctatagcgcacgtgtctcatcatccgcatgtgtctcatcatccccacgtgggaggcgtggaaactgaggctcggagtggcacggtgctctgcccagttcaggatccaagtccacgtttgcagttccagcccaagctggagcataaccctgggctgcagtggcagcatccagggctggcctgagactcaggagacagctcggaacggtccccgttctcggagagaggggcaggtgccggggtagctggctccctgctttggtctcctctatgctgtgtgccctggggccaccccttcaggtccatttctctaaatcgaggggcctggagccagggttctccagtgctcctcccggctcccccagcttgaggccctgaacttccttcctcct

SEQ ID NO: 8797 - DNA, 1105 bp, Homo sapiens
ggtgccgggctttgtgacctcactggggcccttcttctctgacacttggtcggaaacagacttcccaaaaggcggttgtgttgcggggcgggatggggggaaggactcgacggggagaggagtggccccgttggtcaccggtgccacgctggctctcctgctcgagttttgggccttgtttgcaaacgttgacctcgtaaccccccaaatcggaagtgggacccataaaaacgatacctaaaaaaaatcttggacactgaggtgtaggggcaggaaagggttaagcgtcagggtgcggagggagagttgaattgctcacttgtgggctcggagtcccaaagagcaaacagccactgtttttttctcaaacattctcacctcctctggggtccgcagaccttacaaagacgggctttgttgccaggtaggactgccagcagccttcttcctctggcctgtggggagggcaggggctggtgttgccagcctgggcaaggctgagctcaggcttaccctggtgtcattggggccggggccctaaactgggaccctcggggtttggggtcacagggacagcggcactcacggggacccctgaagtcctgttctgggctggctggacctgtactcagcttttcttctttgtcctgtggagaattccaggagtgccgagatccccagatctgggctttttggtgcccctcccaaccccccacgggcccctttgcagaaccccagctcccctcctgccatttgcatccaagatggactctccgctgccgccgctgctcctccggcttccttgtcatcatccctcacgccctgcagccctgcctcctgttcacgggttgccaagccgcggcctggccggtggtggcagtggcggagttagacaaagcccccgcctcccccgccccagagccccccaggcgccccaagtggcgggaaggccgccagctccccaggccccgcgctctttgtctggcgtgggggtggggagccgcgcctggccccaggagcttcctggcctctgccaacccctcgctcctgcacactgcgctcattgtctgagatgcgccgagacggccttcgctgacgtggtccc

SEQ ID NO: 8798 - DNA, 2865 bp, Homo sapiens
ccttcagctctatttattcttttcttgactttcccatatggggcatcttatgacttttttttttttttttttttaagaaaagtatggaaaacttttcatttagaaaagtatttgttcctgtattttagaattcagttttgcatctttgctgtagaattcctgttttgtgttaatgttttttactatgtcttattgtgttgtgtgcaatgcattgtactggggggatgcacttgagtgccatttctgatactgtcattgtatgactgctgatgctcgtttatgttgttctttggaagctatagtgagcctgatgttttcacattttaaaaaatgcttcctgagacttctttaagctcctctaacttcttcagtgcatttgggatcaaacttagctcttagatcagcaaacctgacttgcttctacttttgcaatttttcaggccttaccatatttcttatctctgtcttcccacctgataggaaaatcttgcagatttgaaacagtggtttctggcctgctgctgcagcaaattccctatgtttatttaagaagtcgggcctatgcttttaacctacaaatgatgagtaatttacttgcaatgaacacaggtagcctgctgctgtttataacctgttgaggatatttatagcaggcaggaggcaggcctagtgtgttattgacaggtgactttagagaatgtacattggccgggtgcggtggctcacgcctgtaatcccagcactttgggaggccgaggcgggcggatcatgaggtcaggagattgagaccatctcctggctaacacggtgaaaccccgtctctactaaaaatacaaaaaaaaaaaaaacttagccaggcgtggtggcgggtgcctgtagtcccagctactcaggaggctgaggcaggagaatggcatgaacctgggaggcagagcttgcagtgagcccagatcgcgccactgcactccagcctgggcaacagaccgagactccgtctcgaaaaaaaaaaaagagagagaatgtacattaaggaacaattgtcctccaaaagagagccaagcaactgctctggagcctcctaggctgactctgctggagggtgagacaagcagattcccattgcagcactggtccctggggtaccctgaacggctgtgctctccacccttgtatcggtgagtggatcttgtctacatcagccgtaagcctagaagcagagcgggatcgaggcgtttttaataattcgagttgggaagacccggatggttcatcaaaatgatggtgttgagcacccgggaggcagacattgggtatttgttcacaattttgcacctgtaagaaaatgttcctttataactttcaaggattgccgtgagcgtctttggggccttttcattcatgtacaagtttcattcattactattcaacttggtagacttggtgaaaaatgtaaaagcattctgtatttggatcagtcttgggaactaaatttgtcgtgaattggggcctgtcacagattgcctccagtgtgcatcctccacgcagaccctccttgctcagtctccctctggcgcccatggggaagccgtgctgtggttggcagtgcggccatctgggctgccgcaacgtggcagggcaccgtccagcaagactgccccttagtgcagggctaagcaaggaaaagaagaagcccaaaaaggcgggttctttttgatacttgtaattcaggcgtcctccagagtgaaggccactctgcaggcccctggtgagaacctgtctggcttttccactgcgggcccctaaccagtaccctgcccttgtggcccatttgtgcctgggcagatgtttctggccagcagacactgaaggcctttttgctgtgacagtatttatggcactgaagaggataaagaagcttgagccctctttctgactcccactttatggggcagagagagctttttttctacatagcacattgcagtctcaccgctatcagaaaaatatcctgttcatggtttatactgaatttgcaaactactgatatgatttttcaataaccacttgtatcttccatcatccatgagaggtgggaagaggtacactgtatctctgcaataaaactttggccaggttctacctcctctgagcaaaggatacttttctatgtaggtgtagatggttctcctttactaatctgacatggtgcatctggagacaacatctgatgggatccaaagacaacttgaaacaaaggtggatgtcagctcttggtgtgttttcatttggttctcttttttaaatctcccttttgttatcgctcctgttgtagcgtgtccatcagtgtgtgaagggtgcgccctgttccaatgatactgcattgctgcatccagcctttcgtgggagcacggtaccaagcgtccggaattgattatcccaatcatttttgatatgtaactgaaaaatttggtctcatgcaataaaaatgtactggctgcattttagcaaggtttatttactcttgcaagtaaaaacgatcaaccgtgaagcgtaacaaattctgtatttagtttttttttctgttgtggtggtttttgttttgttttttgtttttgtaagattctaaataaattaaatacgagtcacgggttgtgctttctttgcgcgctgtcttcgcagatctcatgaacatcttcatagtgtctttataaaatgtaagtgctgtcaccgtgcctttgcagatggcacaggcactgagtcagggagccagccagggtggggcggtgcccagcccaggtgcagtgtgtgggcccggagtgggctgctgtcttggactgctgcggaaggcggtgggagggagaaagg

SEQ ID NO: 8799 - DNA, 3243 bp, Homo sapiens
gagaaacatttgttagatgtacagcattggttattgcatttttatagtgtttatacctgggtattgcttcaaaccctgcagacccctccttccccttctccctgccctgggtttctggtcaaggtaatgaatacatacatttttctgtgataaaactcttaaaagttaattttaatgtattaatagtattcctaatgtgtgctgcagaaatggctatgagcctcttaaatttacatttgcaacttaaaggtagttttagaaggaagtacaaattggctttcatcttgcaaacaatcgttttttacttcattatcttaatttgctttgtcactcataaaaaggaaaccatacctgagttgtagacaatgaggaaacacttgaggcttctgctgtgtgttcttttgttattgttgttattgttgttactcagtaacttgaatattgtttaatgtgttgtaagacgtagagtttatctcaagctgttaaaaatggtaatgtacaaatgtgaatagacacttatctatataatatgggtaagttttgtttcgcctataatagatgtttataaaaacaagtgaggggacagttggtctttttatcttttctttctttttctttcttttctttttttctttttttttttttttttttttttttttgcttccacaggttgcactattgaaaaatcgagattgtataaacctggtaaaaagctgcaagatgccaaaatcttgtagatgtcaaataaaaagttattatactaacaagaagtggactcttgtttaggccctcactggtgaccttcagaagtagtctgtgacggggactcagcagaatttgtgtgttgtctcagcattccaggtagccttatagtttggcttaaaacttatccctaaaatgtaagatggcattgagggaaagggtataatgatagtacttctgaatgttttttaagttgaattgtttgtaaacttcttgcagaattgggtgagatgtgtgttaaaactgacaaacctggctgaaagcttagggcgttcatcctcttgtgtctcctttagcctgagtttggttatgtcaagcttaccgtaagttttcttaggatttatttattcttggtgcctaaaagaataaattgaaagtactttctgttctttggcacattttgcccagcggatgcaacttctatcctcagtccagttcatatatctcaggcagtgatccattttgtatcagccagtttcccttgttagggccgctagacccggctggcagccaagagcagcactctccccaccttcagcagaacttctcagctcatgtgtgtgtttttaaaagcagtaggcagcttccatcagcaatggaagtgtcccccactccagtggtggaggtgcagtcgctggacctgaggaagtggggaagcattacaaaccctcctgcagtaagaatggcagagttgggaaggatcttctctcgcaggctgttggcccaactcctcttttctgtgtatgagggcatcttagttttttatggcgttttcaaagcagcatatgaggattcttagcatgcagctaagtgacaacccccatggcctatgatgtaatgtttgctctggactagccatcttgataaataggagtgtatgtatcttaggttctttgtagaacagctatttttttttctcattaaaaaggcctctgaaagccctctcaaaatggacctcacaaaggcaaccagtgtgaatggatgggagctggggtgctgcatgcccaggctggtcatggtgtgtgcagcacccagagagttgcacccaccccttcttcaggtggacatccgacctttacactgtggtcttgcaaaaatcagcgagttagtttggccgccctgtgaagcttcagcattcaaggtcctcttctgttaaaacccaactcgtagccgggcgtggtggctcactcctataatcccagcacttcgggaggccaaggcaggtgcatcacttgaggccaggagttcgagaccagcctggtccacatggcaaaaccccatctgtaccaaaaaatacaaaaaatttgccgctgacttctgtaaaataggtccattcattgcaggatctaaatgccacacctgaattcagaggccttgtttaattaaccccatgtccactttgcctctgcaatgcctttttctttttagcaatatggctctgagcacaaagatttggttggaaatcatgttcgtgttttcagagtttacagcgtcaattgtactgaaaaccacttccagagtctaaagcagctcagatgttatctctgggggaattagtgttcccctcatttagcaacctccataccacaaggtctctgtctgtagttactgggattatccagatacactatcaatgatacaaattcataggagtattaatgcatttctttaaacacaacttgattaagaagcaaatatgttaagcagttttctttttctgctgctaaattacagttagacacttcagtatcttctctttacatgtgtatataaattagtaagaacctgcatccaaagcaatgtagtgtgtgtatgtatctatatatatttattctaactcagcacttcagaagcctttttgagttacaacaatattttagtttgcctcatctgtagaggtaaaatttctatattaccaagctccagaggaatatgatattttacaggcacaattttctggctgtagtccctggggcattcatttgctggcctccatgggatgctgttagaacaattgttagccggcaagagaagaaaggctaccaggacagcatttataattgtagaatgggagccttcttccctctcccctccactttcattttagcatgagataaaaaaatagattggaaatgattgttgcatctcacttcatggaagtaggggcagaagttccctctggatccttttcttgacaagcagtcaagaggaaggtccccatacacatgtacctgtgtgatacttggtagtttctaagaatggtgctacataagcgttgctgttaggctgggatcctattaatgaacgtttgattagttcaggcctcccaatggcaaaggcagacaccgtggagatggacatttactgactccccttctgtgtggcttcggtctccctggctaacaccacacctgtgcgtactgcgctcggcccactttgctgcagaaacgtagcaagcgtttcatgtcagggctacagctg

SEQ ID NO: 8800 - DNA, 1368 bp, Homo sapiens
cttgctgcagtgggttcttttctctgttttaatttagaggcaaattgctggtttaaattccaaattcagtgaatgtctttgaggctagagagggaggaggatgtaactggggaaaggcccataggacttcctttgtatttgcagtcatgaaataggcaatcagaaggcctcagggaaataaaagttaactcttcttgaaagactggagattcttacttaatactaatgtgatacattccttaactcattccatttagatagtgtttgatgagtgtcataaagccaaaaacttatgtcctgttggttcttcaaagccaaccaagacaggcttagcagttttagagcttcagaacaaattgccaaaagccagagttgtttatgctagtgcaactggtgagtatttatttatttaaaaatatatattgtaggttattttttcaactataatatatttcatttgtgggattttcaggtgcttctgaaccacgcaacatggcctatatgaaccgtcttggcatatggggtgagggtactccatttagagaattcagtgattttattcaagcagtagaacggaggtaatgcagtttacggtatatactcttctcagtagcaatctaagaagtgtgttattcctaaagcccattctctgtatgttaaaattctactgtattggtaattactgtatgttttaattttattcagaggagttggtgccatggaaatagttgctatggatatgaagcttagaggaatgtacattgctcgacaactgagctttactggagtgaccttcaaaattgaggaagttcttctttctcagagctacgttaaaatgtataacaaagctgtcaagctggtgaggaatttttcttaattcctagtgtttatttaatgtatctgataatgtttctgttagttttggcgattgcgatgcctcctgcccatgggaatgtatttctactataaaacaacagatgaagccaggcacggtgtctcatgcctcagcactttgggaggctgaggcgagcaggtcacctgaggtcaagagttcaagaccagcctggcctacatgttgaaacctcatctctactaaaaatacgaaaaaaaattagctgggcatggtggtgtgcgcctgtagtgccagctacttggggaggctgaggcaggagaatcgcttgaacccaggaggcggaggttgctgtgagccaagatggtgccagtgcactccagcttgggtaacagagggatactccatcgcaaaacaaaaacaaaaacaaaaaacaaaaacaaacagatgagttaccagatgataggctgtttaaccaatgtgtttttttttgtttttgtttttaattgaagcagggt

SEQ ID NO: 8801 - DNA, 1098 bp, Homo sapiens
gagtgcgactccgtctcaatggaaggttttgttagtaattactttagcatgtggggatgggatccgccttccccatctagacaggatctttgtcacccaggctggagtgctgtggcatattcatggctcactgcagcctctacctcaggggctcaagcagttctgcctcagcctcttgagtagctgggactacaggcatgcactaccatgcttggctaattttttgtagatacgggctcttcttgtgttgctcaggctggtctcgaactcctgggctcaagcagtcctcctgccttaggctcccaaagtgctaggattatgggtgtgagccactgcactcagtgggatggtgttttaatgagtaagtgtattttctttttctttttttttttttttttaagtgtcaagacctggctttattaattttattcctgaattctagaatgatataatttgtatttaatttgtgctttttaatattttggcaggtttagtgtttcaaatgacttaaagtatgatgctgaaagagatttaagggatattggagcaaaaaacattttggttcattcgttaaataaggtatgaaatctttttattcagttggtcattcaataaatattgactcatctgtgagatgacaataataatagctatgtatataaggggacactttttggaaaactttgatgttactccacagaaagcatagtgagtgctagccactattgttggtttgtggattcctatatgctaaacactgacaggcagtagccactcatcacatgtggctattgaacagtgtaagtgaccagtccaaattgagatgtgctctcaagtgtacagtgcacaccagttgattctctcaattttcagtgttatttttatctttcttttatagtttatatgccataagggtgcagtttagacaggtggcataccttgcactataggtcaccaaatcatatgcgatgtagatagttatggcttgggcagactggtttcagtatttgtacagctaatggacttgagttactcatacctctgctcacatgaaaacaattctgtaagctgaaagacaatgtgtgccagtgtgtttta

SEQ ID NO: 8802 - DNA, 1186 bp, Homo sapiens
tcctaaccggagtttgaaagcaggcgcggggcgcatgcgcgcggccctccggccgacctcccgatagccctggcacgcggaccttcttcccgacaggccgcggggaaaaaagggcggggaaacggaattaccgcgagctctccgtgagcgccggcggaaacagtagtcacgtgactctcctaggtggccttcgccttccccctcccccttcgcggaaacccggccccctcacccctcgcccaccccagagccgcggtaatggaccgtttgggttccggaattctcttggatccaacaactggtaccgggccgaggatagccggcggagtccgtttttggcggcgaagactggggggtggtcaagatgggggggaaatcatcttccttcacctaggagggaggcggggcggagaggggcgcagagaggcgggtgggggaggagggaggaagtcacgtgagggcgctgcgtgcgcgcggcgcctcatccgttgcccctcccccgcccctcccggcggggcgggggggctgggggaggggcgtcaagatggcggcggggaggtaggcagagcaggacgccgctgctgccgccgccaccgccgcctccgctccagtcgcctctggtccttcaaactcacacctcccgggaggagctgtgctggcgccgggtcccgcggggaaagtaagtccttcccttggcccttttctccttccacactccccctcccggacagcctcccactcccaccctcggggggccgtgcggggccaggctggggggacagccacctcgccccggcttggggcctccctcgccgcttgccgctcctcgcggccgcgcgctccggggccctcgggggcatgttcccgacggcggctccgttgtactcgcttcctctgttcgtcagcgccgggccccgctgtcgccgctcgtggggctttcgggctccgggagccccgctgtcccgggccggaggcacccctcttggaccgcggggcagggtctgtgcacgccggctccgctgggttcgcccctttggcttccgcctcacaacccgggggctgcgggtccgggacccgcggggaaagtaaggaccggatccttcccaagtcctctttcgtgccccagcattgctcccggctctgggcgagggagggaggcaggcgacgcggtcgtccttcctaaatc

SEQ ID NO: 8803 - DNA, 1167 bp, Homo sapiens
cctgctgtttgcctaggaaggcatagcgcatagcccctagacagagaaaccaggtgtgtggatttgagctgtgtcactgtctagctgtgtggcctcagacacgtggttgtgcctctttaagcctcagtttcctcatctacaaaatggggcagtctccacctagcagatctctcacgagctctgatgtaactgctttgcagatgagcaccaaggaaccacgtttgtggagtgagggaacgttctagagctggcctgtagtgacggttgcacagctgtatacacttcataaaacccatcagcctgtacatgtaaagtgagtgaattttatgacatggctcagtacagctgttaaagactggggtaagccccagctccccggagacctgctgtgcacagtggcatccattgctattatgaaccaacaccctctcttatcacctgacagattgacctcatcgatggcaaaggcaggggtgtgattgccaccaagcagttctcccggggtgactttgtggtggaataccacggggacctcatcgagatcaccgacgccaagaaacgggaggctctgtacgcacaggacccttccacgggctgctacatgtactattttcagtatctgagcaaaacctactggtgagtccactgttgcttagagtggcttttctgtcctctgggcagtgaggagaggccaaagggccaggaactcctgattctgtttggtggccagtcttttggttttgttgttgttgacttttttttttttattttttgagatggagtcttgctctgttgcccaggctggagtgcagtggtgtgatctcggctcattgcaacctcctctcaggctcaaagaattctcctccctcagcctccagagtagcccagctaattttttttttctgtatttttagtagaggtggagttttgccacattggccaagctggtcttgaactcctgacctcagacgatccacccgccttggccttccaaagtgctaggattacaggtgtgagccactgcgctcgggctgttgttgccttttttcaaagctgtgatgcaattatcgcctgcttccttttttttttttttttttttttttttgaatctcgatctgtcgcccaagctggagtgcagtggcacaatcttggctcactgcaacctcc

SEQ ID NO: 8804 - DNA, 2335 bp, Homo sapiens
tcaggttgaaaagcctctttatccatttaatcctctctggccctccttcccctccagcgtggatgcaactagagagacaaatcgcctaggaagactgatcaatcacagcaaatgtgggaactgccaaaccaaactgcacgacatcgacggcgtacctcacctcatcctcatcgcctcccgagacatcgcggctggggaggagctcctgtatgactatggggaccgcagcaaggcttccattgaagcccacccgtggctgaagcattaaccggtgggccccgtgccctccccgccccactttcccttcttcaaaggacaaagtgccctcaaagggaattgaattttttttttacacacttaatcttagcggattacttcagatgtttttaaaaagtatattaagatgccttttcactgtagtatttaaatatctgttacaggtttccaaggtggacttgaacagatggccttatattaccaaaacttttatattctagttgtttttgtactttttttgcatacaagccgaacgtttgtgcttcccgtgcatgcagtcaaagactcagcacaggttttagaggaaatagtcaaacatgaactaggaagccaggtgagtctcctttctccagtggaagagccgggaccttccccctgcacccccgacatccagggacggggtgtgaggaagacgctgcctcccaatggcctggacgggatgtttccaagctcttgttcccctaacgtctcaacaggcgctcactgaagtgtatgaatattttttaaaaaggtttttgcagtaagctagtcttcccctctgctttctcgaaagcttactgagccccgggccccaagcacgggccgggcatagatttcctcttccacaagctgccgcttttctgggcaccttgaagcatcagggcgtgaaatcaaactagatgtgggcagggagagggttgcttacctgccctgctggggcagggtttcctgaaactgggttaattctttatagaaatgtgaacactgaatttattttaaaaaataataataaaaatttaaaaaaattaaaaataaaaaaaaccacagaaaacaactttacatgtatataggtcttgaagtgagtgaagtggctgcttttttttttttttttttttgcttttttttgctttttgtagaagagattgagaatggtactctaatcaaaaataaagttttgtagtgggaccagaaattacttacctgacatccacccccattccccctcatcctgctggggttgaaagttccagacctgctgtcgaggccttgtgtttgtcagacacccagtgtcctcctgcaaggacgcaactgtgagctgaggtgtgagcctaggagcccaggacccctgaccccggccgctgctgccagcctcagaaaggcacccaggtgtgcaggggagcacacagggcccggcagcccccaggaatcaaggatagggctaaggttttcaccttaactgtgaaggcaggaggaataggtgactgcttcctcccgcccttcacagaactgattctcacacactgtcccttcagtccagggggccggggctcaggagccatgacctggtgtctcctgcccaccctggtcccaggtaaatgtgaatggagacaggtatgagaggctgtcctcgtctttgattcccccccaaccccacctcgggcctcacgacggtgctacctaagaaagtcttccctcccaccccccgctagcctggtcagtggtcagcaaattggaagaggatccgatgggagtgtaaatgtgagacacaatgtcttgattatacctgtttgtggtttagctttgtatttaaacaaggaaataaacttgaaaattatttgtcatcataaaaatgaaacaaattaaaatatttattgccaggcaaggccacgtgtgtgtctttctgtttttacaatttgactgtgtcacaccagcatgtctaagctttggtaagcatcctcctggggaaccagaaaagcttactgacgtgattttgagcgtgtttcccagaactctgagctctttcgtttcctcatctgtatactggggaccatagggtatgtgaagattaaaagttaatgcttttttttttttttttgagacagtctctgttacctaggctggagttcagtggggcagtctcagctcactgcaacctccaacctccacctccttggttcaagcaattctcgtaccttggctacctgaatagctgggattacaggcatgcaccaccacacctggccttttttttttttttttttttttttttttttgagatggaatttcactctgttgccca

SEQ ID NO: 8805 - DNA, 1468 bp, Homo sapiens
ctcttgttctagttgccatgacattgggacagatctactacctgaagagattttttgaagtccggagagttgtttaaaaagcctcttcctgatgatcccaactcagaattcactgtttaccaaacaccttggtcataataatgtcattagtttctccatttttattttctgaactgtacattcacaacttatgtttctttgagattaatagatattgggggaaaaacgcctttttaggaaaattatagtgaaaatttgacagttgattggcataatttcttgtttgaatgctgcctccattatataggtccttccaggaactcaaacactgtaagtgaaatatgggagtatagtttttattatttcttcttttccttttgttttcataatataatgcagtttgttcaggaaatcagcacaaagcctgatagtactttactaaaatgactgcattctttggattccttcagtctatggttcaagtcactaaagattcatttttgttgagtccttatgagaaacagcagtatgaatcttgacggtttctgcccgtcctaatggcagagctctctgacttgggtgtatgctgccaggctgggtactttcatactttgttttcttgttttgctttaaaactacgactcagcatacattttcccacatacatttttacattgtaccttaggactcagtcatctccacttaaattgatgacacaagcagctaataaccatttctgggtttctgcctaaccccctaattgtctgttaaagccaattctctgggtgtcccagtgagtggtggctttttttctttccacattggcacattcacttctcccactcttggcatgtaagaaataagcatttacataattggaaaaatctggatttctgatgccaaagggttaaagcttcttggatttcatttcattgatatacagccactattttatttttgatcagtggcctttgggccactgttcagggtactgaccatcagtgtcagcattagggttttggtttttgtttcttttgggtctttcttttttggcacatgtgaatcttgttttgtgtaaaatgaaattactttctcttgttctctgatgatgggtttaaaattaaaagagcatccggttttggtatggggatgatccaggattatgttgtgactgatacatattagttacttgtgcttttttttttttttttggatctttgcaagggcaaaactacaagtaacgagttttatataattaatttaaatttgttacaggttttcatgttcaggataaaccatacttccaccttgggtgagaacacttgcaacagtttattaatgaggtgactttcaccttaggacaactgttgcatgccaagttttttgtgtgtgtgaaacacttcaaaactgatttaaaagatgtaaatttaaaattggttgtatctaatatgccccaggttcggtaaat

SEQ ID NO: 8806 - DNA, 1485 bp, Homo sapiens
catcaccacaacttacaaactgtgcgagttgaggcaagtcctttcatttcaacctctgaaccggttttcttgtctgtaaaatggcatagcagtatctgacagggtcatgaggattctaagataatcttagcacagtccctggcacgctgcaagctctctattgtgactctcgatcttcccttgagaggtctggagaagttaatccggcatgagaatgaggggacatgggatttaagtttgttacactacagctctcagccagcacactgccatgatctggctcatggccacaactctgccctcgtctctagtgtcctgcatagcttagtttctcccattttcagagagcagtctcaggaagtagcacactgatcactcacaccaaggccctaccaggtcagagcactaaatattcagtgccgactaatgtgtacttctctcctcagtataaggcagacactctcaaggtcgcgcagactggacaagacctcaaagaggagcatccgtgggtcgactacactgccccttccttaatcactctgctgtttacagacctgggcgtgctgacaccctcagcagtcagcgatgagctcatcaagctctatctgtaacctgtgagccctttcctgccaaggtgcagcttacgtagttgaggcagggtgagtagctgcttgacaccccagtgagtcaggccaaaactgagatgtgtttaatgaagatttatggagtaaggacttaaaatcatacatcttggagaacctttcttactcatttcagtcccatctaaaaatgtgtcagctattctaaatcccaacttaaattgttcttacggtttctagaaactttccttttcagtttccagaaatacaagttagataattggctacttaactgatgaaagatgagcccaagtccacctgtcttcatcctcccctgcactccagactgatctgcctaaagcacgcgagatgcaggcgaaaagcagccacacccctctgccacaaatgaccaacagctggtcaggacgttacacgcggtgccttgtaagaggcaagaaacacttgctgaatctgcatctggcttccagtggtaagcacattcctcagcaggatcaagccaaacagtaaaaactaccaagagaacacgaggaaggcagaaacgatgtttagcaacagtattctgcatggttcactgcttaagaaaatgccttctggaatatttgtaaactgaaattctgtatgtgtaagagatgtttaaatatgtttgggtcctaaacagctttttaaaattatacttgggaataaattcagcatcttttcaaataaactctatgaaagacgctgatgtggtgttgcatcaatactgcaagctgaccaggccatctaggggaaaacactgtccagctacatttacacacttaagacccaggcaatcaggacaccatttattcaacaggaggcataaaaactataattctctttcccg

SEQ ID NO: 8807 - DNA, 1165 bp, Homo sapiens
tagagatggggtttcaccatgttggccaggctggtctcgaacttctgacctcaagtgatccacctgcctcggcctccctaagtgctgggattacaggcgtgagccaccatgcctggccaaaatatgcaaatattttttatcctgtgctacctagaattacaagtagaggattgtttttacaattttgtcttgttttagtaattggggacaatgggataaaatgacatacaacaaatggttatcccacttgtatatttttttaaagactcttatcctgttacccttacataaaaccagttatgataattgtatgtttggaagataaattgtatgctgagccttaaaacccagtgtgactgtagaagatataatgcggacatgatttgaatttagtgacagcttggctgatgtcactgaaccagaagggtttatactgagtgaaggaaaggtaaaaagtagtattttgtatatttttgtaacaaaatataaatgaagatattttaccatgaagagattgcacttatccttgagaacagtctaaatataaatgaagatattttaccatgaagagattgcacttatccttgagaacagtctaatgatactttttttactttcagactgtttctagctaaagttctgataaaagtattgagttaatttaaactttcaaacactgtttagatcagttgaaaactaattcttaatagccattgttttataatctttagtttaaattcatctgtttgacatttggttttttgtgaacttgagtcagtcctattgaacattttgacctatattcttgcaaattatgttaatttttcatattttagtttgattttagacaattattttcaaaaagaaacctgactttttttcaccttcttgacattgtgagtgatacacgttaaaaggctatttgcccgcatcctcctctatcctgtttcgaggtagagagcttggcacttctgttacaagctgagagtctggaggtgctgagtttaacgtggctgtgcagctgatttcaaggcatgagctgaacagcgttgacacagccgtgacttacaattaaaccctttcaattacagtacagattctgtgtgctacttgatgagatgttacccaaggccagtttggacttactgctttttgtccctcatat

SEQ ID NO: 8808 - DNA, 1066 bp, Homo sapiens
ttatttaaaaatttttttattttttttgagacagtgtctcactctgtcacctaggctgaagtgcagtggtgcagtctcggctcactgcaacctctgcctcctgggtttaagcaattctcctgccctagcctcccgagtagctgggattacaggcgcctgccacagtgcccggctaatttttgtatttttagtagagacagggtttcaccatgttggccaggctggtctcaaactcctgacctcaggtgatctacccaccttggcctcccaaagtgctgggattacaggcgtgagccaccgcgcctggccctctgcagttgtttaataaggcacagaatacctgtagcataggtcagccttacgatgtccatgaattacatattcagacgttttagagcctgatacattttggaaaagaaaaacaacttctacacctattctacagtccgcatttaaaacaataaattcctctattaaaaacgtaaagccgggtttgcttgcgtgccacagggaatatatccaggaaggttattatgaagctgtcaaatcaagatgatgggaataaggcagtttgaacgaacagtcttcccacagtcaggccatttttgctgatttggtttagaattttcagaaatacttagtacactccacctgttctttgatgggaatatctaagaaggctaggtaggttcttagggttagcctgagtcatctaggggctcaactccttgtgaggggaaatgacagtgaacaagttagtactttgctccacaaatgcatgaaaggacaaatttgcatcttctatcagtatttaacttccttttgctaatgacaaataaatatatctatatttttaaacgtgggtgttttgctttattatgctctagtttggcaagaaagctaaagaactctgctccttccctgattttgtaggccatgaggaactcgtgctttctcggcttatttcctcctcgtctggcctctaatcccgcctctgccaccgccgaggtgctgtgaccttcgtctcgccaactctctagccccagcttcatctgcaaggtgggcg

SEQ ID NO: 8809 - DNA, 2321 bp, Homo sapiens
attgatttgttggttcatgccaagtgtgttccacaggttgactttgaatgtggacctctgagcatccacgcaggatggctctcaggtcccagtcacagacgtcgcttcctgggattccagcacgatgcctccatagttgaaagactacacaaaaagccacaatcattgcccggcctcctgagtcaccttctatctatactttgcttaaaagctatcccagatactcccccttgaggagctcatgcccttccttcctctttattcgagcatactggcaatgcattggaaaacagacagctcccactaagatcacgttctggtatttctgaggttaacacttgatttagcccctacatatctttccatatatcctattatttctgaatatatgtcctcaaaatccccataaatatccatcccttcctagatggcattaactttcattttagattttaggtgactcataattcccattcacttagcctatcagaaaagtcattggcagacatatatgtccttgaaccttttttatttgtgtggattctgctcatcactgtctctgttagacttattttgtagtggctgcatcacatatttttcacttgaatttttttggaaatagctgaatgtaaatagcagggaggaagaagcaagcaaagtgagagcttttcttcatccagaattgccctctgggctcctttggtaacagatggagctccttcctagctagggagaccttatgagaagtggatggtaggaggagtcactaatgtttcaatctctatttctgtaatcttgggcaataatgcataggagttcttgataccccttcattgattactgtgtatcagttctttgttaggcatgaacgtctttattaatccatcattcttttcttcattcaacaaatatgtattgaacacctcctatatgccaggcactgtgctaggtgctgggaataccactgatgagacagacaaggtccctactcttgtggagtttacttctggtggaggagacagatgataagtaaacaaataaataatgtagtttgagatagtgattaagtgctatgaagaaaataaactagggtgatgattttagtggtggggtggggtgggggtggggtgacattagctagtggtcagggaggcctttccgcggtgggatgttgagctgaggccggaggagaagtagcagtcgctggcagagcacacaggctgctctgggggatgagctggtgcgtttaaggaacaggccagcactggcattcgcaagcagtggggaaggggagagatgccgaggtggtcagtatcctgactttcagaggcctttttttgtttgttttaatttttgctagattgatattaaaaactcatgtggaggaactcaaggaatgtttagaagaccaaaagtccccaatgacaggaacaaaagcaaccaatttttaactttctcttctcattcctgttttcattgatttcccacatgtagtccttttgctcaggaagtctttggggaaattaaggatctttgaagctctgaaataggtgatcaggttagtggtgtctgtcagctgtctaagaggttggaaaatgaactactcaagatagtcacgaaaatactgaaagtttgatttttctttccatatttgaattaattttttctgtttgactggaaggggtttttgtataactaaaacctcagcgcataaaggagatttaaaaggagcacatgatttagtgggtgggccatgaaactagagatgggatttgggggtgaatttgtcaatatctggattttaatccagacatctctgctaacaagcctttggtaagtcacttcagatacttttcctcctttttacaaagagagggctggcttagttatttgccaaagccccttccaggcctgaattccacaagtacgatttactgtagtgtcttatcactctttcatgtcacaatagcgtggagcattagagaaaagcctagacttttagttgatagccagttgaaatatcattgatagaattttagttttaggaaaaattggtttgatttctagctttattactattaggtatgtgagcttgggcaaatcgcttaatctttgagtctagttttctctcaaaatgagaacattaggctaaatgatttccgagtttccagctagtcctagagttctatatttctacatagttgaattattttatcatgctgttgctggggaatatgactaacccttttgaagctactaattttatgtcgagctttaaagtccataattgttatcttcagaaaatattatttgacctacag

SEQ ID NO: 8810 - DNA, 1157 bp, Homo sapiens
tccttgcctgtctaaagccttaactaagactcccgccccgggctggccctgtgcagaccttactcaggggatgtttacctggtgctcgggaagggaggggaaggggccggggagggggcacggcaggcgtgtggcagccacacgcaggcggccagggcggccagggacccaaagcaggatgaccacgcacctccacgccactgcctcccccgaatgcatttggaaccaaagtctaaactgagctcgcagcccccgcgccctccctccgcctcccatcccgcttagcgctctggacagatggacgcaggccctgtccagcccccagtgcgctcgttccggtccccacagactgccccagccaacgagattgctggaaaccaagtcaggccaggtgggcggacaaaagggccaggtgcggcctggggggaacggatgctccgaggactggactgtttttttcacacatcgttgccgcagcggtgggaaggaaaggcagatgtaaatgatgtgttggtttacagggtatatttttgataccttcaatgaattaattcagatgttttacgcaaggaaggacttacccagtattactgctgctgtgcttttgatctctgcttaccgttcaagaggcgtgtgcaggccgacagtcggtgaccccatcactcgcaggaccaagggggcggggactgctggctcacgccccgctgtgtcctccctccctcccttccttgggcagaatgaattcgatgcgtattctgtggccgccatctgcgcagggtggtggtattctgtcatttacacacgtcgttctaattaaaaagcgaattatactccagttacaaaggtttcttctctacctcagactgggcagccaatagggcaggcgtttaggggacagtgggagtatacccctggagggccaaggccacatccgcctgagtcaccagggagtggatccttttgcaagttgaatatttatacccttggtaaggacatcaccatgaggacatcaaatagtcacatctgtggtgaaggtctcaagtgttcacacccatggtaagagtgtgtcagatgttcacatgggttcacacccatgtgtcaggtattcacatgatggtcagggtgtcatgttcacactcatggtgagagggtgtcag

SEQ ID NO: 8811 - DNA, 1213 bp, Homo sapiens
tagacacaggcacatgcacatgctcacgcacactcccactcccacccccgcccccacccccaccctggtgaaccgtggggcctctgggggtcaaaagagaaagagaggggagggccctgagctccagggtgaaggaggcgttttggtgggggcggggggggtaatgtgtgtgcgaggacagacatggcaagacagcaggacatctttggggggcagtggtgtagctggcactggggtacaaccagaattcagagcaggggtcaataaactgtggcccatgggccagatctagcccgggccctctgtttgtacaattcatgaactaaaaaaatgattttacatttttaaagggttgtttaaaaaaaaaataaaaatgataacgatacatgccagagattacttgtggtcgaaaatgcctaaaacgtttatgatttggccacgtacaggaaaagcgtgtggggccctggtttagagtggagggagggtgcgccccctcagtagggagacctctgaccacatctggggccctttctccatccaggtctccagagccaaacaagacgtcggtcttgggtggtggtgaggacggtattgaacctgtgtccccaccggagggcatgacggagccagggcactcccggagtgctgtgtacccgctgctgtaccgggatggggaacagacggagcccaggtacttctgtgggcacatgcgctgcccccgggatgctctggtatcccttgcccatccttggccccagtccaccgtggtgccatgtggagagtgacaagggcacagggctcagctgggtgacctcaagcctgccaagcaggtttcaccaacttgggggtgtgatacatgcccaccctccctggggagacctcagtggtagctttccatgctttgggctgggatctcagctggaccaggcccccgttgacagcccctgttgaacctctaagaaataatgagctaggtgtgctgggccagaccgggggcgatgggtgaggtgggacctgagaaggaagctgggcccgctgcccctggggaagggcatgatcggaacccaatttcagtccttggggctctcttgagagggtcaggctggagcaagtggtcagaggcagcccaccacgcagccaggcgtctcccaagacacccctagccccaggacgggtgaaccgcagaggagatttcaggagccgtgatcttcta

SEQ ID NO: 8812 - DNA, 1100 bp, Homo sapiens
tctcgtcccgcaggttcatgcagcatcccaagaactttggcctgatcgcatcattcctggagaggaaggtgagtcgctgcccgccccataccccttcggtctccacctccgtgggcaactgcgtggactcagggtggaggccctccctccttgcccacaaggccctggcctgcctggccccttgctccagctgccatgctcccctcctccctccctcccttccttccatctgggagatagatcagtgcaggccccgccctggcctcctgggcccatggaggaggagcctcaggttgctgagcacctgggaatcccgagaaccccagggagagctgcacggccaggcttcctggagccccgtgtgcccgacgggtctcctgccagctcctcaaaggccacgtggagcgtccttgcaaactgggggtggattctggaagcactacgtgcctggcatcccagtgaagttttcgtaggcaggagtggcgtgcctcaaagggactggagggaccagcttttctaggtccctctgagggtcactgactgctttctgacacctctaatgccaaaccagacgtgtggcctgcaagtccccatcttctttggacaaacctttgtgtggacctgaggcctaaagcccactttgtgtcaagcccaggcccggagcagctccaggtggccggtagacacaaagtgtccccagagaatggtaaagccgttgttttgcacccacaaggctggttggactgtgcctggagaggctgcaggtgggagaaggtggctggatgaggctgcatgttggacgtggcccctgggccttcccccagcatcttggggtcagaggagaaaggctgccgtccgtgtgtcttaagcagcattcccctgaatcacgtttctcagagatggggacctgcccaccccagcttggtggacaccctgctcgggcttcctggttgtaggagggaggccaggaggatgaggcacttattttaaaggacagctgttcccagcgcctgcccctcatgagctgataaccgtagaaggagagagaccgagcagagtggggaaaaatctctccatgcctgaaaaaccagtgtggagaa

SEQ ID NO: 8813 - DNA, 1195 bp, Homo sapiens
ctgtctcatcaccctgctggtgacatcattatttgaattaatatagacccagctttgttatacagtggtcctctccttgtctccctgttaactgctgtgttctgagcagcatggggtacatagtaggtgctcattaaaaatggttgattgagtcattgtgacactgtctgggccccagggagcgtctagactaatgggagaaacaggctcatatctagtgccctccagacaaggaagtaggggctccaaggaggatcaagggctcattttagccactgtaggcaggtgggtgaaggctggtgagagtaggcttccaggaagaggtgccctggtagctgggttttgaaggacgctccagggggagagcattgatttcaagtgtccatcgtggctgtcacgtggttgggggaaccaggatttgaggatagtccagcagtgagacccggtcctggagactctgccaactgtcctaggcttcagtgggcagtgggtaggtctcatgttggtggcacaggcatcccgagaggggccgggccccagcggcgtgggcaggcattgccagggccagcctggtaccgcaccgttaggcttccaggcctggccttggggtggggctgaagctgcgggtcactggcacacattggtgactgcagctggaagccaggtggctcaaggcagccctcaatggttaggtttttgtttgtttgttttttcccctctaaattccactttggcattttttaaaagtgaaattctcaagcataattattttaaagtgcacaattcagtggcatttcgtacatttgcagtgttgtgcagctgtcacctctctctggttcccagccatttcaacaacccacagggaagcctcataggagctaaagcagccactccccgttcccctactctctgtctctatggactgacctgttctagacatttcctatatagggcatcacacagtatgcgtcctttctggcttcttccacatagtgtcatggttttggagtttatcatgttgtctcttgtctccatccttcattcctttttatggctgaaacatattccgttgtatggagatgcctccttttgtttatttcatcatctgtggccatttgggctgtggctgttgtgaatagtgctgctgttgaacatttgtgttgaagtttttgttgggacacctgttttcagttct

SEQ ID NO: 8814 - DNA, 1124 bp, Homo sapiens
cacctgagctccgatcattgctgcgtgtcctgcaggggacagtgtgggctgcttggcttgcgcttgagactcccctccccacacccaagttcaaatctggcgttgccttttccatccgtgcctccctagcacccttgtgcaccatgcatttccccctccccacgcttgcttctgccttcccttccacctggaatgcgcttcccgggcatccttcacctggctcctgtgaagaggcctcttccttcttttggtctctcctgtcagaatcagcggctcctgcctcaccccttctctggcgcagagcttgtccctcatcacagggcctggggctttttacagaatggaggaagggatcctctctgtctggttatcttgtcatcgccacgggggtgccctgcagaccacagctctgtgcagacctccggcctggcaggacctgccaatatactgtccttgtctgatgtcccctccctgcccctcttctaggtgcccccttgtttctctcccatcctcacttcctcaacgctgacccggttctggcagaagcggtgactggcctgcaccctaaccaggaggcacactccttgttcctggacatccacccggtgagcccctgccatcctctgtggggggtgggtgattcctggttggagcacacctggctgcctcctctctccccaggcagagagctgctgtgggctggggtggtgggaagcctggcttctagaatctcgagccaccaaagttccttacttcaccccgactccatagttcaaggtagttcaagggttttatgatccctgtactggtttctataaatgggctctaagacagtaaattaattagaacttatcagctgggatgtctcctacatgtgagctggaggcagccctctggatgtgtcaagataccataaagatctttaggtaccaagaagagcctggggtattttgcagataaatcacacagggaatttgtcccgtgtgaagttctgtctacaagcagggagctggacatgtggccctcccaaggacactccttcagcttgtggcctcttctcttggcacctccgttctctgtaaaatatgcccagttggtcttggtggctgctaccattgattcag

SEQ ID NO: 8815 - DNA, 1215 bp, Homo sapiens
acctcaaatgtgacccaaaaataaagacccgtccatctcgcagggtgggccagggcgggtcaggagggaggggagggagaccccgactctgcagaaggcgctcgctgcgtgccccacgtccgccgaacgcggggttcgcgacccgaggggaccgcgggggctgaggggaggggccgcggagccgcggctaaggaacgcgggccgcccacccgctcccggtgcagcggcctccgcgccgggttttggcgcctcccgcgggcgcccccctcctcacggcgagcgctgccacgtcagacgaagggcgcagcgagcgtcctgatccttccgcccggacgctcaggacagcggcccgctgctcataagactcggccttagaaccccagtatcagcagaaggacattttaggacgggacttgggtgactctagggcactggttttctttccagagagcggaacaggcgaggaaaagtagtcccttctcggcgattctgcggagggatctccgtggggcggtgaacgccgatgattatataaggacgcgccgggtgtggcacagctagttccgtcgcagccgggatttgggtcgcagttcttgtttgtggatcgctgtgatcgtcacttggtgagtagcgggctgctgggctggccggggctttcgtggccgccgggccgctcggtgggacggaggcgtgtggagagaccgccaagggctgtagtctgggtccgcgagcaaggttgccctgaactgggggttggggggagcgcagcaaaatggcggctgttcccgagtcttgaatggaagacgcttgtgaggcgggctgtgaggtcgttgaaacaaggtggggggcatggtgggcggcaagaacccaaggtcttgaggccttcgctaatgcgggaaagctcttattcgggtgagatgggctggggcaccatctggggaccctgacgtgaagtttgtcactgactggagaactcggtttgtcgtctgttgcgggggcggcagttatggcggtgccgttgggcagtgcacccgtacctttgggagcgcgcgccctcgtcgtgtcgtgacgtcacccgttctgttggcttataatgcagggtggggccacctgccggtaggtgtgcggtaggcttttctccgtcgcaggacgcagggttcgggcctagggtaggctctcctgaatcgacaggcgccggacctctggtgaggggag

SEQ ID NO: 8816 - DNA, 1198 bp, Homo sapiens
caggtcgtcttaaagggcttccctggctgggcatggtggctcatgcctgtaatcccagcactttgggaggccgaggcaggtggatcacctgaggtcaggagttcgagaccagcctgattaacatggagaaaccccgtctctactaaagatacaaaattagccgggtgtggtggcgcatgcctgtaatcccagctaccccggaggctgagacaggagaattgcttgaacccaggaggcggaggttgtggtgagccgagatcacaccattgcactccagcctgggcaacagagcaagactccatctcaaaaaaaagaggcttccctgtgtgtcctcatggagcaaagtgtgactattcacagaggaacttccttgagttcctttggttgttgcaaaggccttttaagccccacaggccagctcaactatccaattctagcttgttaagaaacccctggcccctgcgtaacgagccctgttcctcttttctgtcccgcagtctccaacctgtcccagtatttcagcccagcctcggtgtccagcagcccggcccgcgcgctcctgctggtcggcgtcgtcctcctggcctactggttcttgtccctgaccctgggcttcactttcagcgtcctgcacgtggtgttcggccgcttcttctggatcgtgcgggtcgtcctgttttccatgtcctgcgtgtacatcctgcacaagtacgagggcgagccggagaacgcggtgctgccgctgtgcttcgtggtggccgtctacttcatgaccgggcccatgggcttctactggcgaagcagtcccagcggccccagcaaccccagcaaccccagcgtggaggagaagctggagcacctggagaagcaggtcagactgctcaacatccgtctcaaccgggtgctcgagagcctggaccgctccaaggacaagtgaaggtcagccggccgggcgggtccacagttaccagcacgctgtctcagaaaacgaaaacggaggaaaaaaaccccaaaccccaaacaatcttaataaacacgactgagcaagaaagtggcgctgtgtagggctatttccacccacccggcagctcttaggacacattcccagaagagcggaaagatcattgacgtggaactacacacgaagtgtaattagtgggggaaaaaatattttttaaacaaaggatataaccatatt

SEQ ID NO: 8817 - DNA, 1056 bp, Homo sapiens
tgcaggagtcgggaggcagcgatgtcagggaactgggactatgtctttatgactgtgatggtggtaaccaagtggggtggtcccctctggggagctgagtaagaacgcaaaggtttgggtcagtgattaggaagactataatatgactttgtgcatgcccgggagggctgccttgtagagaggatgtgagcagcttagtcgctcatctggccctgtgattcaggcttatggagcgttaagaataacagctgtcaaatggcctagacatggttaatgcaatttgttgctagtggaaatcctgaattgcttcctttctgtgatcactgctacttcttaagatgcttttgatgaatgtcatctgccttacaagttgacacctgataacttctccctgatgggtttccgaactggctgacttaaccaaaaagccagctcttgccatctatcttgcattaaaaggaattcctgaggctcctaaggggtcagctgccccactcctgacttttttatttttaatggtctataccttctgcaacatttttgtttatggccatttgaatagttggactttgactcctcacttgtgaataataggaatatattttgcagaatctaacataatacccttaaaattcatactggacaaccatcagtgtgatgtatagtatctggtgtaaacaaattttattcagcatattaaattattctgtgttttgcttttccttgatatgtaggaggtgcaccagtaccagtttttctcttgtggtggcttaaaacgctgattgccatttgcattgtctactgaaaagctgtggcagcgagtggtattattgaccatgtgttctcatgtctttttgcagatttaaaggttttattgtagtgtccatttaatatctgcatgtgtgtttaatctctgaataccatgtaattaaactgattaacttgtgatggtgatggtgattagcacacactaaaaacccaatgaagcaattgtctccctcttcttaactggaaatcacacttgtgaggtatggtatccattatcaacagtggatt

SEQ ID NO: 8818 - DNA, 1176 bp, Homo sapiens
cggaagttgcggtgagccaagatcctgccattgcactccagcctgggcaacaagagcaaaactccgtctcaacaaaaaaaagataaagtatattgcctctgaaatagaatccttatgtagatttcccagtttagtgtgtgtactttgttttcaaactcccattccttgacaatataggaaaattttttctctaatctctttaaggaacacaaaagtctaagagccaacaaatcacattacctttaagcttgagagcaaggagtttaactttctgctcattgaatttattaggaattatcctaatggctaggagaatgaacagttggcccatagccattgattcttggtcgctagtaagcatcgtcctcctaatagaaaagaggttgtgcctgtctgcaggactcagtccctaggagaccccacgcttcctctgctatattaggtgaaagctttgatcccatgtgttaaagtgcccctttcacaaaaacgaccctcccttttctttcctcaggcctggaatttgcatactcagctgcccccaagtccatgcagagtgccataatgggcttgttctttttcttctctggcgtcgggtcgttcgtgggttctggactgctggcactggtgtctatcaaagccatcggatggatgagcagtcacacagactttggtaagagccagcatcctgtcccttttgaaaatagccagtgagggggaggcgcaggcactcaggagatggctgagtgagcggaggtgttttcacgtggatggcctgtcccgagctgcctgtccaccgctccttccacagcactgctctgtgctgcttgcatcactgtgtttccttacatcatgaacggttttcaggagacaagcaggcctctcttctcatcccaggggccaagcctgccctggccacagcccagcgagcagctgctgcagccaccgctccttacggggacgtccttgacagacaagcaccttctccacgcccgtccagctcagtcttcgtgaggcagctgaatctgtaccccaagcttccctttctttaacttggtggtgtactttcgttttcttttcctaacagcaccttttctgatacgaaaaagacaagatagatagtaagttacttttaaaaataaacatattacttgtgatcaatcataatgggtttttaca

SEQ ID NO: 8819 - DNA, 1152 bp, Homo sapiens
tctgaaacaaataatatgaagcgagtagattggattaagaggtttggataaggaattgcataattggcgcgaagacagggtcctctgttatgaagggggcacgcagatgtctgaaatgctggtaacaggaccttagcattactaacgcctgcactgcgattccctccccacagtgacggaaggtcgagggatccttgagagcatccagaggttttccttgctgcccacctacctccccgtgacctaccacatcaacaacgcggacgtctccttcttcctgaaggaggccaaccaggatatcatgaggaactccagcctgcagtcccgggtggagtcatttctgatttacaaatccaggaggctgcctgtcctcaatgccagctacgggcctttctccatcgagcaagtggtgccccaggatttaatgctaccttccaacccatttggattcaccaacaaattttctcttaactggaaactaaaagcccacatcctgcgggacaaagtctacctgagccggcccaaagtgcaggttctgttccacatcatgggcagagactgggacgaccgcagcgccggggagaagctgccgtgcctgagggtctttgctttccgagagacccgagaggtgcggggcagctgccggctgcagggggacctggggctgtgcgtggccgagctggagctcctgtccagctggttcagcccccccacggtggttgccgggaggaggaagtccgtggaccagccggaggggacccccgtggagctctactacaccgtgcacccagggggtgagagaggggactgcgtcagggaagacgcgaggagaagcaatgggatccggacaggccacagtgacatcgatgagtccgggccccccttgcagaggatcgggagcatcttcctttatcagacacacaggaaaccctccctgagagaactgcgtctggacaacagcgtggccatccactatataccaaagaccgtgaggaaaggagacgtgctgacttttcctgtttccatctccagaaattccactgaagatcgcttcacgttgaggtaagtcgtttcccaatgtctgtctgtacccgcccgtcgatcaggtggtgttttccagaagctgtttgaccagaaaagctgtgttatcgc

SEQ ID NO: 8820 - DNA, 1184 bp, Homo sapiens
gccagctctatgtcatccaggagggactggagagcaccggctgcacgctggtcttcctggtcctctactacttcggcatggccagctcgctgtggtgggtggtcctcacgctcacctggttcctggccgccggcaagaagtggggccacgaggccatcgaagccaacagcagctacttccacctggcagcctgggccatcccggcggtgaagaccatcctgatcctggtcatgcgcagggtggcgggggacgagctcaccggggtctgctacgtgggcagcatggacgtcaacgcgctcaccggcttcgtgctcattcccctggcctgctacctggtcatcggcacgtccttcatcctctcgggcttcgtggccctgttccacatccggagggtgatgaagacgggcggcgagaacacggacaagctggagaagctcatggtgcgtatcgggctcttctctgtgctgtacaccgtgccggccacctgtgtgatcgcctgctacttttacgaacgcctcaacatggattactggaagatcctggcggcgcagcacaagtgcaaaatgaacaaccagactaaaacgctggactgcctgatggccgcctccatccccgccgtggagatcttcatggtgaagatctttatgctgctggtggtggggatcaccagcgggatgtggatttggacctccaagactctgcagtcctggcagcaggtgtgcagccgtaggttaaagaagaagagccggagaaaaccggccagcgtgatcaccagcggtgggatttacaaaaaagcccagcatccccagaaaactcaccacgggaaatatgagatccctgcccagtcgcccacctgcgtgtgaacagggctggagggaagggcacaggggcgcccggagctaagatgtggtgcttttcttggttgtgtttttctttcttcttcttctttttttttttttataaaagcaaaagagaaatacataaaaaagtgtttaccctgaaattcaggatgctgtgatacactgaaaggaaaaatgtacttaaagggttttgttttgttttggttttccagcgaagggaagctcctccagtgaagtagcctcttgtgtaactaatttgtggtaaagtagttgattcagccctcagaagaaaacttttgtttagagccctccctaaatatacat

SEQ ID NO: 8821 - DNA, 5641 bp, Homo sapiens
tgcggggccgcgcgagcgctcgcctccgtcctctgcctccgcaggaacgccgcgatggctgcgcagggagagccccaggtccagttcaaagtaggtaaccctgcggggcgggaggcggccgagcccgaccgcgtgcgactcgcgggtccctcctcctggggccacgatggctgtaatggggccccgcatccacattctttgttttaagtgagcctgtggtggttaaagttccgtgactctgggatcttgagaggtgaagtgtttagggtttacttccaaaatgtgtttttcaacagcttgtattggttggtgatggtggtactggaaaaacgaccttcgtgaaacgtcatttgactggtgaatttgagaagaagtatgtaggtatgtgctggaaaaccttgcttgtggaaatatgtgagaaatgggtaagttcatccactcaatcgcatcgtttccgtttcagccaccttgggtgttgaggttcatcccctagtgttccacaccaacagaggacctattaagttcaatgtatgggacacagccggccaggagaaattcggtggactgagagatggctattatatccaaggtaggcatttgtaacttgctgaacggtttttgagaggttttgtgtacttcagtcttcaaggttatagaaaatcaggtctgttccaacaaatagtgtcatttttgggttaaaaaaagacaagtggacttcggggagttgaccaccattttggtggcagagaaaattttattaaagttgtgtcatttgcatgctgtgtcatgctaggcatgctttagaaaaaactatgacttacactgggacttataagtcatatttaaaacaataataggctgttaacagcagtttcagtatttggaaacttaggttcatgtatgtattttggtgtggtgatcaatgaatgtttttactgtattagaaaacaataaacaccagatactagaccagaggagataggagatcttaacaagtgttatacaagactagctgatttcttgttaaattgtttgtactaagttgtgcagagtatttttctcaaatagtttgatttaaaaattgcaaggaaaatgttcattgtaccaaaaagaggaatcaagaaaatactcatctctcttggaacctcacgttgccgataacacattatctggaatcattccatgccttttgctttccttgagcatgtacaaataaacacaagaatttcccccaaaagaatcctttaaccaaaaagttgtggtttcttgccttgctaactgtaccatagttattcctgcaggtgaatatataggctttatctgggttatttatttatttaatttttttttgagacagggtttcgctctgttgcccaacctggagtgcagcttccgcctcctaagctcaagccatcctcttacctcagcatcctgagtagcttggactataggcacgtgccactatgcctgactaatttttgtatttttttgtagagatggggattcaccatgttgcccatgctggtctggaactcatgagctcaggtgatccacccacctcagcctctcaaagtgctgggattacagacgtgagccacattgcttggcctatctggattttttaagacaggaataatgttttccagtatagccagccatttaaagaccttctgaagaatgtgtttccaggccctaccctcagaatatggcagcttggttatccagaatctcatttagcattaattacttcagatacttttttgggatgaggggagtattaatggtgaagtatatcagggagatttgatagggtcagctcatctctcttaggaggaattgtgtattaacatttttagaattgacagagaccttgaaagtgaggggagagatacaggtgactcgttgaggtctaagactataactagttgaatcctagtctctggttcttagcattcttcacttgtgcagtaaactgagtgtactaattcccacaaatgtttcttcagcccagtgtgccatcataatgtttgatgtaacatcgagagttacttacaagaatgtgcctaactggcatagagatctggtacgagtgtgtgaaaacatccccattgtgttgtgtggcaacaaagtggatattaaggacaggaaagtgaaggcgaaatccattgtcttccaccgaaagaagaatcttcaggtgtgtaaaattaaaacttcctgagttatttctcttagcggagattatatgtaagaccatgaaattaaccagtgtctattatatatggaaatgatttttttttccccaagacggagtcttcctctgtcccccatgctggagtgcagtgtcgcaatcttggctcactgcgacctccgcctcccgggttcaagcagttttgtctcagctcccctagtagctggattacaggtgtgtaccaccacgcctggctaatttttgtacttttttttctagtagagacggggtttccaccatgttggtcaggctgatctccaactcctgacctcaagtgatccacttgccttggcctcctaaagggctgggattacaggcatgagccactgtgcccggccggaaataattttgtcttttttatactactgtttttaaagaatgatagagattgggtttcactgttggcccggttggtcagctgaaatgtttgtgtatttatatatttgttgttcgagacagggtcttgctctgttgcccaggcaggagtgcagtggcatgaacatagctcactgtagccctgaactcctgggctcaagcaatcctcccacctcagccttctgagtagctgggctcacaggcactcaccaccatgcccacctaatttgtttttttgtggagttggggtcttgctctgttgcccaggcctgatcgtgtactattggcctcaggcaatcccacctcagcccccgaaagtgctgggattacaggcatgagccaccatgccttgccaagaatcttaacattttcttatcttgcaatgtcctagaaaaatcgtcatcttaataatgaattttaaaaagtaattttacctttcttttaaacagtactacgacatttctgccaaaagtaactacaactttgaaaagcccttcctctggcttgctaggaagctcattggagaccctaacttggaatttgttgccatgcctgctctcgccccaccagaagttgtcatggacccagctttggcagcacagtatgagcacgacttagaggtattgtggccactttgctgttcagattgttcggtttggcttgtttattcctggcagttttgatctggagtgttaacgtttttccatctcttcgtctaggttgctcagacaactgctctcccggatgaggatgatgacctgtgagaatgaagctggagcccagcgtcagaagtctagttttataggcagctgtcctgtgatgtcagcggtgcagcgtgtgtgccacctcattattatctagctaagcggaacatgtgcttcatctgtgggatgctgaaggagatgagtgggcttcggagtgaatgtggcagtttaaaaaataacttcattgtttggacctgcatatttagctgttttggaacgcagttgattccttgagtttcatatataagactgctgcagtcacatcacaatattcagtggtgaaatcttgtttgttactgtcattcccattccttttcgtttagaatcagaataaagttgtatttcaaatatctaagcaagtgaactcatcccttgtttataaatagcatttggaaaccactaaagtagggaagttttatgccatgttaatatttgaattgccttgcttttatcacttaatttgaaatctattgggttaatttctccctatgtttatttttgtacatttgagccatgtcacacaaactgatgatgacaggtcagcagtattctatttggttagaagggttacatggtgtaaatattagtgcagttaagctaaagcagtgtttgctccaccttcatattggctaggtagggtcacctagggaagcacttgctcaaaatctgtgacctgtcagaataaaaatgtggtttgtacatatcaaatagatattttaagggtaatattttcttttatggcaaaagtaatcatgttttaatgtagaacctcaaacaggatggaacatcagtggatggcaggaggttgggaattcttgctgttaaaaataattacaaattttgcacttttttgtttgaatgttagatgcttagtgtgaagttgatacgcaaggaaaatggtccatgtttacccacagttttcaggtactcctagactttaaagatgtcttgaacatttaagttcttcagcagttcacactacaccgtttttttgtttttttttcccccccgggagggtttttttgtagggcagcacagcagagcaggacatggatgaaatactaggaatatgcacagtggggcagtgtgggggcttctcagtaatggagaacagttggtgaaacttttttttttttttaactaagcatttaatttatcttgcatattttccacatttaaaaatgaattaggtctattaggataattaggagtttgatcccatcaacactattcttgtagcagttaggaatcttgagctatttttttctcatacgattactatagtccagtttaccaaagttttctttagatgtctgataatcttgagatgattgcttaccttaaaaggtatagaaaggatcacttaaatatatggaaaaatgaaataagggtgaagctgaataaagttctacttactgtattaactggcaacagttgagtttcttaagatctgaattgctgtgtatgttacgctgtattcagaaccagtttctaaccagcctgtgagatgggaagttttttccccataattgggatgaaacctttcattcaggtattttgaattgaaggtgtatgtgttgtttgtaaccttgtggagattgcaagtggtgttgacattctggatcttctatgtaacagttgaaatttggaagtgacgtcacttacctgtctaacgtggtgtgggagagaatttacaagtcctttattgaaagaataattgttgcaaaatatattgcttctactttgcctggattttttgaatcatctctagtatttgctttaggaaatgctgaagagttagcagagattattatcttttgggggggcggcggggaaggggtcagttctctccagattgtacaaatgggaaaagtctgctctccattttttgaaatctcgtgtctaatgggggaagccttgaaagctttatatgaagttactgcaaaccagtaatagcttattagagcaaagtcattaagaaaaagcatagttagtgcataggtcttgtgtggatataatgtgaaactggtaaattagtagtttcaatttgtgtgagagccagtttttttaaaaaaccacatagaatgggattttttaaaaaattgtatcaatcataaaatgtctagaaaagatgagactccaaaatagcctccaaagaggactggtttcctggctaactgttcacctgaaggaactcaagtacagagaatttctggtttcttttgcaaaaacagatcagaaacacaaaaaatta

SEQ ID NO: 8822 - DNA, 1187 bp, Homo sapiens
gggtatatacccagtaatgggatggctgggtcaaatggtatttctggttctagatccctgaggaatggccacactgacttccacaatgggtgaactaaaaaggaacgtattttttcccagcgtagcatctctaatactctaatactgtgctcctcttgttggctccggctgtccacagcctgggggctgggaagagagtgctgcctgtggaaatgctcgggaaccagagggttcactttctccttttgcatcctgggaggtgacaaggaggtcactctggatagccacaggaggagactttctaagagatggttgctgtgtttgttggtgtgaggggcccaaagttgaaattttatagatatacatcttcaatgttctgttttccctgttaacacccagattttccttttattcttaggaatccagcactacgccctgccctctactgactggaggcaggcctctgcctactttagaagttaaaccacccgataggccttcgagcaaaagcaaagatccaccgagagaagaagagaaagaaaagaaaaagaaaaagcacaaaaaaagatctcgaacaagatcacgttctcccaagtaccattcgtcatccaagtccaggtctagatcacactcaaaagcaaagcattctcttcccagtgcctatcggacagtgcggcggtcgaggtgggtgtgaagggggcagcacctctggtaccctcatgacccccatgtccttcacaggacacccagtagagctaggtagaacgtttaaaatcagtgccgctttcattaagcagacgcgtgtatgcatgtgcatgtgtgccctgcaagtccaagtaagatctttttcagatttttgtttgttttatacttaactttttcttttttgagacagagttttgttcttgttgcccaggctagagtgcagtggtgcgatcttggctcactgcaacctccgcttcccaggttcaagtgattctcctgcctcagcctcctgagtagctgggattacaggtgcccaccaccacgcctggctaatttttgtatttttagtagagacggggtttcaccgtgtcggccaggctggtcttaaactcctgacctcaggtaatccacccaccttggcctcccagagtgctgggattacaggcctaagccaccgcgcaggcctatacttaacttttcaa

SEQ ID NO: 8823 - DNA, 1250 bp, Homo sapiens
cgcccggcctatattatttttatatattcactgctgacaagtccaagaagcaaaatcctactcatttgtttgtaactttcagttaaaagaaaaaattaaggtaaaagttacctgagtgtggtttccaccgtgatggtaggctaccaattttaatccgacctacgtttaaaacactttacagcgtcagcagagcaaagtgtttccagaacactccaatttttaattagtctccatggccaaggaggtagtatctacatacttctagttaattttagttaaataagggatttaaaagcatttgattttgcaactgagacaaaatatgaaggcaaagtgcaagcttattataaaatgaaaataatattataaaacaaaaccttccaggtgttggattgtctagcaagttctaccgtgggtgctggcccctggcattggttcccctccacagggccaagggcatagctgggtgcagagaccggcagtgccgtggtctctggagtctgaggacataagttaaacaagctagtcaagccccagatgcttgggaggcagaggcaggaggattccttgagcccaggagatcgaatctagcctgatcaacatattctctatgacaaaagaacaagaagaagaagaagctggtggtttctcaccataaccttttcttgtggaattctgcctcagctcttctgggaacagtgagtgcgtgttttatttagtaggattgcatttttctaaactggctgcaaacctgcctcctccatccaagctctgccagcaataatcatttccagggatccaagtggctttaaaatgcaagttagaaatgggaggggtggtgatctcctcagtaatatgaattattggagtataaaagataactaaattttaaccaaaatattgaaagtgttaatgctgttgttatcagatagaataaactgttacaaacgcagcctccactcagaatggatcggacttgtcacttgggcctgaacagacctaattgatcatttttcatgactgctgccagcccacagtagaataccgcagttgttaatatttctaattgggtaggatgctacatggaatgtattttgttttatatattaaattactaaaattctatataaaatacagaaagttaagattagaaagccttcttacagcacaacgaatatttatttaatggctatactgttcctgtggttgaagtcccatgtatttagtatgtctaagttatgggcgactct

SEQ ID NO: 8824 - DNA, 1680 bp, Homo sapiens
caagcactttatgcatatagagacagaacctggacctcaccagggactgctgggcagcgattcctggcagtggcctggtgtttgtacatacacatatgcagacacatgccagggccccccaagcccgagcaccggaccacgttgctgcccaggtctggacctcagcgggagaactggctccggggggagtggggccctgcgctagaggcagaggcagttctttgttcaagcgttcctctggggaccggcagcagaggcaccgtgttctctcagccctggatacgtcttgtaatctttcacactttattcctaaaacgtgtcttatttttatgcagctcattttttctttaaaggagaaaacttgtaggtgtttaagaattggttttgggagggcgaggactgggccaggttagaggcagatggcacaggggcgtgtggcgggcgggtgaggctgctttgcacacctgtgttggtggctgtcccctgccgcccctccctgtggcagcagcaggacaggtgtgtgcccagcaccctccctacctgggcctggaagcagatgaggggaatacttcatgcaaagaaaaaagtaacatgtgcaaaagctccccgtccagctttgacagtcagttttgatgtcagctcctcggcagggtaggcctgatgacagccctgtccctccctgcctctgccttgcccaaggccacggagggcatctgcagagaggcctgccttccggattccaggcgggcatgccctgcaaaccccgcctgggcctcccttggtctgcccagccctcgattagccctgcctgaatcagtagatacttgaacgagtccccagtctgcgggaggcagtggtggggccatggacccatgcggggggttccagggtcacacgccacataacagacaaaaatacacacacgtgtgtttttctttgcaatacttgaaatattgccactgtgcttggacttagaagaagaaaatccccgtgacttcttcctcatcaccttgatggctttattctcaccttgtggggcatgtttgtatttattgcttcatggccgactggaatcctgagtcctgggaagctggcactgcggggatcttgcccggtgtcctggtcctcttgcttccgtcgcggccgcatgtgcgtgtgtccaagcaggtcctgggcgcctcaactgctgcccctggttgaatgttctcttgatagtgctggaccctttgtctattttaaagcgaattttgtgtgatttcctgccctttgcgttatattgtataataccaacgtaaggaaataaacctttggaattgttgggctggtgtcaccacttgtcttcgttggcttgtcactgttttcagggttctgtcattttctttctcagccgaggcgcaggagcccagggcccctccacaggtgcccacaatggtcgacacagccctgggagcagagccccagggcagaagctggatgtgttgagggacaatgcaaacccctgcgccacaggaagcctctcccgccaggctgggggtcctgcacagggtgaagagagtccagagggcagggcatctgccttggtatagctttgggcacctgctttgactcctttgggggatacacctaggaggggctttcggggccacgtggagctgtgtgttaacttccaagaagcaacac

SEQ ID NO: 8825 - DNA, 1540 bp, Homo sapiens
tcacactggccccactgccgctccccagccccacctctccaggcttccagttcagcgctcagcctcggcggtttgagcatgggtctccatcatacattcaggtcacgtcccccttgtcccagcaggtccagacccagagtcccacgcagcccagtccggggccggggcaggccttgcagaatgtgcgtgcaggtgcccctggccctgggctgggcctctgcagcagcagccctacagggggcttcgtggatgccagcgtgctggtgaggcagatcagcttgagcccctccagtggtggacactttgtgtttcaggatgggtcagggctcacccagatcgcccagggagcccaggttcagctccagcacccgggtacgcccatcacagtccgagagcggagaccctcccagccccacacacagtcagggggcaccatccaccacctgggaccccagagccctgcagccgcgggtggggccggcctgcagcccctggccagcccaagccacatcaccacggctaacttgccaccgcagatcagcagcatcatccagggccagctggttcagcagcagcaggtgctgcaggggccgccgctgccccggcccctgggcttcgagaggacacccggcgtgctgctccccggggctgggggcgcagcggggtttgggatgacgtccccacccccgcccaccagcccttccaggactgccgtgcccccaggcctttccagcctcccactcacgtctgtggggaacacgggaatgaagaaggttcccaagaagttagaggagattcccccagcctctccggagatggcacagatgaggaagcagtgcctggactatcattaccaggagatgcaggctctgaaggaggtcttcaaggagtatttgattgaactgtttttcttgcaacactttcaagggaacatgatggatttcttagctttcaagaagaaacattatgccccattacaagcatatcttaggcagaatgatttggacattgaagaagaggaggaggaggaggaagaggaggaagaaaaatctgaggttatcaatgacgaggtaagaaacaggagttaatttgtttagtacaaatcttctagatgatcagagtctatgcgacaatgaattaagtaataatttattgagcctgcggtatttctaaggtatttctaaggtgttggggcaaggatttgacccataagtaaaagtgaagaatgtgtttggcctccttcatgggaaggaagagctgttgagcgcagaagtgtgtcaggaggaagggacggagctgcgctatgatgagtgcgtcttcaacacccagtgttttcattgagcaccaaggattcatctcaggttcagagaactcagcaagcgtgtccagtttttttccccttgtatctgggtgtgtggtttgttggctgacgctgacagctgtcaccagccaaacgtgtgaaagcccagcaccctttgtctggttttccaagtttcacattttactcgtatagatctccttaaaaacaccatcagcatgg

SEQ ID NO: 8826 - DNA, 1226 bp, Homo sapiens
cagtcgatatcatatgcaaagcccctggagacatattcttgccacactaatgggagccacacgtcgcattgtcatagtgtctttcaacaatttttactcctatgtttttcctaattgctgctgttgtaggggtgccctgtggtgatctggtgcttgttttgcttgatgctgacttgcaaaggtcaagcgcctctctttccttttgtgtgtgctcggttgtggccaacttctcgtgtgagtgtggtgggtcttggacaagcactggggtgttagacgtgtctccttgtgactcattggtagaagctgccacacttgggaatcagtgcttttggcacttttcttattttgcaggaggaatgccccccacgccgcaggccgcgcagctcgctggacagaggcagagtcagcagcagtatgacccctccacggggcctcccgtgcagaacgctgccagcttgcacaccccactgccgcagctgcccgggaggctgcccccagccggtgttcccactgcagccctctcctctgcgctgcagtttgcacagcagccgcaagtggtagaggcccagacacagctccaaatcccggtgaagactcagcagcccaatgttcccatccctgcaccgcccagcagccaactccccatccctccctcgcagcctgcacagctggccctccacgttcccacacctggaaaggtgcaggtgcaggcctctcagctttcctccctgccacaggtatgagaaaagatagaggaaaaaaagaaaatggtttgcaggatttgctggctacctgtgtgttagacagagtgtcacaccacactgtaatttgtgtattttctcttagcagcttgctcccccaatttagaacaattactcaattcagtacttgcaatacagttttatttggctctatgatattatctttattaaagtaatagagaactgggctgggtttggtgactcacgcctgtaatcccagcctttgggaggctgaggcgggtggattacctgagctcaggagttcgagaccaacctggccaacatggcgaaaccctgtctctactaaaaatacaaaaattagccaggcgtggtggcaagtgcctgtagtccaagctacttcaaaggcttaggcaggagaatcacttgaacctgggaggtgaaggttgcactgagctgagatcacaccattgcactccagcctgggtgacagagtgagactctgtc

SEQ ID NO: 8827 - DNA, 1134 bp, Homo sapiens
ggaaggtaagtggaggatccagaaagcggaattactgttggatatcttttctaggcacattatagataaaaccattcttggaaatgggttctcaaccagctcttctgcaattgcaattgcagctccgcgatacatggcaccgtctagcagcactgatggcctgccaccccttgccggagtgttccacctccggaaatttacccgagggagacaggctcacagagtggaaagatgcagagggcaggctttcttggcgttgtgtggattgtgggctgtgagaagtagctgagcatgcacgctcatcagcagagcttcaccaagggtgtggcagcacctgtgtattggcacggaggagggtctgcttgccgagtggccgttagagggggcgcgtctggatgcccacgttagggccctgccatagaaatcagttttgattcttaggtgctttttttgcctcttcatgcagcaagactttttttctttttctctctaggaagcagatctttctatgtttgatctcatcggcttagaaaataaaatcactcgtcacgaggcagagttgctgtctaagaaaaagataccgcggaaactcatggaggaaatctccacttcagcagccccagcagcccgaccagcagcagcaaagctgaaggccagcaggtgcgtgcgacccagaggcagcggggagggttggctcccagggcccccacagctgacccaggtctatgcgtggtgaaaagaaaggctgctaatgtagttaggttatctgctgctcttgggaccttgctggtgtccttggctgtggtatgcctggctctgcagatgccttttaggctgtgtggtgcagtgcaactgcttgcctccctgagcagcaacctccttgatcgtctttgcagcagttttagggtagggtgggtgtcagggctgcatttgacctggtgcctcgtgtggtggaggctggtgtggccgaaccacacatgtgtcgtgagtgtggcaggcagaggactccacccccacggtgatgtcattgtcttaacaagtgacatgtgagtgattctgaagtgatgcttttgcgggtgtcatgaggctgggagggacagacacgttagatgattaaaacgagatataaatgac

SEQ ID NO: 8828 - DNA, 1183 bp, Homo sapiens
acattttttggcccacagaggctgggtcgcttggtaacatctctgatggccgccggtttattcatagagatgacctgggaaactatcttctccagagtaaaagaagtcagaaagatgtagtcacacaagatccaaagtggcagcctcgttaaacagcagcagaaaagccacaggcatctgggctaaaaacagggttttgttctatttcttcattctccttgactgctgtgatctgggagtggggatgtccgcctcagtacctcgaacagcatggcaggtcctcagcagctgtgtgtcacccaccttccatgagggacagagggtagatggccttttcttgacatggagcaagataccttgtctcttagtgtgtcgtcatccactgtcggtgatgggttgccactttcctcacagtaactgaactttgcattgatttttttgtgtagatttgattttcagtttgtcaacttatttttgtactgtttggaagtgcctggagtgtgtggctgtgatgtacacatgcctgtcattgacacctagtggacctatgattgcaggcagcgtcctccagatcgtgtccgcccccgggcagccctaccttcgagcccctggccctgtggtgatgcagaccgtgtctcaggcgggcgctgtgcacggcgccctgggaagcaagcccccggccggcggtcccagccctgcacccttgaccccacaaggtagggtgctctgagcaggagggagacttggcttggatgcttctttctcttccatctaaggcgagtggaaagcattcatgtgtctttgactgtatctcagaacagcacagtctagtgtgtggccatctctgatttctatagatgtgtcctagtgtcagcctgatttattttctttttcttgtgctttcaaaggtattggttggatataaccagcctccactgtccttaggtttttgttttgtttgtgttctcacaagaaatttggaatcatgagaaatcttgcttgtttgtatatcgccagtgtgctccgtttcccctgggagtgggagtgtgtggccgcccacgcagggtctggttctttgtccggcccgagctgccactcctcatcctgtctcgccacctgcttcacctctgagtccccgctctgtgcctgccttggccccaggtctctctggacatgctctgtc

SEQ ID NO: 8829 - DNA, 1064 bp, Homo sapiens
gagtcttccggaggggcctcctgtcagctctctgggaggcgggagagctaagattggaggggctggctgagagcggcctttggtgccccacgaaggcatgttctgagcaggggtagctggaggagggacgtggattcgttgatcaccatctgcatgctgtgcccacctgttgtcactgtgtttcctggtgactgacttagcatcttacatcttttgtttgcaggcttgtgagtggcaattccattgaagagaaattgttgaaaaatggaactaaagatctgatccgagaagtggctgctcagggaaatgactactccatggctttcttaactcaggtactccttattcaatgagaggcctgaggtgagacccgccatgcggcgcgtggaatcgcatggtgttagtgcacactagcaaggggcttaggtctccagctgaggtcagatgcacacttggaccttgtactggggagtaacacacatctctgtgttcagcgaaccatccaggagctgtttgaagtttattctcccatggatgatgctggcttcccggtcaaagctgaggagtttgtggtgctttctcaggaaccttctgtcacggaaaccattgcacccaaaattgcaagacctttcatagaggtaagaatacattgaatctggctgaagagttgcacggtgggagccggcggaacacctgcaccctcccccagggttctgggtgctcagtccccactcttccctggcctgaagccctcttcccgtccctgcttttggaacctccccactcccttctttctgtcatggggattttgaactgtaaatacaagtgaggggaatggtggcgaaggtcgcggaccacaggcctgtcaccgaagcagtcgctgccgtcttcatctgcactttgccacagtctcagctccttcccctccccatggaaatctatccctgcctcctctggaggctctgcgggcactacccctactcccctctagctggctgtgttggcttctccctgagcagtgcagccatgagtctgcactcaggtgctgagtgtaaggtgctggt

SEQ ID NO: 8830 - DNA, 1629 bp, Homo sapiens
ttttggtcagtgaaaaaaatttgcaatattttcagagttaagtttgatttgaagtaaatgtgacttcattaaattaaagtcacaaaagccaaaacccacaagtatggaaatgaacttaaaatgaagagagtctcgagaagcccgtagggaccgtggagcttgttcacccccacgtagggaccatggggcttgttctcccctcgtagggaccgtggagcttgttctacccctgtagggaccatggggcttgttctgccctcgatgtctttgactggatttgcagcaggctgctgcttgtgggggtgatgcattgtggagcagtgtgtgtagagaacatgtggctctgagacaacagggaaacctggagcagggactcgggggctgctctgagctgcactcctgatcctgaaagttcttgctgctctccccgtcaggacgcagtgatgactgcagtgagggcatgggagttctggaacctgaagaccctgcaggagagggaggcccggctgcggctggagcaggaggaggcggagctcctgacctacacgcgagaggatgcctacagcatggtacccggcccggggccctcctgccctcttgcccccctgctgaggggcacttgtgcagccatgtttggcttgttcaaagtctgtgtacattgacatgagaaaatgcctaggaatttttacttctcatatcaacacaacctcacttatgttctaaaaacacaattttcttaaaaattgacacttggagattgtcagttagatattgaccagctctgattaaaacatttataagtcttataaatagtcatgttgatcagaacttatttgaaagacttaatgagtatgaaggtacatgatttgtggcttataacatgacactgagacttggtggaagtcagagcttgccgtgttccctacaggagtatgtctacgaagatgtcgatgggcagacagaagtcatgccggtgagtgctgccctctccctttgtgtctgtgtgggcagcttcctgtgagttccacatctcatgggccttcccttctccatgcagctctggaccccacccaccccgccgcaggacgacagcgacatctacctcgactcggtcatgtgtctcatgtatgaagccactcccatcccagaggctaagctgccccctgtgtacgtgaggaaggagcggaagcgacacaaaacagacccctcaggtgcgcatcccgagggcgtcacatgacctgggggggccctggcctgcagaatccctgcatgtcagccactttctgctgtctgcctgtctgctgtctgcctgtctgctgcagggctagcgatcacacgcccatccgctgcctctcaggccatgtgcacaggttatgttgtttccagtgaggaaaccttcgtgtttcattctaattgaccatgaaggcccgaaagcaggtctgtctttggcaggtgctttctgtggcctctttgcccaggcacctccagacttgcctgacctgtttcctttgtcttttgcctgcccgtgtggaatctcctggtttactctcttgctgaagactgcctctctgttcagctgcaggcaggaagaagaagcagcgtcacggggaggcggtcgtccctcctcgg

SEQ ID NO: 8831 - DNA, 1238 bp, Homo sapiens
ttgtaaaacatacctgtgacgcattcacttcctgacttcctacacacttagagagcaggtactgcctgtgtcggtgtctcaaagcatgcccatgtgtgctcccccacacaggtcagtctttaatgcctgttgtagaaaagctgtaaagcacacaagaagcattgtgaaaagaaaggcagggtgcggagctgcggactgtggccatgcacaccacgctctggtgtatctctgtactgtgtgcgtccgtgtgccacacagacgctgaaatcatatgcgcagaatcacacctgcagagaataggagctgtgccaaattggggaaacccacactttggactaccaggcaggcataaaaatatttttgttacatagaaccatttcctgcagtagtttttagaaaattgtttgctgtagtggaatttttatatgtactcaggcaacttcattcctcatttattcaaaagggatctttgtgaatacttacttggtgcaaggtgggcaagatgggcagtgcccacattctggagccacgtcctacaggggagggaggcagccaaagggatcattttaaatgctggcgggaggagtcagggtggcacaatgcaggactggcttgttaggaaacacctttctgaggacttggcatttgagctaaggcctgaatgacaaggagttggtcataagaagaacaaaacagcaagtacagaggccctgagcttggctgatatgggggccagaaagctcagtgtggctggactcaggtggtgagggacagagggtggatgaatggagtggagggacggaggagtggagggacagtggggtgagggtggagggacagtgggatggagggtccctggggtggagggacaatgggataggggtggagggacagcaggtagacagagggtgggggcaccgccaggtggaatgagctggggaggatgggacaggtggctgtgtgaatgtcgtggagtttggatttgattctgaatgaagtggaagcctttggaggatttatgcaggggagagcctgacgtgaaattcaaatggattttttttttttaaataggcaggaaccattaaaacatcagttactgggacgagcatgcccactggtaagacaaatacagagatgctgaaatgtggaccccatttctcctggcgctgttgccttatgcccgcctgtctccgcaggtgccgtgagtggaaatgtgatcgtgaacaccatcgcagggg

SEQ ID NO: 8832 - DNA, 1120 bp, Homo sapiens
cagatgtacacaatatgatctgcaaaaatggtgcataccagtttgttaccccgtgtactaaatattttctttatgtctgccaagtttttacattggatttgagagattgtgatcgctttcagtcacctaagtagcagccccgtgcaggtgtgacaagggtgtcagggtgccccaccagcccgactattcagggagcagtgtcccgggtggggtgggctgcaggcaacggccaggcctcctggaggagaagctggcggccatgccgcatgggcagaggtaggcctggaggcagcggcagggatgggacagggggcaggagatgtgggtatgcacagggttggtctgggaggtaggctggaaaggggctgggttctgccatagggcccagagcgggcaggcgtcccgggagtcttgagcgcggcatggtctctgcggccctaatttcgcagtctctccccagatcaccgcacagcagatcaccacccctggcgcgcagcagaaggttgcctacgccgcgcagccggcccttaagacccagtttcttaccacacccatctcccaggcccagaaactggccggggcccagcaagtgcagacccagatccaggtgagcggggaacagggtgagggcccgagtgtcaggagtgggtgcccggcctttggattgtgtgtctcgcgggctttgcgagctcccagcccttgcggctgcactgggtggtgcactggagggaagtgttgtctcctggcctcaggtttcaacccctctggctcctgggaaggctcctctctgccggggcctgttccagctgtcgccagctttgccttcatgttctggacgtcgatctccagctctgtggggtacagctgccctctcccagttccaggctcctcttctcccttcctggtgtcttttttaaaaatatattttattttattttttgatattttttgatatttcttgttcatcaagttctacctggtgtctttgggagaactgagttcctgatttcatgtgtgcagtgtgccctcccgtcttcctctctgcctagagcttttatgtcctgcttcctcccagagcttatggagttacctccctgcatccttctctaagagcggggga

SEQ ID NO: 8833 - DNA, 1103 bp, Homo sapiens
tcccggggggagcgggtgtctgcctggggggagcgggtgtgtgtccgggggagcgggtgtgtttcagtgtgtgctgtgcctccccgtgggtgcacgggtgtgtttcagtgtgtgcctgagagaagcaggtgtgtttcagtgtgtgccgtgcctccctgtgggtgcacgggtgtgtttcagggtgtgcccgggggaagcaggtgtgtttcagtgtgtgccgtgcctccccgtgggtacacgggtgtgtttcagggtgtgccatgcctccccgtgggtgcacatggcacggtggagggctccttgcacatgtgcctggacttgctgtgggaatggcctgggaggctgggcgccgacccctgccccccggacctggaggcccagcaccatctccccggcccccatcaccactgtcccctgccctcctcatgactgtgtttcattttcccttaagtatcaggaggaacattaatgacaacataaaacccagagctccataaaagccatttctacagattgacggcctgctgggctcgtgggagggtgggggcctggactctgcccaccccatccctgcagcccccgaaatttccaggccgtagaggctccctcactaaaccacagcagctttttatagggtgtgtaattaaaccaggaatgacccagtgtggccaggccagaggggacacagcctggtggggacggccccccactgtctctgtcccacagcttctgctggtggcagagcaggaagcggcaagggagcggcatgggcggcgcggccacaggccaggagtggaccccaggatccctggacccagcctcatgggcaggaattggccacttggctgggtcacagcaggggctcagccaggccctttgcacccccaccccagctcccctgaggctgccctttcacctgaggttctgtctaaagccctgggctcagctctaccatcctgggctcttctctgccaccctgggctcggctctgccaccctgggctcttctctgccaccctgggctctgccaccctgggctcttctctgccaccctaagctctgccaccctgggcttggctctgccaccctgggctcggctctgca

SEQ ID NO: 8834 - DNA, 1176 bp, Homo sapiens
gttcccccaggtgtgcctttccccaggagtctctgctgggccacaggccatctgtgtgcggggacaggcaggacacgtgcccatgcacgtacagacgcgtgttcacactgagacgggcgcacgggcctcccctcctggggccaggcctcccccgcagcctgctgggtcctgagccctgggaggagggggccgcacatcaagcaggcgccatcccagtggaaccccgaccgcgaaggcttcctccctcggcccccaggcgcttcctgaggctccgagtcagcccggcccaggctggggacggccccgtgtcccgggatgggaccaggatgctggcctgcgggtggctggaccctggctcccggggaggggctcaccgtgttctctcttgcctctagatgccagcctggcggtctcattcagccagccaatcatgtattgccagcctcattcgggaattctgattggtacttggtcacaggctcctctcttacctgcacccctgggcccgcacgtggcgagcggccaccccggcttggcctgccgaccccgggagtgccaggtgactatccgcctcgccccgccgggagcccgcggccaacgtgcctctctgtctctctctctttttctcttgtagatcacgagctgctcaggcaagagctgaacacgcggtttctggtgcagagcgccgagcggcctggcgcctccctgggcccgggggctctgctgcgggcggagttccatcagcaccagcacacacaccagcacacgcaccaacacacacaccagcaccaacacacattcgcccccttccccgcagggctgcccccgacgccgcccgccgcacccccgccggtgcgtaggcccgcgtgctggcagggggcgggggcgggcgtggggcggggacacgcagcaggcacacacagacacacgctcgcacacacaccagcccaggaggaggtggggggccggcggcacctctctgtcgtctgtccggtccccaacgtgccttctggtgtccccaccccaagctgtgccatgaggcccccaccctcggcagtggtcctggacttaggcaggcaccccgtgcccacgtgcatgggacaccctcacgcctgcactagatccccagtgccagggctggaggcccagacaggcctgagggcacagggaccatga

SEQ ID NO: 8835 - DNA, 1675 bp, Homo sapiens
cggcgcaccgccccccctggtgacggcggccgggccccccacgccccccgggccgccgcggagccggactactccgctggggggcctcgggccgggcgaggcgcgcgactactccccgtcccgaaatcccccggaggtggaggcgcggtagccccggggccgcagacgcctctccgagcggagcgcaccgctgtccgtctctccatcagttcctagaactcaagcacagctcccgccgatcctggggcggcgccgcctctccacccgcagcctgcggaggcggggacttgggtgtcggcttttctgagggtgatcttttgttttccgagtttgggattcggctgttgggaaaaaaaaatcgcgtttgtaccttttccccccacagatgagaagtgtttgtaatggatttgtatttttcttaattttatgctctttagacgtttaaaagaaccaaaaaagaaacttttgcttcttcgttttcggttgggatttgcagtttaatggcctcagatccttctccagatccccagggtttctttgtcttatttatggagaaaaaccggtcactttgtccagcgcactgtgaggcccccactcaggccagccctggcccccccttggtacttggaaccgaagttacagattatattaaaataataatgtacaaaactttgtttttttgccttattatgcagaagtgtaatttcttttttggtttgtttttttaaaagcaaacgaaacgtgtaaatagtctgttgatataaatatatgacgttactaaattcttaatctagatagactttataaaaaccgtttccagaaacccctctggttgtttgtctaacatggtcacaaaaacccaggcgctgctggctgtaaacattatcagaagtttaatggcagcaactttccttcaactatgcaagcgcttcccggcggctctgctggttgggggaggaaggttccgccagcgacctcccagcccctgggtccgtggaggggttgggtcccccagcagagcccctgggccagcagaacagcactcctgggcggctcctgtgggcttcaggactggccggctccagccgcaagggcgatgctgtggacgtttgtgtggatggtgcagtgttcttggaatctgtagaccagatcggtggaggtatagaagtgcaagagtctaaaggctgattttacacacacacacacacacacacacacacacacaaaatcactgctgtgtgttttcttccgcctgaggcatcagcgtcacctcggtgtggtcgtcgcctcccaggcccttggcctggcctcctctcagtttgggttttgccctcacccacatgagcccccccatgccctgccccccttgcggccttttgtgttccccgatgtctgggctgtgtccctgccgggattcccagccttcggggtcagccgtcgagccacttgctttgctcagttctgtgtttcagccacatttccacggtggaccctgtttgttttaaatattctgttcccatgtcaatcagtgacgataaatacagccttgatttggatgaaactgtggtcgcgtgttctgtggtgttggggggccaggctcacccaggctgacccctgcagccgtgcgtccctcctgcagcaccttgggatgctgggcgcctcggcggccccacgc

SEQ ID NO: 8836 - DNA, 1152 bp, Homo sapiens
ccagaagtctaggactccgaatagcgtgtgctttgtgtgtgtaccacagacattaccacttacgcccagtgacgagatcatcgtcgtattctcgccaggtaaatcgggtccttcctcgctccaacatggtctacaatctctatgagtattcagtgccagaggacatgtaccaggaacacatcaacgagatcaacgctgagctgtcagcgccagacatcgagggcgtatatgagactcaggtgactccccagccaccctcgactgaactgggggaggctccagcagggtggtatggaggaaagaaacccgcccagggtgtgggctggggaacagcagcgacagtggactcgttcccacaggtgaggtgaatgtcagcagtgtgtctgccaaaagtggcctttgggcagtgggccgggcagctgcaggggcacagccacatcccgggcagaagtcacgtgggcagccagagcccccaccatccagcccttgccggcctgtctgcccgattcttccaggttccgttactgttccgggccctggtgcacctgggctgtgtgtgtgtggtcaataaacagctggtgaggcacctttcaggctgggaagcagagacctttgctcttgagcacctggagatgcgctctctggcccagttcagctacctggaaccaggtatggcctgcaccagccgcccatcatgtgcctgcctcccacacatctggggtgacggtcttgtttccttctccagggagtatccgccatatctacctgtaccaccacgcacaggcccacaaagcgctcttcgggatcttcatcccctcacagcgcagggcatccgtctttgtgctggacactgtgagtcctgggccctccatggcagcacattggctggggcagggtttggggaaggaggacatctcccagggtgcccaggccctccaggtcttgtcctcaagggcctttgcccatgagtgcttgtcgtgattgaattggcagtgccgtggcagtggtggagtctgccccagggctgcccccacttcctcctgcgcagggggaggctgacgtggcctgcgttggtctaggtgcgcagcaaccagatgcccagccttggcgccctgtactcagcagagcacggcctcctcctggagaaggtgg

SEQ ID NO: 8837 - DNA, 1157 bp, Homo sapiens
agccacctgcatgatggctggtcctggagtgagagaggctgaaccaggagctaaggtgtgcggtgaagggggcaaaaggagagtgacttggctttgggattcctgggccgctgtagcctgtgaacactgtaactaggggaccgtttttcttctccactcctctctgctaggggcctagcacagcgtttggtacgaacaaaggctcagtaaatgcagtaatggatgggtggttggaccagctgaccaacaaacgggtaaacaaatgaactgggtgactgaggctggataactggccacggcctcccgctgaccgtggcctgttggactgttcttttcggcagttccgggtgctcttcgccaacctggcagctctgttctggtatgcctacctggcctccttggggaagtgacgaccgctgggagaacatcaggtgcactgtggacgtgggtctgggggtctcacccgcccagcgagagcagaaccaatccagtcaggatgtcactgactctaaatcaggtgattcaagatgcccaaaaatgatggatagagaaacagaaatctctgaatgtcagaaccctgtcttttaaaaaggcagtcgctgccttcaggtggtgctgccccagaaacttaaaatttagtcgaggcagtttcaattgttactgtggaccgaattaggatcacaataaacgataatgcaggttcttcaatggtgactttaatctctcagaacaattgctgttgctttgaaagacatgcatagccagatgttttttaaattttcgtgtgtgtggtacgatacataaaacacaaaatttaccatgcatctggtcgtggtggctcatgcctgtcatcccagtactttgggaggccgaggcaggaagattgcttgaggccaggaatttgagaccagcctgggcaacacagcgagacctcatttctacaagaaaaaaaaagaaatacatatatatacacacacacacacacacacacacacacatatatatgtatatatgtgtctatatatacacacacacacacacacacacatacactcctgggatatcttcctgccacagtctcccaagtagctaggattataagttcccacccagccatacctggctaattgttttcttttttttgtagagatggggtc

SEQ ID NO: 8838 - DNA, 1217 bp, Homo sapiens
tgcggcactcaggtgcctttcaccttccaggtcgggagcaggctgaactcactgggctccgcctggcaagcttggggttgaagtttaataaaatcgtccattcgtctatgacgcgcgccatagagaccaccgatatcatcagccggcacctgccaggtgagtgctgcgcgcggggcctccatgcttgcagcagtgggcggctcgtggcagggccccggcctgagctcctggccaccgggaggtcacagcatctccgccggcggggccgcctcacccagcgcttcgctgtgcttctctgcaggcgtctgcaaagtcagcacagatctgctgcgggaaggcgcccccatcgagccagacccgcccgtgtctcattggaagccggaagctgtggtaaaaacctccccggggggcagctgtgtcaccctcgccttccctgggcaaagcggccctgctgggctcaccatccaccacgtgcccggccgtcccacgggcttccccgggcggcgatggggtctgtcctcctgacacccgccctgcccgagcacttccgcactgacggctcctcactctgcccccagcagtattacgaagacggagcccggatcgaggccgccttccggaactacatccaccgcgcagatgccaggcaggaggaggacagttacgagatcttcatctgtcacgccaacgtcatccgctacatcgtgtgcaggtaggcagctgctgggctgggcgtggtctaaaataatttcagacttagagaaaagcatgaggaagaagccgagcgagaccctcctccactgccgatgccaccctagtcaggcctcaccagcccccgggcgtccacttcccgcgagtcctagtcagttacgcggtaggtggcgtgttacttggagcttctcataaggctgttttgggcaagggtggtgcagacagggagggacccctgtggtgtcctgggtggggtgcgtgctgggtggggggtcctgagtggggtgcgtgctgggtgggggtgtcctgggtggggtgtgtgctgggtggggggtcctgggtggggtgcgtgctgggtgggggtgtcctgggtggggtgcgtgctgggtgggggtgtcctgggtggggtgcgtgctgggtgggggtgtcctgggtggggtgcgtgctgggtggggggtcctgggtggggtgcgtgctgggtgggggtgtcctgggtggggtgcgtg

SEQ ID NO: 8839 - DNA, 1215 bp, Homo sapiens
tgtaccccggccctgaggctgctctgagacttctgaggggctcagcctctgtttgtagaacagagccccctggcacagcctggcccagcctcttttaaggacagagtcccctggctctagcccagcccgtttttttttttttagacagaatctcgctctgtcacccaggctggagtgcagtggcgcgatctcagctcactgcaagctccgcctcccgggttcacgccattcttctgcctcagcctcccaagtagctgggactacaggtgcctgctatcacgcccagctaattttttgtatttttagtagagatggggtttcaccgtgttagctgggatggtctcgatctcctgaccttgtgatccacccgcctggcctcccaaagtgctgggattacaggtgtgagccaccatgcccggcctagctcagcccgttttaaggacagagccccctggctctaacgtgctctttctctctctctctctctccccagagcactgcagtttcctcctgaaggctggctccggctctccctcaataatggcagcatcacccacctggtgatccgacccaacggccgagttgcgctcaggaccctcggggacacggggttcatgcctcccgacaagatcactcgatcctgagggctccggcctctccttccctctgtcctccctgcacaggccgcacacacttaacgttttgttcccaaggagaccggcggaaagtagaaacctgcaatgctgcatctgggaactgacttgtgaccaggctgagaaggggagagttgggatcagacagcctgacttctctgcagggttttatacctgaccatgaacccccaggatggcgtggggtttaaggtgaaagcgtctcacgcacaagtcaggcctgttgtggggacttgaaagaggcctgacccagaccaccatgttcgcacccacagctgacccgtgctgagggtccaggctccattggcaaagccggtcaggcacgagggcgactgaggcacgtggatgaggagggcacccaggttctgttcacaactcacttcacttcatacatccttttaatttcttaaaaccctcttgtcccttaaatatttgtcaattaaagattttctggctgggcacagtggctcacacctgtattcccagctactcaggaggccagggtgggaggatcacttgagctcaggagttcaagaccagcctg

SEQ ID NO: 8840 - DNA, 1140 bp, Homo sapiens
agtgagctgcgatagcaccactgcactccagcctgtgcgacagagggagacaccatctcgaaaaaaaaaagaaaaattctttttttttttttgagctggagtttcgctcttgttgtctaagctggagtgcaggggtgtgatctcggctaattgcagcctccgcctcctgggttcaagcgattctccagcctcagcctcccaagtagctgggattacaggcatccgccaccacacccggctaattttttgtattttcagtagagacgtggtttcaccatgttggccgggctggtctcgaactcctgacctcagatgatccgcccgcctcagcctcccaaaatgctgggattacaggcgtgagccaccgcgtccagccaagaaaaaaagtttttaatgaaagaaacagaaactgatgccattatataatgaaccctagtacccatcacccagcttcagcaggtgttagtattttgtgactctttgatttttttgtcttgggcctaggtgaaatgacaatggatgctctgttggctcgattgaaacttctgaatccagatgaccttagagaagaaatcgtcaaagccggattgaaatgtggacccattacatcaactacaaggttcatttttgagaaaaaattggctcaggctttactggagcaaggaggaaggctgtcttctttctaccaccatgaggcaggtgtcacagctctcagccaggacccacaaaggattttgaagccagctgaagggaacccaactgatcaggctggtttttctgaagacagagattttggttacagtgtgggcctgaatcctccagaggaggaagctgtgacatccaagacctgctcggtgccccctagtgacaccgacacctacagagctggagcgactgcgtctaaggagccgcccctgtactatggggtgtgtccagtgtatgaggacgtcccagcgagaaatggtaatgggaccgtgtgtaggatttcctcacacagatagcacatacgcggaggggcgggatgacgtctgaaaatggaaaactacagattaagaaggaaaaaatccaatcccctccatctcatcaccccagttaaccattgttaacatttttatgtagaacttttctgaaatatttgtg

SEQ ID NO: 8841 - DNA, 1501 bp, Homo sapiens
ggaaccgaccgtgtgtgcctacgcgtgcagaccctcctggcccctcaggtaaaggaaccgacggtgtgtgcctgcgcgtgcagaccctcctggccccgcaggtaaagtgtctcgtctaccccctctgccatcactgtacctcacgtggcctccaccacagcacgtcatgtctgccattgcgtgtgtgcccattacatggcgagatccttgaagacagagactcattccccgtctgcctcccaccaccttgaacactcccaactcctaaagtgccaacacaggtttaatttgccgaattaaatcttcagttctgctgattctgctgagtacattcctctgctacaaagctaatggttccaaaacaaaatgattaagtatttgaatcctggagcatcaacactgccttttaaaatacagcaaagtctaaactagtccagctgaaacatctgtgagcttcagttccaatgagggagtccagggagttagaaactggaagagcaccttttttcagtggccgggaagatggcggacattcagactgagcgtgcctaccaaaagcagccgaccatctttcaaaacaagaagagggtcctgctgggagaaactggcaaggagaagctcctgcggtactacaagaacattggtctgggcttcaagacacccaaagaggctactgagggcacctacattgacaagaaatgccccttcactggtgatgtctccattcgagggcggatcctctctggcgtggtgaccaagatgaagacgcagaggaccactgtcatccgccgagactacctgcactacatccgcaagtacaaccacttcgagaagcaccacaagaacatgtctgtacacctgttcccctgcttcagggacgtccagatcggtgacatcgtcacagtgggcgagtgccggccttgccggcctctgagcaagacagtgcacctcaacgtgctccaggtcaccaaggctgccagcaccaagaagcagttccagaagttctgaggctggacatcagcccgctccccacaatgaaataaagttattttctcattctccaaaaaaaaaaaaaaaaaagaaactggaagagcagcatcacggccacggcccagacaggcaccaccacctgaacagaaggaaggatgggatgaccagcaggactggactcagccattacaggtggaacatgcagaggagaactgctgcagaggagaactgctgcagaggcccacagtgacgacgcctgggccttacactgaccaagaaggaacacagccaaagacgctcaggttccaccgagagggcacgccaacatggtgacagccaaccgcaccgagctgagtccagtgcaatcacagattctgctcacttaattcccctgctggtgtccaagcagcccacctctccagaacagagaccccatgacggtgactgtaagtcacaaagacggcccctctttacaggcagctcctcctgaagccggaccagagagagaatt

SEQ ID NO: 8842 - DNA, 1244 bp, Homo sapiens
tgcaaagcacttgtgctctcagtgttgcaggcaggatttgtggaactggatggcatacttctcacattaagacttaacacttgcaccccccacccccgtgttccacatgagcagctctgccaacaggctctcttggcatggggagcagaccttctatttcatcaggctgaccttggccaacatctccctggatgagctctggcagtctgcctttaaccacagcgagatgttctttgctgaccaggtccacaaatgctgcaagtgcatcgtcaagcagggccagaccctcttcatcccctcaggtgagtgcaggcagctttggggaccgtgtcctagggcttgccggccctcatcaaggttacgcctctctccctcgggctgtgtccccaccacggggtctgtctgcatccctggcatgcctgctcccttgtccggagcttaacgccaccccagcccagtccctgcagaggggccagcaatggagcttgtgctgtctggtcagcatgggcactcctcaccaccgaggccaccttggagctgcacagccagtcagcccctttcacagcctggctgggctcactgtgactgagcccatggctggagacccagctcagagagccttgtgtggggacggcagccacggcatcagagccagtgagggaggagggtgctagctcctaattaaggcaatattagaggacattttctgtctgtgctgaaggagaaagcccgtcgtgagccactgtgtgcccctagatgatggaagaacaaatcccagacatcccgctgtttcattaaatattccactatttctgaagggctgcctttccttctaaagtaacacagctacaatactgttctcacacctcaaaaaatgaacaattaacaattccctagtattctcaaatagctaagttgtgttcagagttttgaatcgttttatagggtttttttttccatttaaaaaaaagtatcaactgaggccttcacattttaatgatttataagcctcagaatcttctgtaatctctgggtccctcctctctccgtcggcttcctcaccgtcacagctatttaagaaagagctgtggatttcccaggatctggcccaggctccgtctccaaggataacccggggtccagtcccagctctgggggcgatgcagctgccccggccttgtctcctgcccctgagtgtggttgggaggccgggtggctggacacaggctggggcttcctctctc

SEQ ID NO: 8843 - DNA, 1205 bp, Homo sapiens
ctctggccctaccgacgtccgcacctgaggcttccctgctgggggatcaggcactgtcagctcctcggggccgccctcagccctgggacgccctccgccccaacgaccctcctcctccccagcgtcgcgccactcggcggcctcgccggctcccctcccacccttgaccttttccgccacagctacagaacgcccaagcgctcttccgcctagggtgccctccctgccccgcccacctgcgtcccgcgggctcagcggtgttacgccgcgcccgccttaatatgattggtttttgttcctgtcactctaggatccaagcccgccattggtcggcttccgttacgccgctgatgtggagtagggccgagcgcggaacgcgaggggctgctggggtgtttgtcgcagcgggttttcctcggcggtttgcggagctgctaggatggagcaggttgcggagggagcaagggtgaccgcagtccctgtgtcagctgccgacagcactgaggagttggccgaagtcgaagaaggagttggagtagtgggcgaagataatgacgcagccgcgagaggagcggaggcctttggcgacagtgaggaggacggagaggatgtgttcgaggtggagaagatcctggacatgaagaccgagggggtatgtggaggggccccggcgcggggctgggcggggagctccgggcctggcggggaggacgcgagctggaaacagcacgggcagacccaaaacaggagcgggggaggaatgtgagagttcaatgcaagcacgcgaaatcgtgggaaaagcgaagtgacatttccaactgcactcttagggctgagtgtgtgagggaagcttcagcaaattttggaggattgttttggccgaagagacgaagcagtttgggatgtggtgtgtggtgatcacaaggctgcaggcagctggtgaagggagctgctgcgctttggcgtgatatgatagtgaagtaatgcttctcgtcgtagtccactgtccacgccatcgttacagtgttttccaaaaccgtaaccaactccctggtttaaaatcttccggaattttcatttgcccttggagtaaaatctcaatcttacccagagggtggcatttaaaggccttcataacctgatcagcatcatccctctctcccctatgcgttgtatagctcgcagccacacagaaatacttggaa

SEQ ID NO: 8844 - DNA, 1923 bp, Homo sapiens
agattaatatgtatgattattgtgaagtttttcaaaatacttaattcagatgtttaaatgtgcttattagtgcatgttattacattaatttttaaaactattttcccatgataatctttcaaggaaaacactctcagaagtttccatactgaaatcataattctttgtgtatgtttgtattagtgctttctatcttcaaggaattgatgtgaagatttttttttagaatgtttacttttaaaaaaccgaattgatgctgctccccagttttatttctctgatttttttaagaacgtatttttcttacatagcgtagtttcatgcaatataaacttttgaaaaaaggaatcagagatttattataatattgtttaggcttaagattacatttgcttctgtcacgaaatcagttctttgttctttaaattggggcatagcattagcaatatgtaaatcttcagatgctgcatttttttaaaaaaaacatagtaactaattaaattgctcctttcttccttctatgtgtgatcctgattctgctggactttctgccgaacttcatgacaccaccacttgggattttgccaatttttcttgtcacttatatttggcgtgttccaaatggacttcatattctattccttattgtgtggtatcatagcacaatgacagatttcctcaaggaccaccatctcagatgggttcacctatggggagtagaacaggttctgaaacccctcaagcaccaatgagtggtgtaggtcctgtgagtggtggtcctggtggctttggtagaggaagtcaagggggcaactttgaaggccctaataagcgtcgtagatattaaacattcgttcattcctggctatctagaaaaaaaaaagtcagtggtatgcctttatacttttacctgttatctggaagaaatggttttattgttaatgtatgtagacttaaaagtttttttttttttgtaaaacttgaggtttttgtatttttctttattcatgagctttgtagattagaatggtaatgatgctcatcattttgaatgttgaaatgtgtttgtgactttagctaaatataagtattccatagtactgtgaaatctatgtagttaatctcaataaagaaatcattttggataatttaaaactgttattagtggtattctcttacggtcttactaaactttgctgtaacagtaatgctttggttgctttaactaatcctatcattaaaaatgaaaatgattttgctttttaatttgcgcaagtagcactaaagatagaagcttaattaatgaaagctaatgtcaataaggggtagatagagtagtatatgtgggggtgggagggtatgggagtttaatttgtataaaccactgatgttctgtgaaatcggaatttccagctacatttcatatagcttctgaatattcaggtattctgagacagattattaaggatatctttgtcctgtgctgatttttccaaataaatctttttcatcttgaaaaaaactgtttgaaggcaaatctcttttgcttataaaaaataatgtctagttttaaacatatctgccattatttatttggttttaatatctagaccttacccgattattatcgtacagttagtgttaaacattctttaaaataaaacaatactgttgggttggctgtgaagtgaggatttgctgtgtgatttgtggtgaattaggcatttcttgagaatgtaggtttctagaagtattaaaagatggcttgactctgcagtgttgtaaatatttccctaaaatttggacatttctccagtaaaacgtgtctgatgggttaggaccatttgtctccaaggaatggcagtggttttctttttaattgtttgtttgtgtttttcaagataatgctgagagacatccaag

SEQ ID NO: 8845 - DNA, 1209 bp, Homo sapiens
caggagttcaagaccagactggccaacatggtgaaaccccctctctactaaaaatacaaaattagttgggcatggtggcacatgcctgtaatcccagctgctggggaggctgaggcaggagaatcgcttgaacccgggaggcggaggttgcagtgaactgagatagcgccattgcactccagcctgggcaacaagagtgaaattccatctcaaaaaaaaaaaagaaaaatatttgtgaagccataaggtttagaactgaaacatagaatttcatataaaatattattttatcccaaatcacttgcagtacttagaagaacactgtgtcagggcttggctattatagtcccctgggggacagaaatacttcaaaaattctttttctttaatttgaattccaaaaagtagatgcttgtattctaggctttcttatcacagttaacatcttagttttgtatgtgttcttttcaaagcttttatccagtgtgatattacaaagtagatcatgtgtcagagtaatttttaatttggaaaaataccttttaatgtttagtaaacctaactcaaaatgatttggttaattaggtgccagttcctgtttttctgcctgctccattggacagcagtgagaagattcctgcagcaattgaggagctaaaaagcaaggtttcttcagatgctcttgatacagagttgcttacaatgacggatatgatgagtgaagacgaggggaaaacagagacaaccaacatcaacagtgagctacactaaattataccttgcgaataagtgttaacattggttatttataagtattgttacagtactttccagggcatatcattttgtttcaacttatgtgggggtgaggaaagcattgtaacaaaaatgttttttatattaagagatctacactgtatttagccaggtgccctcagacagatatccgaagcaggaatttggtctttggtctctgttttaagcaggatttgacttgtaaaatcaactcaaaattattcttgttaatggagtagtgctgatgcaaaactataataacttgtagtagactctaatgatgatcaaaactcttattttgtaatagttatccctagttttttgttttgttttgtttttttttttagatgaactcttgctctgttgcccagggtggagtgtagtagcatgatcccggttcactgagatctctgc

SEQ ID NO: 8846 - DNA, 1418 bp, Homo sapiens
tttctctttttcctcccgcctccaaagtccacagaatcttaatcagaggatggatgttttttatttgcaaccagaatgctctagttctacagatagccctgtctggtatacgtctacttcactggaccgaaacaccttggaaaatatgcttgtacgggttcttctagtaaaagatatttatgataaagacaattatgaactggatgaagacacagactaaaaaggaacgttgcagaagcaatcgggataaaacagcattagatagtcatgctgctagatctttattatggaaaacatttcaagtttactccttctgttttgagttttgtagcagtgtacccacgctgggtattaccatgtaaataatctgtgagtgaaagttgccattattctatgtagtggttttaggatacttaacaaatacattcaaattctttttttattattatttatttgattaggtatgtttgtaactttttacattacagaatatgaatgagaatgtgccatgtataatttttttcttgtagtaagaaacatccatattgcacaactctactgttgcaaagcttccttggaagggggctcttttactgggttcttaaccagatggttgtgtatgggtagcactactaaaagtttagaacttgcagtgtctttcggaatttttaaaataaactgtaaactaataggctggggtttttgttttgttttggggttttgttttgtttggttttacattttagttactgaagccttacaaggttatgtagagagataccatcttctgtaccaaaaatagacaagagaatgctgtcaatattggtgtactgtaatgtgaatctatgctggtgaaaacaattttttgttccccttattaaaaccttagtgtccttttctcatttgtggctttctgcatcacccaatcaataaaaaacaaatatatatatgtatatatatgtatgtatgtgtgtgtgtatatatatatatatatatatatatataaatgattgtaagttgaaaacaagatcatcaagacatttcctttgtaaaaatgtctggtgaaagtataaaattctgttttcttctatgccagccataagtatctgaaatcctcttcatttatagaggtttgatttttatttctttttttccctcttaaggatacagatcatgctgcaatgttagctgtgtagtactctaaaacttagcaattttatcagaattcttgtgcctgtttacattggataaaattgtttttagaaattccactcctgaaatagttacagaaagtcaagctatgttaaataagataggatcacattttataatgaagattaccagtgtagtaattctgatattgcaaatgattgaggaacaaacaaagaaactaatagagaaagtcagtctcagaggaa

SEQ ID NO: 8847 - DNA, 1199 bp, Homo sapiens
ctgtgggcccagggcggggagaaattgggagcagatggcaaaagggagtggcaatacattcgcacctgtgtttgcaagattggatattactgaaaaaggctcttggctcaacgttgggaaatgtagtttttagtaattatttttgctttccatatgtgtgtatatatatatagtacgtgtgtgtgtgtgtgtgtgtataatctgcttctaaatttctaagtgtctcggctttgcagaggtaggaaaataattcattcaataaaaaagacatggaaaaaagttggtaaattgcaaaaatattggagaaggtgaaagggaatgtaaagaacactcgctccctccccccacttgtgaattgtcaactaattgccaccggtggtccgcctagagcccctctcacagctcaggacgcactgagctccggctgggttgtcactctctggattcatttgctttgttctcttcaggtgccatcatggaagaacaggcagcagaactccttggagtgaagatgtgcacgtttgttccaagacacacccggaacttggcaaatgagtttcgctgttatgtgaattatgattctgggctggactgtgggatctgattacagacggtgacataacacaggaaggaaccctgtcacattcctctttttgtattttcgtagtagatttaaaagttataatctcttcccctccccccaaactggagctgtccctggcctggttttcaaaataaagtgtgcgatcttcattattgtttccttagggagggcgtccctagagctcagtcttctgccaacctgaatccatggaattcgagttggaagaaaccttagaatctgcctgatcttctctcctcatttaacatgtgtaaaaacagaagaacagttgtgtggcttgcccaagggctcctgaatgagacaggaccttggcctctgcctcgggccagagcagtctggtagcatcctagggcttgtgaggaaccccacccccatgtcccaccccagccctccaaggagacagacttgcctccatgcaaaaaggcaataatccagtaactagcgtctgaatgcctcttagagctctcctcctcctccaggttctaggtgggctgcgagggatgacaggtgcccaggtgccctccctgcgtggctcagactcagcaccctccctctgaactgcctgagaaaatgaaag

SEQ ID NO: 8848 - DNA, 2555 bp, Homo sapiens
ggggagaagccactaccattttttaggtgatggggatgccactgagttgcaacggctagaccttttcagggtggttgtgtccatgtttgcctgattggatgcttattcactttgtgttttcttttgttttattttgtccaattttgtctttagctgtgtttattaacttctccggtcttgttttgttttaatgctcttggcccagtgggtgtcaagaacactggcttaattcaagtcagttgattttttttctattaaaactgttgttaaaatattttttaaaacaaaaacattatttgtgccctcttttatatatgtcaaagggacactgtcaagtatttcatttttagatttttgttttataaaatttctgttgttcatatagtatcctttaacctctagttttccatacatcctttgtttgtttctcattttattttccttgacccatttatttcccaaggcacaatcactaaagactttgtactttcacagtctgttaatgtggtagcacctgtaactgtgttcttgttctgttaaaaggattgatttgcttttatagtccttgtgctggatgagtggctgcctcagtagcaaaactacctgacagtatttgacagtgtcctttccagcaccattatttgggtctttcagggtggccatctctgttagaagacagtagcatgttaacatcactgcattgagtttttgtctggtgtaaagtatgacttttaatgtaaacaaactgcaggtttttttcaaactaattttaagaatttagtcttatttcgttgtaaactgtgtatctaattatattacattactctgttcagatgggatggttactaccacttgtccatgattttcatttgaaaagcaagtatctatatcatttccccccagtcagcattatttaacactccccttaactgtctttgaactttctcttttaacaaaaatgtcaagtctttatagttgtaatatcaccatgtttcccatttctgttaatacttctatgaacccctaaagtattgaagggaactagctgtcagtttcaaggattacaagtttgagtctcctagtattcaacatcattctgaaccctgaaataatatttttctctgttaaacaatttttatctgtttgccacctctgttgttagaggtggttgtcaattgaccttactaagttagctgtctttgatgaggaattattgttattggttcctgaataaaacattaaccttttaagtcagaaggaacctcggtacttcttaaggtttgtttgtgttttctaaaaccagagaataaggaactgatttggctatgaggtttaacattataattttctgtaagctttcccacaaaaaaacattgttgatttgaggatataataatgttttaatctttttaaaatataagtggttattctctgacttggtaactatgttctgaaaacactgcatttaagaatttttaaaaattggttttctaaaattaaaatgtccaaattaggcatattgctgagctcaaattgatgtgaaatgccatggttccagttgaattttaagcatattttcatttagatataaaatatatgaagtatgctttgttgattatagtgagaacccatgacatagttaaccaaagaatatgtttggttcaaataaaaatagaagcttaatactgggcattcatactttttaaagagaatgaatgaagaaatcggtttcctgctgtagttctctatgggtaagtcttagtaaagacgagaatgctgaagtcggccgtggcgattccctcctaggaactgggaggtgtggcttgcccattacccgcttgaagctcacatctttaccctcctctcccactgtggtttgatcttcacctattcccaggccctcccagcaattggagaggtgtctttttttttggttttggttttttttctccccgtctgcattcttaggcctcttagctattaggaactgtcagatacatactagtagctaattttcctagcctgaaattatatactgcatctgcactatgtacctactagggatctgacctcaagtgttttctgagcccaggcttcctggtgtggtgtcttttaccacataaaattattacaaattgcaaatgttggtattgtgatttgattatctgtacaaagaaagaagctctatgcagtgagtttgtggtttaatggtcacaaaaatgttagcactgctaccactcagcacgtgtaaaattttttaaatttataaatattaaaattttaaacttacactaagacttttcagttttatttaaagacccagggatgagtgtactgtttaaatatttacctctattaacataactaatgaaggtataaaattgcatttagtttttcagaagatgctgcaatatgattttaggaaataaggctatgtattgagccagttataggctgaatatcaggttgataaaattttatttgtatttttaaaattcataaatgggagttaaaatgtgtcttttcactaaatatttttattacatttttgtttt

SEQ ID NO: 8849 - DNA, 2000 bp, Homo sapiens
atgctgaattattctaaatgttaactcttaaaaatgtgtccctgccttttagaaccccacagtccagtaactgataagatctacttgtatgatattctaaggaggatacttgtgtatactttatctcttcaataggctgaatattctgaactggtcgaaacattactatcaagtcagcaagacccagttatttaccagagattagcagatgccttcaacaagctcactgcaagcagcactcctcctacgctggatcggaagcagaagatggccttcttaaagagtttagaagaatttatggcaaatgttggtggtctcctttgtgtaaaataaacaacagaactttatgcttaatttagatcctttctgcaaagtgcactgaattgctgaaagttgacttgagtcttgtcctattcctcagttcatttggccattttggattttggagagcctgaaactttgatatgtatgtaatacagtgaaacaggagaggtcaacttggcatcagcttctgctgttaagtgttagccacaatctgtcatatatatgtcttttagattctgaatggtgatttaaaattttcaaaatgaaattccatatatgtgcaaacagatatgggcaccacgaaatacatatgcagtgccttttttccttttaacataggtggctagccaaagtttagaatttttgtcattaaatatgaaatggatatatgctaggcagtgtttctcaaaatctccatagatcgcctgcatcacttgaggagctggtgaaaaggcagattcttaggcccaactgtagaccttcagagtcagaatgtctggttgttgggcccaggagtcttcatgttaataagcttctccctttcgtcaccccaaaagttttgaatcaatgaaagagacattgaaaactcttaagaggttttgtgctttctagcttttcctccctttgatgattgggttttataattcagcaggaaggggaaacatcaccaggggtttgttggctttttcttagcttgctttcttgcttgcttgctttcttgcttttcttgctttctgtctctctctttcttttctctctctctctcacatcaacccagtgctgcaggttttgtgtaatacaagtcactaatcatactctgatgcctgaacttgaggaggaaaatacatgtatatttttgttccgtaaaaataaccttaggaactgtagccatttcattgccttaattttaagaggaaaatacaaaaacagctgatttgttttagtaagaaaccacgtcttgatgcttcagagttggtttagggtgttagctgctatgaacctgttgcccctttcgatcgtgtatttatgtaggtttatcagtgaaatgaaaggcttgtttccgtctagtctaactttttgagtgtgtttctatccagccacatagcccatatctactctaaatggcttgcttaagcaataattattttaaaggatgtgaatcactgattcacacagactattgcacgttggggcattaggggcaataattcttatccagacatgggagccagtgaatttaatttcagagattaaaaattcactttagatcctctagtttgatctcttaatcaggatttttatacagctgccaggctcccctaattcagtgtgccagcttacaatgtggaaatgaaagctaatttatacacagcaggcatatgaaactccactcattgcagtactttcacagcacagtgacaggtagaggactctggcacaggtgcactcatgaaactctgcttccaccatgttcctgacacctatctattaaaccattctgcaaatacggtttttctacctgattgcatatagcatatgtgtcattacatgtgatgctgtgcaaaactttgtataattctgtgttattaacagttaacaaaactggagcatctgaattacatccaacctgtgcatgtgatgttaggtagatgtgaatgcagggccttgggccataa

SEQ ID NO: 8850 - DNA, 1099 bp, Homo sapiens
agagtgaaactccatctcaaaaaaaaaaaaaaacaaaaaaacaaaaaactgtcacctctgtaactgctctatttctgtgtttctttcgttagtttgcctcgtcctgtcctcctttcatagatctctgaggcattcagtccctggttccagaagttaccccttcatcagggtcccattagtaatgttgagctgggtctctggtcttagctctgattgtagagaataatatgactttttaataagttgtatgtatcgtaaactgaaacaagctatacatcaccaggctcaaacccaaaaaccttataggcaatctgaaaaacactggaaatcttctttccttatataactcagtgaagatattgcccatgagtctacttgtgtatctgtattcatttctagaaacactcatccatttaatactagctataatttttttatcttttataaatcgaatatatccaatctagtttgttctttgaccttcatgatcagaatgagttcggaggtttgccagctttgcctggaggccttgacaccgttagctgaacagtgtgcaaaagcacaagaaacagactcaccactttttctagcaacacggcactttcttaaggtaagatgtctgtgcggtaggtcagaaaatcagctactttcaaaagtgtggtcggtgcacataattctgcattcaaatgaggaaatgcttccattctttcgggggcaaggaaaccatgacttcctgttcactgtttttttctggagatcagctcttcatggacacattctcatcctctattttttgtgttcttggaaattgatgtggtacacattgagggaatttgatattgttgattattcagataccacagcaagtagcaatatctgtaaggtattttttttaaaacattaaggaaaatttcagattgatttaataaatagaataacaaccaaccctctcttcttcttttttggactggggagggactggaggatatatgatcatcctatgtttttatttagaagtcttatgtaatttcagctggtttttgatatgctggttttgcaaaagcacaacacagagatgaccactgcggctggcgaagct

SEQ ID NO: 8851 - DNA, 1187 bp, Homo sapiens
agaatcaagtttactaggaaatattggatttaaacaaggctcaatattcaaaactttctaaataattcccagatcttgtactgtaacatgaccatgatataaaaacacaaactatactaaccagggtagttttaagtagtgatgctaagtagtacatgctaaaagagtttggcatgtactctgaagatttaatttgatgtatttctcctgaaaatctgaaaattttgaatctgaaaattctctttagctagtaatgctgatattcacacatgtggttacaacttcagcagaaggacatctctagtgttgactcttcctttccttatcttgtctcctgcttcgtgaaagatcagaaataatatgggacagttgtctaaaactctgtagatgaaatgttcaagtatagcctgacctaaatccagagaactgaaagacaaaaaaggacttttaaggaaaaaaatatgattagacagcaactaaataaataaaagaataaatgacttctgttttatacctacaggctgttgtctgccattctcagagtttcagaagttgaatctcgagcaataagagcagatctcactcatctactaagtccccagatgggcaaagatattgtttggtttttaaaacgctgggcaaagacttatctcctggtggatgaaaaactgtatgatcaggtcagaatgtaaaacttaaaacttcatttggatttatgatgatagcagttatagaagcaggaacatttttcttggtggtttttcatcaaaatagaactgtttaagagcagtttaacattttctgtgtggaagagaattatgtgactggaatgctgttttaatgtgtttttgagcacatcccttgatatcgtttattttaactgctgttgaagatacagattattatttgggaatagattatgcttttttgtatttggtttaatactatgttaattttttaatactatgggaataatagaagttgacgggaaaatcacactggaaaatgtgagtggattgaggatgtctttttttttgaccagtggaaatgagtacatgtgtaaagttgatgtgaagtaagcactacttcagattagatactaatttcagttcgatttttctctgttttttttttcttgagttgatctttcttgcttaccttaaaaaatttgtttcctctcttaagat

SEQ ID NO: 8852 - DNA, 1117 bp, Homo sapiens
ttggagatgggtcatcctgctgaaagcttaatacttaaaaatgaaatattttaacagcatggctcatcacaggtagtaatgttcaatgactagtttattaaaatgtttttcagatacaaagttctgttttgcacagggtgagaatcttaggaaattttctgattgctttatatttttatttttattttttttaaagctgtgttattttttagttcttcatgctttggaagtaacagttgaagagaggtgaggaaagtttgtgaaaattgtgatcggtgattagctgccacctgcctgaggtgtcttctgagaggaactaacctctttgtggtgctagagcaaggtcactggataaaaaaaagaacaggtaaccatcttattccttgtctgaaaagttctgttttaaaattaataaatgcaaaatgtgcaaggtaaaatgaattattgtttaaataaagtttttaattttctcctcagaaactagtaaagtggactatgtcctctttcaagctgccacagccataatggaagcagttgtccgagagtggattctcttggaaaaaggtagcatcgagtctctgcgaacattccttttaacctatgtcttacaaaggcccaagtaagtacatggagggggactgctgaaatacttttgctgagcttatgtgtatctttttagagctttttttgtttgcattttaaaaacttttgggtgggtatagtggctcacacctataatctccactttgggaggctgagagggaggatctccttgagcccaggagtttgagatcagtctgggcaacatagtgagaccccatctctactaagtacaaaaaaagaaaaaaaatttaaaaagctctagatgtttaaggttaagttttgtgtggggctcatattttaaacacttgtatacacgtgattgtaggtagttttggtgcttaatgaaataataccttttatttaagcttttggtactatgttttgtttctttgaaaaggttgtgttggatattagttttttgttgttgttgttgagttgtgaagaacttagttataaataaaagttgaccttagattagatgaagaacctttatatttacttgttcttttgatgc

SEQ ID NO: 8853 - DNA, 1211 bp, Homo sapiens
tcttcctgttttttccactgcaggaaaggggctcatgccaaccccagtgacgcggaggcccagcttcgaaggaaccggcgattcgtttgcgtcctaccaccagctgagcggtaccccctacgagggcccaagcttcggcgctgacggccccacggcgctggaggagatgccgcggccgtacgtggactaccttttccccggagtcggcccccacgggcccggccaccagcaccagcacccacccaagggctacggtgccagcgtagaggcagcaggggcacacttcccgctgcagggcgcgcactacgggcggccgcacctgctggtgcctggggaacccctgggctacggagtgcagcgcagcccctccttccagagcaagacgccgccggagaccgggggttacgccagcctgcccacgaagggccagggaggaccgccaggcgccggcctcgctttcccaccccctgccgccgggctctacgtgccgcacccacaccacaagcaggccggtcccgcggcccaccagctgcatgtgctgggctcccgcagccaggtgttcgccagcgacagccccccgcagagcctgctcactccctcgcggaacagcctcaacgtggacctgtatgaattgggcagcacctccgtccagcagtggccggctgccaccctggcccgccgggactccctgcagaagccgggcctggaggcgccgccgcgcgcgcacgtggccttccggcctgactgcccagtgcccagcaggaccaactccttcaacagccaccagccgcggcccggtccgcctggcaaggccgagccctccctgcccgcccccaacaccgtgacggctgtcacggccgcgcacatcttgcacccggtgaagagcgtgcgtgtgctgaggccggagccgcagacggctgtggggccctcgcaccccgcctgggtgcccgcgcctgccccggcccccgcccccgcccccgccccggctgcggagggcttggacgccaaggaggagcatgccctggcgctgggcggcgcaggcgccttcccgctggacgtggagtacggaggcccagaccggaggtgcccgcctccgccctacccgaagcacctgctgctgcgcagcaagtcggagcagtacgacctggacagcctgtgcgcaggcatggagcagagcctccgtgcgggccccaacgagcccgagggcggcg

SEQ ID NO: 8854 - DNA, 1347 bp, Homo sapiens
tcacacattggaagcttatggtgtagacagtttaaaaacaagataccctgatttgcttccctttcctcagatcccaaatgacaggttcacttctgaggttgctatgagggtgatggaatgtactgcctgtatcataataaaacttgaaaattttatgcaacaaaaagtgtgaagatatttaacgaaaaaaaaggtagatcttgaatgtgttgtagcacgaataaattgctgtacttcattaagcttcattgccaattagctaggaattgttaagcacattgcagattgttcttggagaattctggagttgttatgaacatgaataccaacggaaaaccttaactgaatctaaaagaaaactattttgaagatggtggtgagctgcaaaatagctggatggatttgaatgattgggatgatacatcattgaactgcactttatataaccaaagcttagcagtttgttagataagagtctatgtatgtctctggttaggatgaagttaattttatgtttttaacatggtatttttgaaggagctaatgaaacactggacatataattggtttaaacataaggggaattaagtctttgtagtctgtcatttttttaagtggatcctcttggatgcgttattttctcatcagctggctctgatcatgaatttgttgtaattttatgttgtactcagtgcatttaagaaatggtagagtattttaatcctattacttgactaagagtgtgaaggtagtactttttagagtgcactgagtgcactttacatctttatttaaatttttttttaacatcttatgtttacaggcttcctgtttgatgaagatagcaacggaaaactcaaaatggtggcagttcttattaccagttgttagtattgtttctggaaactgcttgccaagacaacatttattaactgttagaacacttgctttatgtttgtgtgtacatattttccacaaatgttataatttatatagtgtggttgaacaggatgcaatcttttgttgtctaaaggtgctgcagttaaaaaaaaaacaaccttttctttcaatatggcatgtagtggagtttttttaactttaaaaacatcaaaaattgttaaaatcattgtgttatctagtagtttataattatcggcttatatttccccatgaatgatcagaactgacatttaattcatgtttgtctcgccatgcttctttactttaacatatttcttttgcagaatgtaaaaggtaatgataattagtttatataagtgtactggctgtaaatgatgctaaatatactttatgcaattaagggcttacagaacatgttgaaacttt

SEQ ID NO: 8855 - DNA, 1100 bp, Homo sapiens
ctctgcagttataattacttggatcaatatgtctacttctaataaaactagaccattttttgacaatttactacaggatgaattacaacaccttaaaaatgcagattataatatcaccacacgcaaaacagtagcagagaatgtctataggctgaaacatctccttttagaaattggtttcaacttggtttataactgtgatgaaactgctaatctttaccactgtcttatagatgcagatattcctgttagttatgtgacccctgctgatatcagatcttttttaatgacattttcctctcctgacactaattgccatattgggaagctgccttgtcgtctgcagcagactaatctaaaactttttcatagtttaaaacttttagttgattattgttttaaagatgcagaagaaaatgagattgaagttgagggattgccccttctcatcacactggacagtgttttgcaaacttttgatgcaaaacgacccaagtttctaacaacatatcatgaattgattccatcccgcaaagacttgtttatgaatacattatatttgaaatatagtaatattttattgaactgtaaagttgcaaaagtgtttgacatttccagctttgctgatttgttatcctctgtgttgcctcgagaatataagaccaaaagttgcacaaagtggaaagacaattttgcaagtgagtcttggcttaagaatgcatggcattttattagtgaatctgtaagtgtgaaagaagatcaggaagaaacaaaaccaacatttgacattgttgttgatactctaaaagactgggcattgcttccaggaacaaagtttactgtttcagccaaccagcttgtggttcctgaaggagatgttctgcttcctctcagccttatgcacattgcagtttttccaaatgcccagagtgataaagtttttcatgctctaatgaaagctggctgtattcagcttgctttgaacaaaatctgttccaaagacagtgcatttgttcctttgttgtcatgtcacacagcaaatatagagagccccacaagcatcttgaaggctctacattatatggtccaaacttcaacat

SEQ ID NO: 8856 - DNA, 1101 bp, Homo sapiens
cacagtatagaagaaagaagctttaaatgtttgaataaggttgaaagcccacaaaagaattgttgttaatacattatgattgctatgggttacggtatcatcttttaagtactctgcagttattgggtgactacgaattgttatgaaaatatttattttatcctgagattacatgggtagctggatatttggatactattgaatgagtttcttgtccatatgctattattatatccatgtatactactagtaaaagttatgcataataattctttaccattgaaatttagcagatttaacttgtaagacattatttctaaagcttcctttctgttgctgttttaggaagcttaaagaacctgcttctttctgcagtagaagcgtgtgctggaacccaaagagtactcctttgttaggcttatggactgagcagtctggaccttgcatggcttctggggcaaaaataaatctgaaccaaactgacggcatttgaagcctttcagccagttgcttctgagccagaccagctgtaagctgaaacctcaatgaataacaagaaaagactccaggccgactcatgatactctgcatctttcctacatgagaagcttctctgccacaaaagtgacttcaaagacggatgggttgagctggcagcctatgagattgtggacatataacaagaaacagaaatgccctcatgcttattttcatggtgattgtggttttacaagactgaagacccagagtatactttttctttccagaaataatttcataccgcctatgaaatatcagataaattaccttagcttttatgtagaatgggttcaaaagtgagtgtttctatttgagaaggacactttttcatcatctaaactgattcgcataggtggttagaatggccctcatattgcctgcctaaatcttgggtttattagatgaagtttactgaatcagaggaatcagacagaggaggatagctctttccagaatccacacttctgacctcagcctcggtctcatgaacacccgctgatctcaggagaacacctgggctagggaatgtggtcgagaaagggcagcccattgcccagaatt

SEQ ID NO: 8857 - DNA, 1186 bp, Homo sapiens
ctgtgcaggctcggacctgaaagacgccaagatggtgacctcccttgcgtgtggaaatggagtctgtggctgcagccctggtggcgacacggacacccaggaagccaaactcagcccagccaagcttgtgcgcctcttttccaccagtcggaagaggacgggtgcccaccccgagcggccccactccatggtcctggtggggaactcctccacatggaacaccctcgcctccttccggaaaatgggatcctttaagaaactgaagtcctcagtcctgaaaggaattcagagccgagaggggtcaaatgcctgttcaaagggagaggcttcggagcatggcctgggaaagtccatcccaaatggcgctgtcccaggagcccaggcaagcaggggctcccccttagcaccgggaccagcatgtggtgccctcaggccagcagagtggggcacattggatggctccgacctcgaggacacggacgatgccttccagcggagcacacaccgctcccgcagcctccgcagagcctacggcctgggccgcatctgcctgctggatgcgccccagaaccatgcgacacccacgatagccactggccaggtgcccgccgtgtgtgagattctcgtgagggaccctgaaaacaacagcatgggctacaggaggagcaagagcacggacaatcttgcctttctgaagaagagctcctttaagcggaagtccacctccaatcttgcagacctcaggacggcccatgacgcacgggtaccacagaggaccctgagcagttcctccactgactcccaaaagcttgggtcaggaaggaccaaacgctggaggagcccgataagggccaaggactttgacagagtcttcaaacttgtgagcaatgtgactgaggctgcctggaggagggagagtcctaggagtggggccccatcccctggagaggccagcctgagacttcaggcacacagccggctgcatgacgactactcccgccgcgtctccaggagcactgagcaggacagcaggcggggcggggcggtcatgcatgggaccactgcaacctgcaccgtggcccccggtttcggctcagccacctctaaggggccccacctagacgctgacactgccgtatttcctcttgaaaccaaaagttcctgggcggtggaaagcgacagttcc

SEQ ID NO: 8858 - DNA, 1218 bp, Homo sapiens
taagtcaggttcaattcgttgcccctgtcagttttatagagtgtgagggtcactccattaaagatctctcctgggtggatcctacttggatgttcaggtgattttgaaaactgctaacatttttaaaaggctagaacatcctttgacttcttgaaaatctgcatgtctggcttgggttttattaccacatgcctgagttcttcaagaatggaaggctcaagtattctcatcttccatttgccaaacttccttcctgatttgagtcacgtgttccacttggaaagaaagggaacagagagcctcctccatggacagtgtatgaatttcattgggaatcttgctctctcccgcctctatgcctttctctctttttaaccttactttacataatattatagatgggccaagaaaagaaaagatgacataacattttgatgaatttcacctattccattcttcacgtttcagaattggtcgactttgttagaagataattgaagtagccttgggtcaaaagcaaccttttcaattgtgatcatacctaaaacatataaaaaccctgccgtagattaaaagcaattataaaatcataaaattgaatgtttgcagaatcctggagcagtagatttctttgtctttggcctgcggactagaaagagggcagcagtagtatgctggagcttccctgggataccagccacatggtttcttttcattagatctgatttttgtttcccactgtagatctgattttgtagttgaaaacatttcaccaccatcaaacactatttctgaatattgtgcctttttatacctagcctagatgaaaaccgatgccattcttattcagaaaatccccccatcctacatgactgttatctagacataaagcaaagtgcatttaattcaaaatttggttcacaatataagtattttgtaaaagccagctgaaccagcattttatcaggtggaaatctctgcaagccaaattgctgatactccttcatgcagatcaacttggtgtcccagtcagaatagaacagcataattacctggagttagggggagtatttctgcactattacttgtcagggagagaagaaacttagaattgtccctcaaaggagtgtcaagaagtatgaataaatgtcctttcaccagctcacaggccagaaatggaggacccaagtcaactaggtgaaactactagcagaccca

SEQ ID NO: 8859 - DNA, 1113 bp, Homo sapiens
gactgtactagattataaaagtgttatggagataacaatcagaagcagtatataatcttggtttgtaatgggtttggatcagttaaggaaaactaaatgtgagctagaaatactagtaggaacagttactgaaatagaacaagtgagaaatgatagaaaaatgtaagtgattgtatgtgtggtaaagtctagttttggtaaaaacatatacagtgagtgtgtgtatgtatggaaaaatatcttgaagaatatatacactaagttgtctagcagaatgtgactttatttttatgtctatactaattttctatactggttctgcaataaaattttgtaaaataaattacgtaacacaattgatagatttacattcaattcaagttttaatgtttcataatttcaatgacagtgcttgtaattcattcaacacttacattttaagtttctgtgaaatgacagtgctttatccctttatttactagatagagggcctggatattttatttctattaaagacaatcgaggaattctataaaagtgaagatggagaaaatctggaaatcctctgtccagttcaagatcaagcctgtgtagctaaatttgaagatggaatttggtaccgagcaaaagttatcggtaggagaatgcatgctgtttctacagggagatgtcatacttcaaaactaatatcatttgagttggtaccaattcaatcttggaagtaatgttatttgatcttatcatttgctctgccatctgtctttagaaaagctagtgataatgttgaaaggtgaatctatcttctgatattttgtttgacttgactagaacttaaccattgggaatcttgctggaaaagttgtatagatagaacaaagcaacagaaattaattattcaaaaaccggtgaactctagtttgatgttgactgtttgtctgtcccatgctattttgattgtcaaggtacaaattaaaggtgagtcctttgtgtcctctctgcttcccttcaattttaatatattcttctttcctgggaattattgactgaactgctagttttctcgatatattttttctactttttctacatcctccttaagtaattgattcaact

SEQ ID NO: 8860 - DNA, 1764 bp, Homo sapiens
aaagtaatgaccgatgaaagtggaaaatccaaaggatttggatttgtaagctttgaaaggcatgaagatgcacagaaagctgtagatgagatgaatggaaaggagctcaatggaaaacaaatttacgttggtcgagctcagaaaaaagtggaacggcagacggaacttaagcgcacatttgaacagatgaagcaagataggatcaccagataccaggttgttaatctttatgtgaaaaatcttgatgatggtattgatgatgaacgtctccggaaagcgttttctccatttggtacaatcactagtgcaaaggttatgatggaaggtggtcgcagcaaagggtttggttttgtatgtttctcctccccagaagaagccactaaagcagttacagaaatgaacggtagaattgtggccacaaagccattgtatgtagctttagctcagcgcaaagaagagcgccaggcttacctcactaacgagtatatgcagagaatggcaagtgtacgagctgtgcccaaccagcgagcacctccttcaggttacttcatgacagctgtcccacagactcagaaccatgctgcatactatcctcctagccaaattgctcgactaagaccaagtcctcgctggactgctcagggtgccagacctcatccattccaaaataagcccagtgctatccgcccaggtgctcctagagtaccatttagtactatgagaccagcttcttcacaggttccacgagtcatgtcaacgcagcgtgttgctaacacatcaacacagacagtgggtccacgtcctgcagctgctgctgctgctgcagctacccctgctgtgcgcacggttccacggtataaatatgctgcgggagttcgcaatcctcagcaacatcgtaatgcacagccacaagttacaatgcaacagcttgctgttcatgtacaaggtcaggaaactttgactgcctccaggttggcatctgcccctcctcaaaagcaaaagcaaatgttaggtgaacggctctttcctcttattcaagccatgcaccctactcttgctgggaaaatcactggcatgttgttggagattgataattcagaacttctttatatgctcgagtctccagagtcactccgttctaaggttgatgaagctgtagctgtactacaagcccaccaagctaaagaggctacccagaaagcagttaacagtgctaccggtgttccaactgtttaaaattgatcagagaccacgaaaagaaatttgtgcttcaccgaagaaaaatatctaaacatcgagaaactatgggaaaaaaaattgcaaaatctaaaataaaaaatgcaaaatctaaaataaaaaatggaaaggaaactttgaaccttatgtaccgagcaaatgcaaggtctagcaaatataatgctagtcctagattacttattgatttaaaaacaaaaaaaagattacttaattttgatttaaaaacaaaaaatcgtaaaatacaaaaaccagttaatgttttgtagaccctgggaaaagaattttcagcaaagtacaaaaatttaaagcattcctttaattttttaattctttactgtggaatagctcaaaatgtccattctgttttaagtaacagaattgataactgagcaaggaaacatggtttggattataaaattcttgctttaataaaaatttcttaaacagtgaaaaaaagaaaaatcatcaattttactaatagtctttctttacattttctattattct

SEQ ID NO: 8861 - DNA, 2269 bp, Homo sapiens
agactcatagagttttttctgcaatgattgcagtacaagaaaaggattattgtgaggatggtctgtaagcataaccaaaaggaatttgtctaataacaattttagggtttaacagtaggctaatagttgaaggaaggataataactacccttgtgagagaaataagtcattttaattgcatttccagcaaggaatgacattcagttctgtaagaaatgagtggtatttgatgtatttactcaaaacacaatttgcactgtacactagtgaattgacgtttatgatttatgttaattcagccaaacataaataaccttccttaagtacaatttaacttcaagaaaacaaaatttgacaacatagtttcttaataaatgatatggcatgtactttcaattatgtagctttgtaactatgaatatttacatattttgccttttagtgatatttaatgttaaagtgccatgaaaaatatttctaagaaagccttaaattcccagtggattctttacccttaagttttacagcctacaacaagattttttgttttgtttttcttctggtcagccttgttttgtttgtaaagaattgtgctctcattactgctgggggtgcatgctacaatacttctatataaacacttgtagaagtacactgttcacgtttagcctgccccacttttgtattcaaaattaatgaaactgaaggtttattctgatcataatttgtttagtgctacatttgataatttattatttacagcttagaatattgatttcttgaatacgtataagcacatttgactgtcttttatatatggattactgcattccattgattcttattttgtggttggctttatttctttcacaactgtgtaagtttaaagagctaaagctctaaaactgttctgagaaacaatgaatagtacatgtatatgtatatttttaaactgccttattgctcaatgagttgctgttcctggagtatctaactttcagtttactcaaaaacttttgggtaaataaaaaagggaagtacagatagtttaggttgtgcatggttgcatgaattttgaagtcatttctatgtggagcattatttttcttcttgttaaatatagaaaaaaaaagagattctagtacaaagttactgtttaacaaaagcaacataaactctgggaaagatttcattttgccatgttatatttactgtttattctgtgtactagtacatatctttaaattaccaaaaaacaagaaacaaaacataaaaaccccaaaactatcacttggaattagcaatatcacccaactggctttaaaattgaaaatttaaataacatggtggcatgaagtacaattcgagtattaggcaatttgcatagtgttcctcatgctactttctgttacacctctattatattagttttgaatataaacatctttttcagaccaaaaaaaactttattgtatgagagcttatcttatcctgtttatttttccaatgcttttctgtaatacattatgtaatttaaaaaatattcctttttaaacagcaacagaaatgcactataaaatatagtatgtgattaaccaatcctgcttccatatttaagcactgggaatggaaacttaatctctgtgactacaaagggaagtttttgtgccttggtgttccagtcactgattgtggttttagaatcttctgtggctgacttcttgtattcaactctggtttattatcttaatcttcaacttcagacatatatttgtgtgtttatatgctcacaggtggactgagaaatcagttacatcttaagtgacctacagggtatatgttggcaaaagcagactgtgtatatgtcttataaagttgaatttatgttcagtgtgtttggaagtgtatagcatgtaaattacttcatatatgatttaaaggtaattaaatgttcacattttactttgaatgtttttcttctggataaaacaaatggaatcaagttgtagttgttttttttttcttctcacctaggcaagtagacttgcccattacattaacataacagcataaggtttgaggagtttattttccaaaagtttgttgataaataatacctgtttcatacaaaaataatttccagaatatttaaaataggtatagtgggctaaaaggcccatcagatgtaggtaataatgtcattaagttttcattttgttcctgtcacttgcttatattacaatcactatttttttgtgcccttgccaac

SEQ ID NO: 8862 - DNA, 1369 bp, Homo sapiens
agcttcttactgttccaatgcagaacatttatgtgcgtttttataagtcttccatttgtgtgagcactgaagaaatttctatgagtagctgttccaatacaatctaaaattgtgatggacacgattataaacatacctgataaaaaaggcagggtagtcttagcaataattatacatcaattagatattgaatattgtgaatctacttaatgttatttgctgtaatgctataaatgccctttagaacatggtgtttcactagtgaattacatttaagaataacattagattctgaaatcatgactgtaccatttattgttttaaagtcagagatcatccatccattctttgaatttttcatatatgatactgataggtggtgcattctcattttcctcatacatagtgattacaaagtacccacattcaggatgaagtatgcttttattgactgaaggtatgttgaagatcaataggcttgtttgtatgtatgttgactgtaaacagaatacaagccctctaaaccaaattttgaagatgatacatgctagaattgtacctttccaaggtgaacagaacagcaagagcaggaaaaagatgttttgagatgtggattgcacattaaggagcaactgggaagttgaacagatgaaaataattggtgacatggaaagcagattgttttatttcttggtttagttacacttctaattagagaaacattttttgtggtcattctacagtgttttatttggtcctgtgtctttcggaggttaatagttatcttaatcctgccatcccttttgtcaggtttgaagcttgacatggaaaaatagtcttaatcgatattgatttttttattttaatcattcataaatttcttagtaatgcttactattcaatagcatgtgtctttctgagagttccatatagtccagtagtacattataatacacacaaaaaaattaatacatatttagattgcattcaagctacctatactagggaagcattctctggttttcactattggcagtttaaaaaattgttcttcacatttggagatgacagaattgacttgccataagtaaagggttgatgatagatttatgccaaatcctccatatcccgtggctggacccatgtgaatagtggctcgcacgagcactgtctggtagctctctagctggctggagtgtaggattgcattgttaagttatggagggaaaaagtcattatgggattgattcctttgaggattgatatttcttcttaaaaggattcaatcccataattatgaccatcagctctcatgattacctaaccagttaatcaaaccaaccatagtactagtttactttttagagcc

SEQ ID NO: 8863 - DNA, 1123 bp, Homo sapiens
tggatgtaaaattttaaattatttttttaatagtagtataagaattctggctgctattagttattgtttgttttctgggttagaagctattcgaaaagtccagtttctgtcccagtgtagcaaaatgtagttcctcggttgtttttctttaaatgctttataattttacactacctttttaatatacaaacctcattcttcattggataacttgaaggctttgatttctttaaaaatttaaattttagtgtgtatattactttgacagttccctcatctttgagatgcactgatcactgtgcttgaaaaagacaatactgaagattgtactatgaagtttattgaataattttcataaattatttatccaaatgagagatttttagatttttgtattctgcttagttttaaaaaaaaaaaatagtagtttaaaagagaggctagtaagtttgatgctattcttgccaaacaaactcagccaaaatctttaaagtaacaagagggaaaaggatgactaatcgttctgcttctgagtacattttccaaaacgttggaaagaaacttctgaattgaaatcttgaatgtattgaatctgtcaaggtacacagcggtgcctttgtaaatgttcattactttatttaatcaggtgataagtggtgtaatgtagcagagcttaagaatagaactcaattatcactttttgtgaacaagttggaattgtcatgttactgtgtaattgatttgctttacaatgaacaataaatttaataaaataaaacattgtcttgttttttatctacttattgtatatatcatttatatttcatatgagaaatcatgcctagttttttgggtacttactcttatgaaataacatgatagttttgccatgttagtgtcagtctctcttgatcaattgagacttgactctaacactaaggagctcgattaaaaaaagtaaaaaccatttactgattataccaactagttttatcagaaaacaagtgaggagatctaaaataattctagaagtaaatctaaaggaatgataatttatgatacattaaagatttcaaattatttagtagattaaactaacgtctttcattgcggtaagcctctt

SEQ ID NO: 8864 - DNA, 1552 bp, Homo sapiens
gtttgagaccagcctgacatggtgaaaccccatctctacgaaaaatacaaaaattagctgggcatagtggcgggtacctataatcccagctactcgggaggctgaggcacgagaatcacttgaagccgggaggtgggggttgcagtgagccgagatcacaccactgcactccagcctgggcaacaagagcaaaactccgtctcaaaaaagatgaaaataaaataaaatatatatttacaggcctacaacttttgcctcagactgttccccttttctaagggtattcaagttttcaccttttaagcttcatatcctcagtgcttgtagaatgatgagcttagaggtaccaggtcattgcagttgtttgcttaaagacttattgaaatggttactggcgtaaatacttggccaactcaactttattgcccctgatcttttccatttttgtttccaccttaacctatagcagctcctccaaatgaggaatgctgtaagtaagactcatcaaacagattttaaccattttattatcctgtgtgtccttacattgcttctgtgagatgtttttttcttatctgagatgaactttcaggagcctatttgaactccagactggtgttctggggcaaagagctattagccaaactgattctatgcaggtgaaggatgcactaaagttctcactttagtgagaacttttctagctattccaatacagagttctttcttatagggctattgatattgacaccaaatggagtggcttctcagcctcttaatgtcttaagtaagtgcttaatttggaatagagaaaccagtatattttaaaaaagaaaaatattctttgtagcaactgtaaattctcccattataacagtgaacagagctccaggtaataacgcataggcatgtcaggttgcatctgtatatttgactacattagtattagtgacatcaggtggatataaaagaaaacccttggaaagagaactgccttagccatgatttcgttagtagacctatttatgattcaattgcaattttcagataggatgtgaacatggaatttcattgaaaatagtttaattttttatataaaaggttttgtatataatgtgtgtcagtgactattttcaaaatcattttcatcaagacaccttttttctaaaataggcattgcatacacatatgcacacgtatgtgcatgtgccacacattttttgtataatgttgggtttgattataaaagtgttgtcaaatgttttatttatctgcatatagcagtggttggcttttttgaattgaaatttttgcgcattgatgcattgaaataaggaaaattatttatctctgagcactaaacttatttttgcatatttctgtaatattgcagtccccagatccagaacatgggaagttagggaaaatgtgtgattttgtgttttgaattactgtcagaattacatacacaattacaacaaactttttttaaaagacatttcattgtactgcaaaaatctgaatatttatatttcttgtttttttctttata

SEQ ID NO: 8865 - DNA, 1571 bp, Homo sapiens
cctttcttccttgaaacataatgacacttcagtcacatattgggattgagcttcccctagaagcacctgaatcacacttttccctcatctcctttccagcgttccaatccacatgctgcctatcccaaccctggaccaagcacatcacagccgcagagcagcatgggatactcagctacctcccagcagcctccacagtactcacatcagacacatcggtactgagctgcatcggaatcttgtccatgcactgttgcgaatgctgcagggctgactgtgcagctctctgcgggaacctggtatgggccatgagaatgtactgtacaaccacatcttcaaaatgtccagtagccaagttccaccacttttcacagattggggtagtggcttccaagttgtacctattttggagttagacttgaaaagaaagtgctagcacagtttgtgttgtggatttgctacttccatagtttacttgacatggttcagactgaccaatgcatttttttcagtgacagtctgtagcagttgaagctgtgaatgtgctaggggcaagcatttgtctttgtatgtggtgaattttttcagtgtaacaacattatctgaccaatagtacacacacagacacaaagtttaactggtacttgaaacatacagtatatgttaacgaaataaccaagactcgaaatgagattattttggtacacctttctttttagtgtcttatcagtgggctgattcattttctacattaatcagtgttttctgaccaagaatattgcttggatttttttgaaagtacaaaaagccacatagtttttccagaaaggtttcaaaactcccaaagattaacttccaacttataagtttgtttttattttcaatctatgacttgactggtattaaagctgctatttgatagtaattaaatatgttgtcattgatataaacctgtttggttcagcaaacaaactaaaatgattgtcatagacagtgttttatttttcctgttggtgttgctgatttgtgagcatgctttaagatgaaaaaagcatgaatgataacttccttaaaaaggtgcggcatccaattcaaatattttcgtcctgattttaaagctggttggtgtagtgctattaaaatttcgttcagttaattttccttttgaaaacttgttcgcacgttgtttagggtgcccttacttcagcaaaggagaaggagtaggagagccttagaatttttgaggaaaaaaaaacctataacatacaatgtactgtatcaaactattttacatgaatgacacaagtattctgaataaaaaataattgaacattgttaaaaacaaggtgttatgtaataaatttatttttcataaatcaaaacatggagtcagctgtcttttttatatgtacaaagggtttttgttttaattttaaaatatgccttaataagtagcctctgaagaaatctcttcacttttcatgaagaatatctatgtgtctgtctccataatagagtactgacttgagtcttagatatggatccttttttcctgctatactcggtaccat

SEQ ID NO: 8866 - DNA, 1105 bp, Homo sapiens
agcaggtaagtttttatcttgcttaattttgtgttaaactatttacaggattcacttattccgtaatcttttagaaattgggaacagaatgttttgaattattttctttgaaagataattgtacgttaagaagtcagtcaaaattgtgtggtggcgggaaataatttctctttatggtgtttccaggttgttcacccatgtaatatagatctgaaagaccttgtttaggtttaaaacaagttacaagcatattcaagtgaaagtttttttactttaatgaaaacgatggtaagcaactcttaacagttgtagcagggtaactttttgttgattctgttttgttggttctgttgggtaagaggagtgcactgctttagagtttctgtaacattagggtaatcgaaatgcgaatgtgtcttgtctgttcatcaggcatgggccttgtgcattataactgcatttaaccagctgttttcctttcccttctgtcttggcatgctctctttcctttcctggacatcaggagcaaaagcgtatagatggcaccacccgtgaggtgaaaaaggttagaaaagccagaaacaggcgccaggagtggaatatgatggcatatgacaaagagcttagacccgacaacaggttgtctcagagtgtgtaccatggagcgtcttccgagggatccctgtccccagatactaggtgtgtgtgtgtcactgctccctcagccctgatgcttgggcaactgggtactacctggttttattatcatttgaaatgcatcaatagcttcggggtttatatggcccttgatgtcttaagattttccttaaaaattgtttatctgtattttgattttgaaataatacttgaagacagtgttattttacattgggttcctttgattttagaaaatctctctgacttaaaatgtattgttgagttcatctagatgtagtgttttaacactgattctgaatttggggtaactgcttatgacttaagtttttactttaataatcatttaattctttctcttagcatggaatgttgaatttcctttgccacttggtatctaaaaatgattggcaggtggtaaagtaactaa

SEQ ID NO: 8867 - DNA, 2361 bp, Homo sapiens
tcaccgctttggtttttccttttgtttttttaaaggatgtgtttctgaataagttggttttagagggaaaggttcaacaaacagggagaatccagtgtttctgctttcagtttcttggcttggtagcctctgagtgaatctgatgctctgctgaataatttcattacctctgcacatgcctgtcaaatatgaaattggaagggcccttttcaggctgggttccctgtgggcatttgcttagtaaatgcctgttgatggtttttgcaagagaattcagcagctcaacagtaatgaaagtgaagaacagagtccattttccttcctggggccattggggatgacactcaagatacttgccagtctctccagtgtgggcaccagccggccagaacagatgcgagcagtccatgactctgggagctacaccgctgagctgggcagagctgcggcacagggcctgggctgcaaaggagccctgctcctttagtttcctgacacctgtgtcctgagtgagccgcaggagttcttagctcctcagcgagcaacagagagcactttagatggcacctttcaccacttggtcagaattttaaaagcttaggtttaggtgaaagtagatattgacagctattcacctttcacggtgctggggccagattagggatcactcccgtgaggagggccttcaccctgttctagaagcacatggttgtcctcctgttgttggcacattaaatgataaaaagcacctcatgagattcccttgatcagccctgcagctgtagtacagtgctgtgccctcacctccacccttcctgttgttcccacgtgggcaataccagggacccatggggaaactcaagaatgacagcttctatattttgtaattctggatgaaagataactgtgttgaacaaacaggtgctccaggctttgattatagatacgacttcaaaaatatgctaagacgcttgacttattaaggactttaacctactcaacagtatttcatatccattgtggttagttactcagttatgttgagaagaatctggagctaaaagcagagatgtttgaggtgacggtaggaatgtgagcaggatggtgatgggggtttttgttaaaatgcatctgagcaagtcagccagccccgaagtcccctcagtgtgtgtgtctcgagtggctacctgttgggcttgtgggcagtgattgtacagagcctgtccattgggtgcagtcatgtagatctgaagccctgaaaagcctcatgtctgcatcccctttccaaggctgcttccctggtgtgtctgttctctcctctgtcccaggtgctgggagcgtcctcttcagcgtcttttcctagagctggtcaccactaggctgtcactataaattccttgaatataagtaacagttattaatgaacttctaaatttctaatttctctctctctctcttttttttttttttgttgttgttaaaaagggcctactacattggcgctattcttaggacttctgcaacttttaaagtcttacttgtctttcttgttgcttttgtattaggagttccccgtgtgggtctagaactcccctttggtaatgcttctttgtttttttatggcccttctgttctcaggatggagagaacacagaagctactatccatgtcaggatttattctatttatatcttattacaataaaattagtggcactttattcataaatattcatgagcctgttaattgttagttgtcttcctgtagctgaatcaacaagttattttcaactcaattttatgacttgcgaaaaagcttttgccctgttgtgtaccataacatttaaaagaatggaaaatgactgaaatccaatttagattatttttagagtatttttccagcaaattcaatttattctgaaatttaaatccagatcttttctaatatggtattacaatgaaaagaataaagagaagatttgaattttcagtttcattttcaaaaactatttaccaaaacaaatggagaagaaacatccaaaagcacatttcatttctccaaactttgtgttttaaattatagttataaattgtaaggtaattttaaattgtccctcgtattatttctccacgtctgttttagtttaatgtctcctaagcttttctctcatagcgtagacctagggaagggatgggaagattgcccagtccccgatggctgcgcacacaggaggcggcggagcacaaggcaagtgagtttgcactgtcagccccagaccgtaagcttggctacactgatgtttttctttactaaggatactattcaaaaattaacattttcatctcagtaagtttttagaac

SEQ ID NO: 8868 - DNA, 1932 bp, Homo sapiens
aaatatttgtccttttattatggtttctaaatcagttattttcttcagctttaatttcataaaattaaaaaactattttaaaaattcctgtagttgttggaataattaaaaattctggtgcagtggtggtataccaatctttagaattcttaagtattctaatgtttcaagttgagatcatgcttgggaaaatcatgtcatagcatttatgttattttcagatgccattttttaccctggaaagaagtcataatgttcatcataaccctagcagcctggatagtgagctaaacaaacccttcaaagattaaattttaatcaagtagaccgggaatacaaaagacaagtccttccttcccttccccccacctttacaaatcttactggaagggtgttcagaaattaaaatctgtgtttgctaagacttcattctgttgggggttttaagaagtaatatatgtaacataaaatatatgtaaacgattgcagtttttttggacgtttttccatgcatcagtaagttgtctgacagtagccaaatgtaacttgcagaaaattattgaaaattatattcagaataatagcaatcaggccttggatgttctttattaaactcttttcaggcagtaaatttaaaaaaaattgtcattttctaaagtccttttgctaaaactgttgactatggaaaacaacaaaaaggaattttttagtctgctgctattattaacatttattatctgtatcttttggctcaggaaatgacttcacctattttttccataagcagacctttaacagagtcacttaattgggctgcttaaacagatgttctgggagaaaattataatatttagtatttgtacaaaatatcaaaaagtattttgacaagtttctttttaagatagttcctaaagccttaccctggctagaggtgttttgtacaaattatatataagccagcctgatctaccaacatgccacagagaatcacaatcaacagtgtggggaaagtcagggcagtggaagtggatgcactctttttattttgaaggcttaaaccaaattgtcttggaattaaagctgtatttctgcagctttcggtacagagaaaaagaggaaagtgaagctgtgtcagttttaacattagctatatcaacatgtttaagaaagatagatgaagtcatttgcataaaggtacagcattgaaatactatgttgtgtttgtttttacatttttgcattaaaaaaaaacatgccgtaaaagccaagttaaatttcatattaaagcaagttctagtgtatgtgttgagttcctggtaatcacatacttgttcacatctacaccgtacttcatagtatgatttgtcaggggagggattgtggggtgacagttttacatttactttttcttcttaatgcagctggatctaagtaaaatgttttgaagtttatcagaaactaaatgtacttttaaaacgtatagggtcagggttgggggaaaaatacaggtatagtaagtaagaaaagtgacccatgaagaaagcatcgtgaggttgtatgttggttgactgtgattaaaatgcggggctggtgtaagttgtaagtggtggctgattgccgtgtaactatgtacatgattgttgggatggctgtcccatattttgtatattggaataaaaatttctataaattattgtaactaaaagtaaatattctaaattaagtcccacttcttaagtcacatggcttctgtcttggaaattttacctttaaaagattatttaagacaggaaccaggaggcttgggaacagggaaagagggaaatgttgtattatgtgggtcttggggcctctaaccatcagtatagggttttttctttccttgatggcagtagaaagacctcattttcataacataactactcttgatac

SEQ ID NO: 8869 - DNA, 1948 bp, Homo sapiens
ttggagttaacagctagtggaaattgggtggtagggtgggaaattatgagtttatcaagttggaaaggaacgccttagtgcaaagtttaattattgatgaagattactattactatgattaaaaaccctcctagtgaaagctgtgttcttctgtgacctggatttaaatgtatcttggcactcgagcttaatgatgactgttttttttgattgcttgaagcaatgtgaaaaacacatttcaccggctctgaaagctcttgagttgccatttgaaagaaatcttagaatactttgcagttacttaaagtcagaattttaaaggaaggggaaatgctggtatataacattggtttctttaatagggaatgggtactgttcaaaaaggaatgccccacaagtgttaccatggcaaaactggaagagtctacaatgttacccagcatgctgttggcattgttgtaaacaaacaagttaagtaagtagtgttgtagttctttgtggctaaccagtattccctcatatacccccttttcactttgccagttggacttatgtctttattggtcattcaagtggggcaaaggaaatatccttttaaaactcaggcaaactgggtgtttgtctgtatcctgtcagaggaaacaaattgaaatagatttactggaaagtcttacacagttagttactaagcggtttgtttgttttgtttcgagacggagtcttgctctgtcgccctggctggagtgcagtggtgggatctctgctctctgcaagctccacctcctgggttcacgccattctcctgcctcagcctctggggtagctaggactacaggcgcccaccaccatgcccagctaaattttttgtattcttagtagagacagggtttcactgtgtcagccaggatggtctcaatctcctgacctcgtgatctgcctgcctcggcctcccaaagtgctgggattacaggcatgagccaccgcgcctggcccagcagtttttatagaataaaaagagaagtttagtaaacttttaaattttattagcagtctggttttagattactagagtttaagagaccatcatctcatcaaagagagttaaaagtagggatgttctctgcaaggcctcttctgatatgattaattgattgtaaattaagtaatcaaggcatactttgttgatttgtcatatctgggtaaaaggtttatggtttatttaataaatgaaactgcaaaatcagttttctacatttctgttatatttttgttaaagcacttaaaagaatttctgctctgtccaggggcaagattcttgccaagagaattaatgtgcgtattgagcacattaagcactctaagagccgagatagcttcctgaaacgtgtgaaggaaaatgatcagaaaaagaaagaagccaaagagaaaggtacctgggttcaactaaagcgccaggtaagaatttggtgtatatttcattggttctgagagcactttaaggttgagatttaacacatcacataattattttattccctttttttttcctttaatagcctgctccacccagagaagcacactttgtgagaaccaatgggaaggagcctgagctgctggaacctattccctatgaattcatggcataataggtgttaaaaaaaaaaataaaggacctctgggctacaaaaatgtttctcttcattgagtagaagtgtggtgtcctctcccccaaagaaatatttaaagcaaattttggttgtgtcctaattcattatgtaatgtccttgctattcaaatttaatgtatttcttgctgaaggacatgaggtagcttattgtgcaacaaattactcagaaaatggcgaggtattatatatgaaatacttgtactggtttgaagatagtccttctaaatcatcaaggaagaaataaaatattttttttttgag

SEQ ID NO: 8870 - DNA, 1948 bp, Homo sapiens; identical to SEQ ID NO: 8869

SEQ ID NO: 8871 - DNA, 1948 bp, Homo sapiens; identical to SEQ ID NO: 8869

SEQ ID NO: 8872 - DNA, 1948 bp, Homo sapiens; identical to SEQ ID NO: 8869

SEQ ID NO: 8873 - DNA, 1528 bp, Homo sapiens
ctgcactagttcccatgttgaaggagcagaggaacaaagtcactctgaccgttatttgttggcctggcagccttgtatagattttggaaattggtttcaaatcttgcatcttccttttttagatttttgaaagaaaaccctttggtttcattgtgtttgtggtttaggagctgctgacactgctggtatacacagggccaaaacccactaagattgtccgtttatgtttatttaaatggtttcctaagttagttacatttcttttagcttggaaacagtcttccactaacctttgtgagtttatattttcagaattcagacttagttgttaaaatgttacctatggtaatgagcaaagctcacccaaactgtgccccagatggagtaaagaccttctggtgggtctttgttttcagtaactgaatcatagaacgagttctgtatccctcaggcctgatgtcagcaaagccagtaacaacagcgtgtactgccactgtcataaccaataccatgaatgaatatactttaaattttggtgataactgttccccatttttttttgaaccacagtctcactctcacccaggctggagtgcagtggcacaatctcagctcactgcaagctccgcctcctgggttcacgccattctcccacctcagcctcccgagtagctgggactacaggcgtgtgccaccatgcccagctaattttttgtacttttagtagagacggggtttcaccgtgttagccaggatggtctcgatctcctgaccttgtgatctgcccgcctcagcctcccaaagtgctgggattacaggtgtgagctgccgcacccggccgttcccattttttattggtgccaacatttcaaaacttcatactgtttataaactgattttctggtttatttctactgtaatctctcaatattcatagaagatgaagaaataagtctgacaacactaaagaaatttcttaatatactattattagaatagtagaggataaaagataatgttatccagttacaaaggaatttggatgataattataacttaatgttagagatggtaaagctgcacttacttgaacagcccaaaagcattaaaaatctatttccagaggaatgttttgctatgtagggaaattttgaagtagtttttgctaaaaaattatttctagagttgtgttattcttagcagtaatcttggctagaaatgtttttgtgatttatgcgattaaacgaaatgataaagataaaaccatattattaaatacctatatatcacagctaagtaggagaaagggagacctttttattttgttcaggtaggagtatttcttgtgtattttagaaacaattatttttcccattatttcttatgagattagttgtttcaagtaggagacagaaaagttctgttttgttggaaatgtaggttttagatgtatctttcagtcagctctcagtcactagactatttcatattttttgaaatgtttttgaaaattatgactagcccattt

SEQ ID NO: 8874 - DNA, 1288 bp, Homo sapiens
aatggagcagggaaaaactggaggcaataaattaaatatttattgatagagtttgtggaggcaggaaaatgagaggcgaataattctgtgtagctggagtagattaataataatgtgttgcaatgtgatatagtaaatgagaaaaagctagttacaaaacaatattcagtatgatctcatttttataaaaaatatgtgtgtagaaaaatatctggattgaagacctcaatggctgaaggcgagaggaagacagccctggaaatggtccaggcagctggaacagatagacactgtgtgacatttgtattgcacgaggaagaccataccctaggaaattctctacgttacatgatcatgaagaacccggaagtggaattttgtggttacactacgacccatccttcagagagcaaaattaatttacgcattcagactcgaggtacccttccagctgttgagccatttcagagaggcctgaatgagctcatgaatgtctgccaacatgtgcttgacaagtttgaggccagcataaaggactataaggatcaaaaagcaagcagaaatgaatccacattctagtcctttatgcagtatacaaggagaactgtcctgtaggatattctcttcctgatggtgcagaacccagaattagaagtttgtggttacagcatactctgtccttcagaaaggcgtgattctagctgttgaccccttgcagctgttggaatctctgcaagaacctctgtattcttctaataaattccctcttttatttaaactagtttgactggtttctgttccatgcaaccaaatggtccttgaggatgactttttttctaattaagccagcattgaaaatgaggaaactgagaatatcagaggcctagacaagaactgtgatcatgggaattaaaagaagtatatatccatgtctgtagttggagtggtgggggtaagggaagagacaaaaaccatgaccccagttagattgttgtttaaaaacagaaggaaagaagattggggtggggacttggcttcttgctaaactttttggcttttaaagaattgcatcatttgctgtgattggtagacttggcaagggtgggaataatttggaagaagtgtgagaattctggttttacatgagagttttagggagtaaggctccatctttgaggcatttacaggaaagataccagtttactgcttgaattttgggatatacttagtcatgatctaagtaaggtaagatgttttgattatattacagaaggagaaaattgggatg

SEQ ID NO: 8875 - DNA, 2680 bp, Homo sapiens
agggttgcagaatttgctctttttgggatgggttgccctgaataacattacggaccaggtaaataatttcatagaagttcagtatagtacgtaattcttgtaagagtatcgtatgcaagctctctgtatgccacccactgttagttcaaattgagatttttgttttgttttgttcttaagaacataccaagaaaataccagtgaattgttggatatgaattccctgttagttgatttaaatcctttctgaataaagatcagataaacagtaactgaaggagcatgtatagctctttccttcaaattcaactagagcctttttaaaaagacatttgcctgctagtcagatacatttacatttatgcaaattttttaaataggagaaaattaagaaattgtgttaaaggcctaaagttcaggagtgtattactttaggttctttccagtttgctggtttttttttttttttttttttttttttttgggcgggggggaggtttatgaagttttgctctttgaaccacagctttattatggtcctttacactggagacagacacagagacactgttcagaagatgaactaaactcagcagtggtctggtatcaagagctttctgatgttttacagcctgaatttggagggataacgatctgctgtgcctttgcagtcactgcttagcccaaagtaatagtacttttgataataactcactctgtgcgatattcctgaataagtccatctcaaaagtttgggattttcctcctcttaactttcttaatatttggacatgcagttgtcgccaaacttgggtattcatggaatttctagtaaatgaaatacctatactttgatactgaagactgccaaatacataggaattttctttcttaaaaaacagtaatgaagactatatctcctttcccagcactgaatgttttactagcactgggtgctcaccatgcaactgaagaaaatgtggaaactcaaaaggtcaggacagacttccaagcacttgcaactgatgttactgtcttcaattttaataattacacatatttgtatatttcagagaagtttttaatatttctctgtccactttttataagctttaaaatgattttctctgccttgagatttgcatcaagaaaaagcacctctcttcacctgaaagctttgaagactagagacacgctttacacgttttaacaagtatattgagtccacgtttggtagcatcagttgttgagttaaaaagaaaattattgcatttgatctggatggattttaaaagaatataatgttcaatattaaaaggataattcacatttgccaccataatgttcttttttatgtaaaaagaagaacttggagacattaacatgaaaaagtcttttatcattagctcatgtatttgaggaagagcagctgtctttttatatgttttttgacaaatcatattgtattcttttgtacaaaaaagaactacttgtattctagaagaaatatgaaatgcttaatttataagcgggctggagattttttccaatattgttttctttgaaaatgaaaggggatcatctattttagttttggggtctgggaactttttgaaaatttaatttgtggaccaatgttttgtgaaagctaaagagggcaggggttaaaatagggcttgaatttctcattctgtatagaccagcaaacttccctgtgcaaggcaagtttacatcacaaatccaagaatgtttgcatcctaaatgctagtttgcttcagcccctagttaacctcaggacttggtttgcatataaaaggtagacagctgatatgttttcatgaataaatattgtcagccagaaaaggttggtgtcaggtaatgcatatttttttaagctttgttttatatttatttttcatttagtttttattgggaatggttttcaaagaactctcagttctgcctaggtgtttttgggggagccctgttttccatagtgtaattccatttaagaggttgtctaaaagtctttttaattaatagaaagattttaatatccaagagtagtcaaattaaggatataaactttccacaccttcctgtcgtgacagataaaagcacagaaaggacaacccttgaaatcatgtaacgttggtcatttcaatattttgtacctgttttaaattctgttagtgtatttacttcattgtaaatatttttgagggtacctttgtattttgcttttgaccttggttctgtgatttggatgtcaacaacttccctaaaaagcaccagtgtgttaggttctaatgtcatgacccaatttgtgttattcatctttaatcctgttttcagtctctatgtgtacagcagtatttttaataaagaattacagagataaatttgtccttttcttgcacgtgttcatataacaagatgatgattatcttatgattggattttaaaagattggttatttcctctgtattttggaggaatttttgtatttggatgaaatggcagcagatttattcattaatttatcaggtagtccttaagtcttatctactgtgtccttggatctgttctaggcactaagacagatacagggacttggtatttacagaatgtatagttatacccaaacatcttaatacaatacatgactaacaatgtagtt

SEQ ID NO: 8876 - DNA, 1276 bp, Homo sapiens
aaccctgtaagacttatcatccccacgtggcagataaagacatggaggttcatgaaaatttaacgatttgcccaagtcccccctcccctccccaggaaaagccagcgaccacattccaaccctccgctaactctgcattgagcactctctttcctatgccctccacctgcgcccattcccctcttctgcgggccgaccgggatcctgctgggggctacagcccaaacatgttacttttccaactgttgttttatgtgtttctatgagaaaggatattcggattcagaaatgctttgcaactccagagctgttgagcctgcggcgcggcccaccactcaacagcggtgctgagtggctgctcggtcgcgcgggatccactccgggcctccgagggtgggtgcacgatccactagccactctccaggggagagtgacgtccgggtggaccaatcgccgctggggcaccgaccgctgggcccaatcgcaggagagccgggtagaacagtgacagcgccgcggcagccgaccccgcctcctcggcggacagcgatgctcagctggctgcggccgagtcatcgcctagcgctggcagggccgctgaccgaccgacggaggcgccgattggccgattgtccactgcgcagaaggagcagctgctccgcgccccgccgcgccgcgctgaggccgaggtccgcagggccgcggggaagccgagggctgccggagaaccctgcaggtgtcactcgggacgcggaagtgcgcttgccgaggtttgctttacaatacgcttgagactccccgacaagcgtaatttggtcgagttcgacgggaaagtactctccccaccccagcgccggccgcgtagtccgaggttactgtccccggcgcgtcctctgttgccccagtccagaggctgcccttgaacccgggcgcgcacgagcgcagggcatccgaggcgacagcccctggcacggcccgacctgtacccagcctggcaggaagactgtaatcgtggggtgagttaaaaataaggccctttcgattgggagctgctttttaaaacgccccctccctgtccgtttttaatacgcagcaaaataacaataacaattgtgcaactgtcgcttcccaaaaggaacctcattgttgaacttacgaaaaatcagttggcaatatacagtgtgggaactgtactgtgatcattggctaaccaagatgggtgacagtttatgatttcaaagactcaaaggcggcttgagtcctacaatgtcctact

SEQ ID NO: 8877 - DNA, 1191 bp, Homo sapiens
agcttaaagagaagattttctcagggtatttattagtgtgtccagcagggtcaggaagcaggatggaaagatgcactcagactgttaatttattaacaaggcaaatgattttgtgtttcttgatgacagactattaagtttgggacttattttcccatttgagaagttataatatatatttaagatgataagtttcctgcttaagttgtgcctttcagcttcaatgagtttaaggagcactaagggtaatgataccaatgagggttggtttattatcaaacctgaatagctgtggtttctccagtaaatattttcttctactgaacatggagccattattaagagttgtgtgttttttattatgtacatttgtatatttttttgcttgtttgatgttctatttttctaatagttttcttttagtttcttaaagttgtgatactagatttagattctgatgctaactgcaaatcaggttggtctctgctgggtctctcctgcttttattttactttaaggacaagtgtagttgtcgtccaccacctttcaaaaaatgtgaaactgccctgcctcccctttttgctgacaacactgtgtacattgaccacttcctaccatactttatgttgtaaaatcaaactcttttgtggtacattatctcatgcttctgcaaattcgaataaattctatggcttccatgtgcatggtgtgatctcaagaatcctagtgggtctctcctgggacccaggcctggaagtgccccatggagagttccagatcccgctctgcttccccacagcccgtgactttagtcctatcttctcactttcctgtagccatttggggaaaatccttattccaacaatttgagcctcaaccagagaatcccttgagcccccattttggatctctgatactgtctgcagatttatttggctttggggccacagaggtcttccttccaaccaagctgttgggataaagcagctcagaggctgccagttgtcaggcatttgctgaaggacttggtctctggcaacaaaacgccctcacctgttgccgccccagtctgtgctggcctgcacatacactatcctgttagagggagcagagtgcatgcagggcggaggggctgtcggggagtgtagctatcctggtaattgttactatctcactccctcaactcccttg

SEQ ID NO: 8878 - DNA, 1112 bp, Homo sapiens
tcggaccccacgcctctgcaagtgggagagacccgagcatcctccccacccccatagctccagtgcacgccacccccgtcttgcctgggtcggggcctgcggccagcaccatttcacacacactccttgtagatgggagccagaggaaacctgaacgtgggtggagcgttccactgagtctacttcaggagacagaaggcccatgctgatgggggaggaggagggatgtgggcattttggacaccaggggaaatggaaatgctgctttcaaaacttagtttcctttccatttcttcctagtctggcctttgacacaaatctggtagaaagaagcctgataaattgagggcacttgtaccctccctgtgcccccagaaggttcttggagagaagtgcaagaatttgtgaacacggcggtggagggcgggtggatggccatgggctgagcctccgtatcaggcctgctcaccttgctgggagctttattctgatctcattttgaatgttccagagggagcatcataagagcccagagctccgatttccaaagagtgatattgacatttatggagattggtgttgtaacatattttgataaatactaacttattttgttggggttttggttgtctcttgtcttaggacctggtagttatttgcttgatttttttttccgttattttctacataggcaaagagaattcgagggatagacagtctccaagaaaagtgaagtggtgggagagaattgcttttttcttttttttcttttctctagtttttctttctggctgagatttccgtgcaagacagcacccaatagactatttagagttgacatttgacattttaatgggcgccatggctcattttgtagattgagaaggtgcgtctcccctgctccaagtctcatcatgacagcgtgctgacagctgggagtctgtggccttcctcacgcagaggccttaaagctggacacagaagcacgcctaggctgggcagggatgggacccatgccccctccttagaggacgggcttcctggttaggaaaggacacgtgggggtgccttgcataatagttcactggtcaccgtgcttttatgagtagtgt

SEQ ID NO: 8879 - DNA, 2282 bp, Homo sapiens
aaaatgcaaacatttttaaaaactcaaaactactacttcctacacttgattgcctagcccattttcccctccagttctagaatttttataaacgaggctcttcttcgttttccctaggtcagaggaatcgtgagaagactggagagagtaattgttgtgtaatcctgtaaacactgtctgcctagtgtgatgtgatatagtctttgtctttcatgctgctgggacagaaaagacccgacattgcttcagaaaccgttcagaacagtctgcctgtaaacacatggaactgaattaccacatgaacactgtcatcttttctcatgaaagtaaaaagaaccaagaacatttttcactctgattttttatttcttgtattttttgttgagctgttttaacacatattggtttttgaatgcagtcaatctccaggggaaaagttaacaagttatctttcgtagcagaaaccattttgctgccacaaaattttcatcatcagaactaataaatcaagtgttccaaatacaatttgcattaaaaagattggcattattttcctcatcagcagaatttataacagtgtgtggtatctagaaatacttatatatacaattccacactggaagacactcagcaattaatgaagttaattactgggccaacttgagaggaaaaaatggaaaagaaactaaaatgttgggtgaattctaccaaagtcagccgtggtggctgcactggcacagaatactaaactgagtgtgactattttcactgcaacaaatgaaaaaacaaaatgtgcctgtttaaagcactcagtagagggctgatgaaactaattttttttcctttaagacatgcactcttgagtcctacagtaactgagtgtttgtttagacagcacaagaaggggtgagagtgcgtctcctagccttaatgtgggagggtagtttcagtcactcatcggctttcattattgtgcagaaatattagaaaacctcattgatcaattttatgtatttgaatatcagcaaattgaaattttccataattatcattaatttgtaaccacatccagtgtcatgcttactccttagagttcagatgaattcttaaaattaaaaaaaaactccatagtactaattttgtttctttatatagtttgcgtttgatattagtgcttgcaattgtattaaagtcaaaagctgatttttatggcatacacaagaatgccactttttcttttatttcataccaataatttaaagattgatatgctaaaaacaatttgcacagcactaaagcatgagctactttcatctaaacctgtaaaaatatgaaagatttttatattttttcactgggaagaaattcttcctggatgaaattacaaatatgtgtagaatatatttaataaaagacttataaaatacctaactacaggacttaaaatatagattggcgcgtagtatacagaacaatattccatataaataagtttagcctttataaaaatgaagttgcaggctgacattacattctgtactaagtgtcaacagcccttacaaacattaaatgtaaatggtttcaaatggtcagcgttgtttaaatgtaatcatgttattttattcattgttaatgctttgatgaaaaggctttatatgcagtagatctacgaaaatattgttcatactgatcagaattaaatttgtatagagcagagttttaaaatgaatgtaaatagcactaaacgttttctttctgcaacctgtacttacagattcttcctgtaaactaaataaaaaaaaaatgatagtgcattttggtggtaattttaaaggtcttgattaggtcaataattgtttaagcaccgtctcattcatgttttctactttcatttcttaagcttttaaaattcatttaattaatattctgttgttgttttggggagtattcccaatgtatctttgatatttaacctggttaatttgtggacagtcacaacaatggatagaattatgtagtctccgttatcactaaaatgttatcttcaagagatgttaaatatttatatgctttgttgactagctgaaatgtgaattctgttagtgttgactaaagaatctggtagttgcttaattgggcaattaaacaatttatggctctattttgtaaaacaaactactggtaattatttttaatacctattttcattctgattactctttttttaagttaaagactatcagttaattaagattgagtttttatgatggttaaaaataatt

SEQ ID NO: 8880 - DNA, 1430 bp, Homo sapiens
gaatttctgtcagctctttaatttctggtatttttgttgataaaatacgaagaaattcctgcaatttttaaaaaacaagtttggaatttttttcagtggagtggttttcgcttaaaggaaaaaaaaatctaaaactgcgaagaatactaaatgtagttgagaaataattgatggcgagagtttgctagtctccctccccggctttgtgctggtattccacgtattcctgcattaatattgcacacccaaaccagtctatcagggaggctgaagcaagggcgcagtgtgatattttaggaatacagaagatttagaaatacccctatttctcatttgcagtttttttttccaattctgtgctctgtcaacatgagggacctatctatgtatgttgacttttaacatcaaaattggatttgtgtcaaacattcattgttaagagaagaatgacagtatattttggaggaaataatgaatttactaattaaacctttagaatttatgacttactgttagagtctgtcatatggttagaatttttacttccgctacccctgccatttcttctgctagctacttcataatatcttgagctttactgaggaatattctcacgctctgtggtatttgaatcattttgccaggtcatttctctgtctttagtattttttgctggtgcttcttacatttaatatggaaaggtgggaagaatattactgcattagatgtaattcttcattctagacttccaagtttgttttcacttttttgtgtgtgcgtgaaggagtctgtgtcacccaggctgtgtagtgcagtggttgatcttggctcactgcaacctctgcctcctagattcaagcaattctcctgtctcagcctcccaagtagctgggattacaggtgcgcaccaccatgcctggctgtgttttcacttttctttcaacatgttcaaccagatatatagccattatttttctcagctccagcattgtttgatttttcttgagtttgattttagtatttgagataaatacttttacattctaaacaagtccactctctgtggctaacgcaaaacaaatgaaatctttattgttttccaaacagctagtttaacaaaacagcatcatacatagtgaatgatgttcattggaaaattctaaaatttgtccttgtctaggttgagaacttttacacacactaagataaagatagaaatctgacatgctcactcaattcagcaggaattacacattagaaagaagccagaaaaataaatggcatatatccaatcacaagtaaatgatcctggcgttagtttttatgattacatgtgtctcattaggcaatttatgctttaatggtcaagcttttaaaaatttgtatttgataacatcctgaattctcagtttcgaatagtgcctactggt

SEQ ID NO: 8881 - DNA, 1209 bp, Homo sapiens
tgcagctgttttgttgacattctgaatgcttctaagtaaatacaattttttttattagtattgttgtccttttcataggtctgaaatttttcttcttgaggggaagctagtcttttgcttttgcccattttgaatcacatgaattattacagtgtttatcctttcatatagttagctaataaaaagcttttgtctacacaccctgcatatcataatgggggtaaagttaagttgagatagttttcatccataactgaacatccaaaatcttgatcagttaagaaatttcacatagcccacttacatttacaaactgaagagtaatcaatctactcaaagcatgggattattagaatcaaacattttgaaagtctgtccttgaaggactaatagaaaagtatgttctaacctttacatgaggactctattctttaactcccattaccatgtaatggcagttatattttgcagttcccacattaaagaagacctgagaatgtatccccaaaagcgtgagcttaaaatacaagactgccatattaaattttttgttgacattagtctcagtgaagactatgaaaatgctggctatagatgtcttttcccatttatctaaatatggactgctcaggaaacgagactttccattacaagtatttttaattaattgggccagcttttcaaacaaagatgccacattcaaaatagggtatattttcctatattacggtttgcccctttataaatccaagtagataggaagaaagaagacaaactttgcatctcagtatgaattattcaatttatttgaatgatttttctttacaaaacaaactcattcattagtcatgtttatctgcttaggagtttagggaacaatttggcaattttgtggttttcgagattatcgttttcttaaagtgccagtattttaaaatagcgttcttgtaattttacacgcttttgtgatggagtgctgttttgttatataatttagacttggattctttccatttgcatttgtttatgtaatttcaggaggaatactgaacatctgagtcctggatgatactaataaactaataattgcagaggttttaaatactagttaaatggctttcacttaagaacttaagattttgttacatatttttaaatcttgtttctaataatacctcttagcagtaccttttaaataagtataaggga

SEQ ID NO: 8882 - DNA, 1106 bp, Homo sapiens
tttaataagtagtatttttcccaactggtgaagtattaatgttggtagttgaaaacaataggaatgtatggaatatatggttcactggttcttttgttcctgtcaaatagtggcacaatggatctggggtttttctcagtataatgctggcatatttgtttcaaattgtacatagactctaaaaagttaggctttcaaattctggtcaatatagtttgctttaaatagtagctgcctctactacaagttttatttaatttgttgacaaatgagtctgctatgaaaaccggtcctgttgccagtcactaccctctgttcacaaatttgctgggtttataaatataggtatcattttcacttcaagattataattttagaatatgtttattctaggacatatagccctcaaaatctgcttactatatacgtcttataaaatagcatggttcttttttatagtaaatagaatttttatttaattgtctattgactttttttttccagggttcattgaaaaaatccttagtgatattgacatgtctcaagtgacataaattagccaatgactcggaatgatggattctccgaagattggaaatggtttgccagtgattggaccagggactgatatagggatatcttcactccacatggtggggtatttgggaaaagttagtgaacttattttttgcctgagtgcaaagttttttttttttctctatttttgagacttaaattcaattttgatgttaccagttaacttctaaaaaattgtgtcttccacggaaatcttacagtaatggcgaaagattgttttaatgtgtttacctttctgtgttttattgatacatgaaagtggaaataaaacatagaccttatgatttactgttctttgaaaatatggtacataaattctcccgggtaattgatgttacttttttccttgcaaataaaattgatactattcttaacacataaaatttaatatttaaaactataacataattctttttggaataatagctgtatttaaaggcttatatgcatttcttttgtttgccatgtttaaaataccttgtcaggatacttgtaattgaaaattataa

SEQ ID NO: 8883 - DNA, 1521 bp, Homo sapiens
tcctaacacatcctggaagaatattaatactctattttggtcagaatgtaaactgtggtttggggcaagtgtaatgagaaaatgtaattattttatgtgtaattggagttggtagaaaaatagtgggttgagtatgtggagaagcagttgaaaatgaactggatggatctgagttaatctgataactagtttttgttttctttaggaattgaacaacacatgtgaacccgttgtaacacaaccgaaaccaaaaattgaatcacccaaactggaaagaactccaaatggcccaaatattgataaaaaggaagaagatttagaagacaaaaacaattttggtgctgaacctccacatcagaatggtgaatgttaccctaatgagaaaaattctgttaatatggacttggactagataaccttaaattggcctattccttcaattaataaaatatttttgccatagtatgtgactctacataacatactgaaactatttatattttcttttttaaggatatttagaaattttgtgtattatatggaaaaagaaaaaaagcttaagtctgtagtctttatgatcctaaaagggaaaattgccttggtaactttcagattcctgtggaattgtgaattcatactaagctttctgtgcagtctcaccatttgcatcactgaggatgaaactgacttttgtcttttggagaaaaaaaactgtactgcttgttcaagagggctgtgattaaaatctttaagcatttgttcctgccaaggtagttttcttgcattttgctctccattcagcatgtgtgtgggtgtggatgtttataaacaagactaagtctgacttcataagggctttctaaaaccatttctgtccaagagaaaatgactttttgctttgatattaaaaattcaatgagtaaaacaaaagctagtcaaatgtgttagcagcatgcagaacaaaaactttaaactttctctctcactatacagtatattgtcatgtgaaagtgtggaatggaagaaatgtcgatcctgttgtaactgattgtgaacacttttatgagctttaaaataaagttcatcttatggtgtcatttctaaactgttgattttgtcactaatttaaaaaatgagatgagggagaatatgaattattctagcagaaatgaagttagtgtccagtttttcttttttactgcttatgttctctcttttctaagtgaaaatgtttttctcctgacagaaaaatagcatatgtttattacattaaagcattttaaaaatactataaagtgaataaaacttaaaatcttgccacccagaagaaaacattgttaacacttcgttatacatccttggagccttttacccctaatgatgggggtatatttgtgtgagtgtctatgttatagtgctgtaggctgtttttaaaaactctgtgccagggaaattagtaaatacagtcaagtgttgtaactgcataaatgtagtgagttcattataaagacgtacttaaaa

SEQ ID NO: 8884 - DNA, 1213 bp, Homo sapiens
cttacattgtgttaaggataaaacttcaaggatctaactgcatattaccctttttttttttttacccattgctcctttagggccatctcacactgcagatagttacctaaaatgcacatccacttgtttcattctcttgcgtaaaattcctcaaggttaccactgctgttaggatgaagtccaaactctttaatatgaagtacaagagatgcaaattctggccactgcttccatccccagcctcttttccagccctccttccccttgtgtttcaacaaattcagccactttcagatcctcatggtccttcacatttgcaattctagtgtaagtactgtatactctacctgcacagtttcacccaaccagtttctaccttggctttgggggtcaacttgacatcccctcttccaggaagttttcttgatgccagtgtttgggttgggtcctttctgcatccttctcataacacctggacttttccctatcatagcacttatcacactatattgtcattgtctgtttacttctccgtatctcccacttgccagtgacccaggaatgatatcagtcttgttaaccattgtatacctagtacctatcacaatgccaggcacacagtgtgcattcaataaatatttattcaattgactcaaatcacactgaatggaattaactcctggtataccttgtgtgctctggcttctcccagactctgtctgtggcattctccctcacctcccaacatacagacacacataccacacacacaccctgcatttctgttatgccttttcttccattcttccgctggttaaaggccaaatcctaggcttctatcttcttcctctgacctcctttagttttccttgatgccacctccttgacctcagggatgcattatagtaactttatgtttgtatgaaaactctctgaaaagcagagactatctcagttgcttccttgcgtggctcatttgtctaggaggggggaaattgcgcaaagtaggtatcccatcaacatctagtggttaattaactgatttgctatgaagctgtgtcaactctgtggagcctatctgattctggctccaagaaagaattagttggtagatagagattgccaaagggaaaggtctttatactgatttttataacaatctgaactcctagctgggggaaaatgcaggtatggcttatcttagtgtgtcatt

SEQ ID NO: 8885 - DNA, 1160 bp, Homo sapiens
agaaagtggcatttctaaagaatgatttccctcctgcagtgtttctcagtggacttgaaaggactggcttttggtgacacatgttggcatcctattaaacttatttatttttatacccagctcttcctcaccagatttaagctccagcagtaaactaacagcaagcagaaagagcacaggacaactaaacatgaacccgggaaccaccagcggcaacaccgcaactgccgaacggagccggcatcaacgaagcttctctgtgcccaagaagtttggtgtcatcgaccgatcctctgacccacctcgaagtgccacactggacagaattcaggcttgtacccaacaaggcctctcctcaaaaaccagaagctcatcctccttgaaggacagtctcacggacccatcccacataaaccatcccaccaacctgctggccaccatattctgggtcacagtggccttgatggagtctgattttgagtttgaatacttaatggccttaaggctgttgagcagactactggcacatatgccactcgataaggctgagaaccgagaaaagcttgagaaactccaggcacagctgaagtgggccgacttctccgggctgcagcagctgctgctgaaaggattcacatccctcaccaccacagacctgaccctgcagctcttcagtctgctgacaccagtgtccaaaatatccatggtggatgcatcccacgctattggtaaagccagcctcgttcaccctgtctcaattctgatggtgactgtgttcatcatttggtacaataagataatatgaacttactgcttttaacaattctgcttaaaaatggttccttgggagtagtttattttttctcataaaattctatataatgtaaatctcaatgatctgtattatagaaaatatttttaaggcagtagcataaaaggggccaaaattatttttaagatattagcgatttctttttagctttccagatcaaactgcaggtgctgttagtttattccattgctctcgtacagaaaaaaaaaatttttttttcttaactcctaaatcttttatttttttctttgcttttctgctttttgttcttcttggaaattctgttggtttcctcttgttttgaattaacccaaatcaacaaaccaga

SEQ ID NO: 8886 - DNA, 1134 bp, Homo sapiens
cgaactcctgggctcaagcagtcttcctgcctcagcctcccaaaagtgctgagattacaggcatgagccactgtgcccaaacactacctttttaacttagtgaaaaatatttagtgaatgtgattgatggtactttaattttgtcactttgtgtttttatgtttaggtttattgcattcttctgtgaaaagaagctgttcacagaatgattctgaagaaccaactttgtccttaactagctcttttgggacaattctgaggaaatgttctagaaatgaaacatgttctaataatacagtaatctctcaggatcttgattataaagaagcaaaatgtaataaggaaaaactacagttatttattaccccagaagctgattctctgtcatgcctgcaggaaggacagtgtgaaaatgatccaaaaagcaaaaaagtttcagatataaaagaagaggtcttggctgcagcatgtcacccagtacaacattcaaaagtggaatacagtgatactgactttcaatcccagaaaagtcttttatatgatcatgaaaatgccagcactcttattttaactcctacttccaaggatgttctgtcaaacctagtcatgatttctagaggcaaagaatcatacaaaatgtcagacaagctcaaaggtaacaattatgaatctgatgttgaattaaccaaaaatattcccatggaaaagaatcaagatgtatgtgctttaaatgaaaattataaaaacgttgagctgttgccacctgaaaaatacatgagagtagcatcaccttcaagaaaggtacaattcaaccaaaacacaaatctaagagtaatccaaaaaaatcaagaagaaactacttcaatttcaaaaataactgtcaatccagactctgaagaacttttctcagacaatgagaataattttgtcttccaagtagctaatgaaaggaataatcttgctttaggaaatactaaggaacttcatgaaacagacttgacttgtgtaaacgaacccattttcaagaactctaccatggttttatatggagacacaggtgataaacaagcaacccaagtgtcaattaaaaaagatttggtttatgttcttgcagaggagaacaaaaatagtgta

SEQ ID NO: 8887 - DNA, 1133 bp, Homo sapiens
tttatgagggtcataataatggtctcttaaaacctgatgaagaaaagaaagatcttagtaataaagctatgccatcacattgtgattatcagcagaacttggggaatgagccagacaaatatccctgtaatggacaagtaatacctacattttgtgacacttcatttacttctttcaggcctgaatggcagtcagtatatccttttatagtgccctatggtccccctcttcccagtttgaactatcatttaaacattcagagattcagtggtccaccaaatccaccatcaaatattttccaagcccaagatgactctcagatacaaaatggatattatgtaaataattgtcatgttaactggaattgcatgacttttgatcagaacaatgaatatactgactgtagtgagaataggagtagtgttcatccctctggaaatggctgcagtatgcaagatcgatatgtgagtaatggtttctgtgaagtcagagaaagatgctggaaagatcattgtatggacaagcataatggaacagacaggtttgtgaaccagcagtttcaagaggaaaagttaaataaattgcagaagttacttattcttttaagaggtctgcctggttctgggaaaacaacattgtctcggtaagtaaaggataccaactgaatacttggtaattcattatttaaaaattataaatgatatttgtcgccggctgcagtgactcatgcatgtaatcccaacactttgggaggccagggtggaccagtcacttgagctcaggagtttgagaccagcctgggcaacatagtgagaccctgtctctaaaaaatgaaataaaaatgttagaactataatgatacttgtaatcactgacaagtgcttttatgtttctagtagaagaaaatctttaatttgctacacttgagaatagcatctgacagtgtaactatttaaaaatcttttctgatagaagaaaggagaattggcatatgtttatatttagattctgctaagggctttaaaaatagataacactacgtataattatggcagtgatgaaagcaaatgctacttgagaactgtcctggcctacccttttgagtcagctgttcaaggaaagttggactcagt

SEQ ID NO: 8888 - DNA, 1144 bp, Homo sapiens
ttcctgttgtatcctttgacttacctgtgctctgaaatgtgtttgagtaatctgcttttttacagctgcccaaaactcctttgtccctccccgcctatgggatgcccatcgctgcccacactagaacatagttcattctcttaggatattttgtgttttttggacctgaagtggaacagcttgtatttgtacttaactgaattgattttgggactagatctagagtgactctatctaataagcatttattgaccatttctgtgtggtttacattatgttatgaacaaaataggaagagaatataattatccttacgtggatggaatcttagatccagtaggccagttagtcctaaaaaaagaaaagtggttttgccttctctcttttattccaattgagtcttagttttttcattcatttactcaagtagcattttgaatacaggtaatattttgcttttcatagttagagatatataatatagatattgtttatgtttttcagaatttaaacaagcaagcatatgatttggcaaaggctttactgaagaggacagctcaagctattgagccatatattaccaatgtaagtcttacttgtaattggttgtcagaaggattaaactgaaaatttaaagacttgctagaagcaaaatttcatcagatagtatatagttttaaaaacaacaaatttgtgttgttttaacccttaagtaatatattttctttctccttcttaaaattattcttgctttatattttttggaaggcttgctctcatcctatttgttcttttatcttctttcaaattgcctgagaacttaaacagttttattttggttagcaagatattctgtttgtttctactgatagaaatagagttaaatgtaattagataaaacatatggaacttttcattattcagagacgttgcttacaggtttttggagcttaaattgatttgtacaagaagaagatatgaactaatattaagacctagaaattgaaggcaagtatgaatggcagtagtgatttagtaaaagttgcttatctattgctattcctggggtagattccatataaatctatcttttctggaaaaaaggaacaattgtaataaaatgagacctttcagtatcacccca

SEQ ID NO: 8889 - DNA, 1190 bp, Homo sapiens
ctacatgtaaattaaaaccctcttttatattcctattgttaatattgacattttttgaactaaagttttatgctttcattagtgcttgtcagcaaatgataatatgtttgaattttaggttattttactgtattgataattgttaagatccaaactcagtaactgctttcccagaaagataatgtaagttcataaatgtgaaatgttttcatttaccacaggaaacataagtagaaagatgattaatctgtttgagttatttttcttgctgtagacattgacttctgttcatttctctttaaaattattagatagaaaagtaaaataatttttttctttcactgttctggggaagtctgtgagcctgtaagggatcaaatgttatagaggtctaaatatgtgatgccagggcagaaagtaaggataaaaagtttcagggaaaggaaagcaaagaaaatcaggaacaaatgagaataaagattagttaaaaatgattactgcatatcttatgcacatatacccattttaattaagcatctggtgactttccttttaaggtacggcggcgaagtgctaaaagggaacggcgatgaacaaatgtaattaataactttctctgtgaaagctttggaaaaatctttttttttttttttggtcaagcttgaggctgaataaagcctttgatgcacaaaatgggactgctgaagagtggacagttggaccttactttggtgaccccatacatttgtggtcacatgctttagccatacacatggtaacattgactatggagtcttgtgaaagtgtaatgtgcgatggctatgtagacataaagaagaaacttgtaaatatcttttttcttttttttaatgtttctgatttctgaagtgcttgtatagcttttatctgcggctttaaactgacagtacccgactgtttattggatctattgatttgaaaagaatttgttaggatagatcttaagcagtaatctgtcagtgtttgtatttgtattctctgcaattttactgtgaaaaaaaatttgttttcaacaattggtgtcattttcttgatgtcactatttgttggagagttaaatggtctcttccctttgtgtatcttacctagtgtttactcctgggcacccttaatcttcagaggtgctaaattgtctgccattacaccagaag

SEQ ID NO: 8890 - DNA, 1325 bp, Homo sapiens
cattggttttgaaatgtttccttagctcggttctcccaaacacataatttctgtttcagcagtacaaaggcatgttttaaaatctataacataaagaataaggaatagctttgtatttttgtcattgattaaattgcaccagaaatgtttatggaaatattaagaacattttataaaacatacgaaaaagtgattgtgaaggatttttatttgcatgattatagttaagcaaatttcatttcacatttttgtaatgctgtacagcagttcacaaaaaaatgttcattgtagattttgttatgttcaatgccaatgagtctgtaattttacgacctgtctgttctttttttgggtggattacgatgtaaatttttcttttctttctttctttttttttttttttgtgtagaaaaataggtgcaataatgatcaaagttttgatgtcttgagtctccatcttaggggattatcttacgtttaagcttaacatttcatgtagtaagatttggagagccacatactttacagtaaaattaagtgtgtataaaacattaattgctaacaattgttagcaaactatttcagtgataatgttcattttgaaaatatgtactgtataacattaagaaaatatttaactccctgtaacaagttccattatgaaaatcttattcctcagtgaggttatcttgctgcactctgtagcaaatttgtttaatctacattataataaaatttcttgctgcagtgcaacaggaggctttttcagtgatcttcactgtatatgtaaattacaaatgtggctgtaaaacttattccaggtattaaaggttaaattgctttctatatcttcttataacttgtaagtctgatttttaagatttccttttgtccacttgtaagaatgtcaggaatttaagaatttgtttaaattaggcatatctctgccatcacatagtattatgtcaccataatgaacaattgctatttaaatagataaccaattttcagacacatttttggatttctgtgaagttgaataaacataaaagctaatacagttgtattattttgtgtatgtaaatcaacatatatatttaaatactaaatggagaaaggcacatttgatgatttttaattttggagcctttgtttcatgaagtggaaacacgtctcagtaactttttccaaaccttttgtttaaacttctcatgcaaaatgttggcggacagagaattctaagtattatttaagttgaataattgcgtaactgaacaaaataaatgtataatataaactttaaaaataagcactaaataaataag

SEQ ID NO: 8891 - DNA, 1204 bp, Homo sapiens
gatgccaatatatagaaagtgtttttccctttaaaccatctttactttgaacaagtaggtattacgaattctactaaactaggtaagggctagttatttactgtcttctttctcaagctgatttagttggctataagaggaggctggaatattgaggaaacagattttgcaaagagatgatgtgggaatacctagtccctaggaagggaattaaagttagtatgaaataacattaatatgaatatatatacatagatatatttttttctccattcttaacagccatcagcaaaaattatgattcctcacattaaatatctttccagcttttaatagattttgggagatttcatgcaaagtagggataatatgcaacattgtgttagatgcagagtggtaagttacttttagtgtaagtttcacttataagaattttgagagtaatacagttataagggtctaggaggatatcaacagaaatgaatcttaatctgctttttaatggattgcccatttttgttaattttatttgtagatttgccacgtgttatctactgtgtgtaagaaggaaggtctgaatcttccttcacaactggctcatagacttgcagagaagtcttgtagaaatctcagaaaagccctgcttatgtgtgaagcctgcagagtgcaacagtgagtggaaggggtagttacattctaggactttggcccccaagctttttggcaccagggaccagttttgtggaagacaatttttccatggactgggcaggggtgggggatggtttcaggatgaaattgttccacctcagattattaagcattagattttcatttggagcgtagatcccttgcataagcagttcacaatacggttcacgctcctatcagaagctaataacatcactggtccgacaggaggtggaactcaggccataatgctggcctatccgctgctcactcctgctgtgcagcccggttcctaaccgcacggaccagtggttggggactcctgttttaggacataagcacacttctgtttaacttcttgtgttctctttttgtcatgtagatatccttttactgcagatcaagaaatccctgagacagattgggaggtgtatctgagggagactgcaaatgctattgtcagtcagcaaactccacaaaggtaccagtataaaatgatgacagtaaagctttc

SEQ ID NO: 8892 - DNA, 1151 bp, Homo sapiens
tgagggttcactaaggtctgggtaggggaggatcgtgaattcatttgttcaacacatctatgtagcacagcctttctgctaacctccccacttgatacttgctgtgttatttcatttaatactcacagcaaccctgcaaagtagatgtaatttgtcccattttatataagggaaactgtcacaagtgtattgggaaacttgcctgaagttatacaaactttagagtctgtgtgtcatcctccaagtccaagttctttccactacagcatggcatacagatatataaaaaattactttagtctacaaaactaagtgctagtaaagtacatacttattgctacatactggtaggatgagggaatgtggcaagggtaacattcatactgccttaggtagatacacagtaaaatagacccaatcaaaaggacttccaaaatgcaagtttgcctgcatgaggttatgtttcattctaccacttctcttcaggagacggtgatgctgagggagctgtagctttaagagaaagaaaaataaattctcatgaaccccaagcatgcacctgtgaatacccaggggcacttgggttttcaagtgaaaatatgcttcacaaactcggaacccatattttatgatagctttcagttgctaattgtcactgaaaaagaaaagtctttaaaacctgaaaaataattcacattcatcttttctttctggtccctgatgagcctactacctacctggcagatacttgataaatggtaaatattttttgaataaatgcttttttgagcagtaagtttttaatatatcatagaaatttaccaggtagacaaggaggagaagttattctagaacataaagtgtggaaatgtttgatatctgcatttgtttttttttaatttcaatagactttacttttttagaacagtttaagtttacagaaaattgaacagctaatacagagagttcctatatatgtgtgtgtattggtcctgtttttttccttcttcaaagaacagagacatgaaagtaacatctgataataacactttatattagaaaattgtcagctgcaagtaacagacactgtaaactggcttcgtaaaaaatagatagatgatagatagatagatagatagatagacagacag

SEQ ID NO: 8893 - DNA, 1519 bp, Homo sapiens
tatcgtaatgttgctaatgatcattagtattccaataggaaggctagggtaaatgaaagcaaagattacaatattatcattttttaattgttgacctatacttactctgggtgggttttgttgaattgttgtgagaaaataattacttttaataagaatatatatttaaaaacctgtaagcttattcacctgaggatttaacatagttttgcaaatcatttcagattgttttaggatatagaaaatacaatcatgacattatgagtaagagtgggtgaggattcaattaatgtgggtttttcccccttctttgcagcaacagttttgggcgtattaaaagcacatgtttgaaattcacactctcaaccacctactgggcgcagtttgacaatctaggaaaagtggaacaaagaatgattttgaaagctccacccaaagacctaatatcaaaagagttggcatggtttggcttctgataaatgcactcaaagcttctgcagatagaaagaccagcagcgaaaaagctggccacacactgtcactcatcttcatacacacttggatccccgccagccagagagctacaagaacaaatggcctcagtgacctacactctcttttctcaaaaaatattccacaatttatgaaaaaagcatgctataaggaagatccatgtagacacgataaaatgattagattgggaaggtgtgttgataccttgtgtcactgagtacagatattacaacttgattcttatttttagtatccctgtgaattactgtcactcatttctaggtggtcttttccttatttgacattttagagagtttccttcttcattcaccatccaaactaagatatgcagagagatgctgaaagaggggtttacctcctcacttgacaactaatgaataaattgatgtgtgcttttgcatttcacaatcccttgagtgaaacgatggctaataggtaaatatttctttctggaccttaagttacagactagcaggttttttgtttttcatctcttcctccctatgggtattagaaaggacagttgaaaataagggggaaaaaggtttgttttatatttcactgaattgttcttatatgtaagttttattattaaataaaatactcagttttcaccctgagcattgtaatccatttttgttttgtttaataaatatatgttttctcttttagtagtactatgtagggaatttaatttcctagagttttgagaagcttaaaaattactgtaggcatagcctaattctcacatcaaattgtacaacttttctttgaggataccaaaatgatggaatctgcagatgtttgacatactttataaaggaacagaagtttccaactaaggctttattcttattattaaaaacaggtgcatgattcttcattctctttcctttaggaataattgctttgacattagaaaagaacctgttgaggtattttggacactgggactactgcctatgttcccagctggtcttaattg

SEQ ID NO: 8894 - DNA, 1519 bp, Homo sapiens; identical to SEQ ID NO: 8893

SEQ ID NO: 8895 - DNA, 1206 bp, Homo sapiens
gtgagagcactcagagatgagagctggtcaactcttcttcatttatggagaatgaaggtacgtgctagagagtatgtttttcttcttcccaaacattatagtcctcataatccttccgtgggaaggaagttctttaaaaggggtcccagggctgtggtgctaaatgactgggaaccagagaccccaggtgtgcgctgtcttacgttgtctctctgtttccccaccccactgggcacatggtgagagactgcacatccctccttcctcacttcactaggggactgcttttttgtagatttcttcccagcccaggcttttattacaagagacaaagggaaagctggttgaccatgagctaaaacatttccacaggtcttcctttataatgttgtgatccaactgtctcattttcctttctcaaaaatcaccttctgaggacagtgattctgagcggaaaaaaagcatcaaaatccccatgtggctttaggtgtcacctgaaatgagagtctgctggcgctgccccgagacaggtcaaggctatgcatttaagatgaagtctctttcttcttttcctcaaaccttatctgtttgggagcaacagcccaagaagcatcatcttgaaacacactcatttgatttcatttccgcagtgcaacctccagcctgtttccacactgtcacaatgcctaaacacatacaggctgggtcaccctgagcattatacagctactgttaaataaaaccaaagagaaagaagatattccagtttttaaaacttcaataaggaaacgagaattaacatccaaattaaaattctttctagcagtgcacatactctgttgtttcagagtatgaaatgaaatttgtgtagctgtgattttaaattaagaagtaccccggaaatggtattaaatcaataatatttggggggaatacttaaggaagaagatatttagttgtgaaatgtcaaataaggacacaaggtttcatttccttgttttctcctattcttccaaggccacttaaaagatcagatgctttgaccaaaccttctgagcctcatttcctataaactctcctgtcaacagttgaggctcatggtggggttttggtctgaaagaaggcaatcttctggaagtaaaaacctactcttagaatatttaccctgtaaaatgatattaacaagaggtctggtagccagctgta

SEQ ID NO: 8896 - DNA, 1109 bp, Homo sapiens
ctcattagttaagtatcaactgcaggcttatatctgtgctttgttttgtcaatacatcctggaaactgacagcttttttgaaactgaaatacatgtggggcaaagcagcataaaatatgtaagtaaacaagacgttctccttgctcacagcagcagccccaaacctgtttctcctggtaggctaaagccctggccgcttgtctgactcaacctccaggaaatgagtaactgcttcctagtgcctctactctgctccaagcagtaggcattcttgctgtttctttaatatactttgttggtgaagctcatggaacagtggtgttcttatgtaagatctaccagtcaattaaatattaaaatacagttgtctacagccaggtgttttcagtgtctcctttacagatgaatggaaaagtcatttatattttgtctttgttttcagcgttcttacttccgtactcttctcatgtatgggttccactttctggtgtggttcctttgtgtcaaaggaatcagggacacacagtgtgggttcaaattatttactcgagaagcagcttcacggacgttttcatctctacacgttgaacgatggtaggtttctgactggaatgtatccagtctgtcttatgacccagccatcttctaggtaatgagaaacagccctgtatatttataatgaacatgtagatttaaacaaaattgacaataatgtatgtaaacttgatcttgcctttatacttttcctgagttggatcttattttgaaaatacacaaacccaacaatatggtataaagttatgtgtgttcaccttaattgtagacagtagaaattgagtggcctgaaaacattttttttcctttgaagaaaaaagaaaaagctcagaaacatcaaaacagaatagggcacccattttctcttttcttccttctacggaagataaggtgtctttcctaagaccgatcttttgacctctacatctccttccaccttgtcaaaacctaatcctgtccatgtatttcatctcttgtgtattcagccttttcccttccatcacatctttcccagaaccctttccattgaccctgctgtgcccttccagctctag

SEQ ID NO: 8897 - DNA, 1217 bp, Homo sapiens
ccacaatcaatattagaacatttttcttgcccccaaaagaaattctgtccctattagtggtcactcctcatttcccctcaacctcccagtcctgggcaatcactaaactactttctgttggtatagatttgcctattctggacatttcatataaatagaatcattcaatatgtggcctttggcttctttcattggcataatgttttcaagttccatccatgttgtagttctcaaaaacatctgtgtcttttcagttaggaactcaaactcatgctgttccttcccatagaactttatctgactcccttggaaaaaataataataaataataaaaatatcctgtagcaggtgctatctatgccaggtactatacacataaccttcacaataagctataaaggagatattatgttcactattttccaaattaagaaactaagaaaggtcatactactcattaagtcatacagacaatattctaactcaggtctctgactctaaaccactcttctcctctaccccacatagtaggtctgtcttggaagatgagtcatggttattaccagcattgccataaacacctacatcacatttctctgaaatccagcactggcccatggttgtggctttgacttgcatcagaggagtacagagaagacgctcattcaacaggaaaaagccctcaaacacagactacgctggaggtgaggcagaacgcacagtggtcaagactgcaggactctagagtccaaaagacctggcttcaaaccccaaaccagtcaccctttagttgcatgtactttaggtagttactttcttattcttgattttcccccatataattgaggaggatagtttctacctcatagggctgttatgggaatgaaataaaaggatgaaggcttagcatagtgcctagcacaaagtaagtgctcgacaatatttgcaactcttggttattattactgcattagacaaaggtgaaatggcatcttatcagtcatccaagaagcacgtttatggaccctgcatgtgcacacacacacaaacacaccagtgtagtttgggggtgaactgctcatcctattatcatctctaaagtatcctattcataaggggaaagggtttaagtgtaagaaagaataaagcaggagcagacctacaacatggacaagaagacacccccaaggacctgagtgaatgatctccacggagcc

SEQ ID NO: 8898 - DNA, 2088 bp, Homo sapiens
catgttaagttgaattgattttaatttggctatattttcattgtgtgtgtatgtgtgtgtgcgtatgtatgtgttttttcctaggttacacttaaaagtacttcagattgtctgacagcaggaactgagagaagcagtccaaagatgtctttcaccaactcccttttagttttcttggttaaaaaaaaaaacaaaaaaaaaaaccctccttttttcctttcgtcagacttggcagcaaagacatttttcctgtacaggatgtttgcccaatgtgtgcaggttatgtgctgctgtagataaggactgtgccattggaaatttcattacaatgaagtgccaaactcactacaccatataattgcagaaaagattttcagatcctggtgtgctttcaagttttgtatataagcagtagatacagattgtatttgtgtgtgtttttggtttttctaaatatccaattggtccaaggaaagtttatactctttttgtaatactgtgatgggcctcatgtcttgataagttaaacttttgtttgtactacctgttttctgcggaactgacggatcacaaagaactgaatctccattctgcatctccattgaacagccttggacctgttcacgttgccacagaattcacatgagaaccaagtagcctgttatcaatctgctaaattaatggacttgttaaacttttggaaaaaaaaagattaaatgccagctttgtacaggtcttttctatttttttttgtttattttgttatttgcaaatttgtacaaacatttaaatggttctaatttccagataaatgatttttgatgttattgttgggacttaagaacatttttggaatagatattgaactgtaataatgttttcttaaaactagagtctactttgttacatagtcagcttgtaaattttgtggaaccacaggtatttggggcagcattcataattttcattttgtattctaactggattagtactaattttatacatgcttaactggtttgtacactttgggatgctacttagtgatgtttctgactaatcttaaatcattgtaattagtacttgcatattcaacgtttcaggccctggttgggcaggaaagtgatgtatagttatggacactttgcgtttcttatttaggataacttaatatgtttttatgtatgtattttaaagaaatttcatctgcttctactgaactatgcgtactgcatagcatcaagtcttctctagagacctctgtagtcctgggaggcctcataatgtttgtagatcagaaaagggagatctgcatctaaagcaatggtcctttgtcaaacgagggattttgatccacttcaccattttgagttgagctttagcaaaagtttcccctcataattctttgctcttgtttcagtccaggtggaggttggttttgtagttctgccttgaggaattatgtcaacactcatacttcatctcattctcccttctgccctgcagattagattacttagcacactgtggaagtttaagtggaaggagggaatttaaaaatgggacttgagtggtttgtagaatttgtgttcataagttcagatgggtagcaaatggaatagaacttacttaaaaattggggagatttatttgaaaaccagctgtaagttgtgcattgagattatgttaaaagccttggcttaagaatttgaaaatttctttagcctgtagcaacctaaactgtaattcctatcattatgttttattactttccaattacctgtaactgacagaccaaattaattggctttgtgtcctatttagtccatcagtattttcaagtcatgtggaaagcccaaagtcatcacaatgaagagaacaggtgcacagcactgttcctcttgtgttcttgagaaggatctaatttttctgtatatagcccacatcacacttgctttgtcttgtatgttaattgcatcttcattggcttggtatttcctaaatgtttaacaagaacacaagtgttcctgataagatttcctacagtaagccagctctattgtaagcttcccactgtgatgatcatttttt

SEQ ID NO: 8899 - DNA, 1756 bp, Homo sapiens
ctgcctcggcctctcaaagtgctgggattacaagattgagccaccgcacccaacccccttatccctttacttgtactgcttatatataagcccaagcattttcttagataatgcatcctttgtgcaacaggaataaattaatacatagaacttctcccagcatttatccacctgaataagtgttcagtatcttaaataatattgtaaagtcagtattttaaagtagttcctactccaaaatgagcaacttctaatgtcattagaaagctgatcttggggcattggttatatgaaaacgtttgtcttaccctgtcaaatagagttttactttaactctatttccagtgaggaggtagatttggaacttccaagcactgaaaatgagtatgtatcaacttcagaagctgatggtggcggagaacccaaagtggtatttaaagaaaaaacagtcacttctcttggagttatggcagatggagtggccccagtcttcaaaaagagaagaactgaaaatggaaaatctagaaatttaaggcaacgaggtgatgatcaatagttgcaggagagctttttgtacatgcttttaggacagaatggagacttatacacccaaagtttatctgtgtttgtttgtaagtattatgatgctaaaaatttagatttattctaaatgtatttgatgtgaattaaaataaatattttttcatgtgaaatttattttggttcctaaaatggaagcctaccacattgcattgtaatacagtgtattatgttcagtgtctaaaaactgctaattaagtcataatttaagatgctatgtatctgttatttaaaacatggagaaacagggcctttattccattcatattcataagagcatatttatcctgcattgaaaatgcattacttttgcacattgatattaactgttgtccaacaaataagtatcggagtacgtgagaatattcccagcccagtgatgatttggttctgaggctgatgtgagaaagctgatgtaaaaaatgtatgcatattggcttaccttactcaatttaaagtcaaaagccaacagccaggagcagctcaggtacttcagatgtgcttaatatggagtgaaaactggaccagaggtggaaagatgtatttgccccagttcacttcaaagcagcaaacgttgtttaagcattttagtttgaaccaggcattgtgttaggaatccagggataaagatgaatgaaatgtatttctgttcttcaggagttcacattctagcatatgccttttttcccccagtcatgcactctttttagcagtcttatatgtactagaaaagattttttaaagtttatttaaagctgtgtagatgaaggcttgatctaaaatagtataaggtctccagcttcagtaaaagtttttagtgtttacttaaattagtaatttctcactttctgtctggttaaaatgtcttaaaaagtagaattttcttctttaatccgtttagtagttacctcccttttacttttcaaattcacaaaattacatttctcataaattgtatagtatttaacttataatagttaatatttgtctttttaagatgactgtacatgtaagaaaaaagcttattaaaaacttgatcaaagaataagttaaatattgttattctaattccagtcagaatcaccttagcattggtgagatagtatttggagatttgtctttgcattttttcagtctactttttgggtattttatg

SEQ ID NO: 8900 - DNA, 1248 bp, Homo sapiens
aggtcaggaattcagtgattccatttcttgtcatttagtaaattttagggactattttaatatgatctttaataattattgtaagtagaatggtattagtaggaatagaaaaaaattttcgttaactttttttaacctctactttttttttttcctttttttttttttttttttgagacggagtcttgccgttttgcccatgctggagtgcagtggcgcgatctcggctcactgcaagctccacctcccgggttcacgccattctcttgcctcagcctcccgagtagctggtactacaggtgcccgccaccacgcccagctaattttttttctattttttagtagagacggggtttcaccgtgttagccaggatggtctcgatctcctgaccctctgatccgcccgccttggcctcccaaagttctgggattaacaggcctgagccaccgcccttggcctaacctctacttttatataataatataaaatggatttcacttgtaattaaggtgtaatctgtcagatagccaatgttaatgctaaaatgaaaagtaaattgcatgattttcttgtaattttacagcgctttgaacttcaagattcaggaagctctctacttcctaaagagattgtaaaagtagagaagatgatggaaaaccatgtgtcccaagcttctgtgaccatccggattgcagataaagaggtgaccattaaggtaattaatcacaggtttattctttctatgatataccttattctgcctgtttttatgacctaaattgggtttatgatctccttgtaagtcttctctcttgatagtactgcttctgtcggtatctatatgtctatgtctccagagtcatgtgtgcttataaactggaaaagttcaggagaaacatagggaaagcctttcatcaaaaattcaaagttgacctgtgggaaaatcaagtcacaggctgattactgacagcattttgtgctatgagtccttggtaagaaatagtgttttcaaacatttgagctgctacagagacctattttcaagtaaaatctttcttagctatgtgaaacggtttaaaaaggatctgctctggttgaattgtttttagagagggaaataatatttggtcatagagctccatctgcatgtatatatgttatatatatatcagctccttctatatatatctatatgtgtatatatacacacattttatggagtcttactatattgcccaggcttgttt

SEQ ID NO: 8901 - DNA, 1191 bp, Homo sapiens
taatactttactgcttattcttaaaattaacactgagttttcaccttaatacatctcttaatattttaaattaagtatcattatctatgatttgagaatatggaactgataactccatgacattttgggtaattccgcctttattgtaaattccttatagacttaataccatctttgctataacaaaggaagtaaaatgtatttgttatagaattattgggatggtaaatgagaaagtgtcacaaagccattcctatttaggtcctcctctccttaattctttatgataacatatagatccttggaagtgtcaaaagccttgtactcacaaatgtcattgtttttaattttcattaatgagaagagtaggcactgaaataaggcactgaaaaccttgcttttaaaagtaagatatttgatatcaggcctggatggactggttctttctgtgttttttcttaacatgcgatcccatatgtgtttgcttttctttccaggtttaagagcaggactggctgcctcaattgctgggagttcgattatcaacaaaatgttactggcaaacattgatccttttggtgccacgccgtttattgacccggatctagattccgtgtaagaaaatgcttttgcaaatattttgtttgggtttttcttgttttttttttttttcaacatgaactgtaacattttaaatgtattacaataaatatggtcccatgtaaaaaaaggatgatcagaaaattacaaaagttgataatgccaagcacattgagtcttttaaaattcagtggtctccgtgatctgtccctgagataggtccttttccagcccgttctctctgagagcaaccctctggcaaaggaaggcaccaataaatagaactgatgctattccctttacctcctttcttctcagtcttgccagatctgtcatctttccacgtcagcttctaggtttacttattttgggaatcttttggcccacactgatctcttcccttcttaagactcctacaattttttggcatttcaagatatactttcttttacttcctttttaaattttgcttttgttatatcatttctgtaatgacattcctcaaggagagtaccatattttaaacgttccaaaacacctggaagaatggattggatctagtacttttttgctcaataaatatttgtccat

SEQ ID NO: 8902 - DNA, 1237 bp, Homo sapiens
aaatgtgcaaagtcaaagaagtgtgtcgcctacttttttaaacccctcagacgaaaatttgaaaacattatgcaattttgcgggtgatctggcagcagaagtcattacagaagctgagaaaatagcaaaagtccgaaattgtatgcttttcaagcaaaagaagaacagttgttatgctgatggtgacgaagattataaagtagaagagaagttggatatagaggctgtagtgcacccaagagaagtggatccgtttattctttcattaccaccaagttcttgtatgtcaggtctgatgtataagtatcccagctgtgaaagtgtgacagatgaatatgcaggtcaccttattcagatactaaaacaggaaggtggtaatagtgagttgataatggatcagtatgccaataggcttgcctaccgatctgttaaatcaggattacaggaagcagctaagacaaccaaagtgcagtgcaactcaagaatgttccctgtgccaagttcacaagtgaaaacaaacaaggaactgttaatgttttcaaacaaagagcaccaccaagaagcagacaaaaagagacaaagtaaaagaaatgaaggttacttttgtaaaaatcaaacttgtgaaaggaccctggatccatatagaaatgaggtctcccaactgtatagtttttcaacctctctggttcacagcataacaaaagatgctaaggaagagttgacagcctctctagttggcctaccaaaatccttaacagattcttgcttgtttgaaaaatctggatatgaagaagataatgagtgtcacgttacaccagaattgcctaagtctcttcagccttcctcacaaaatcacaggttttaccacagcactggcagtttaaatggatatggttgtggagacaatgttgttcaagctgtagaacagtatgccaaaaaagtagtggatgacactctagagctaactctaggatctacagtgttccgagtgtctgagaccacaaaatcagcagacagggtcacttatgcagaaaagttgtcacctcttacaggtcaagcttgcagatactgtgaccttaaagaactccacaattgcactggaaattcatctcagcactttttcagacagggttctctcgccagtagtaagccagcttctaatccaaaatttagcagccgctatcagaaatctaggatttttcatctcagtgtccctcagattcatgttaatcttgat

SEQ ID NO: 8903 - DNA, 3653 bp, Homo sapiens
gatagtttcccccatcctttcattgacattatttgccaatgctgccagtcattctggcatgaaaggtgtgtgtgtgtgtgtgtgtgtgtgtgtgtgtgtgtgtgtgtgtaagggagtactttaaccttgccagtttgttccctcttttattttactgttttctttttagaaacccactgttaaaatttaaaaaggtgctttaaaataaaacgcctataaagattgtgcagtaagaatttttattgacaataattaaaattttttttgacaattttgggttcccaacttatcttacaagtgaaaacttaaattgtaaaacatgttgaaattttaaaaattaatgttaatatggaaatgcatttagagaagcccagtagtttttattgttggatttttgaaaaaacctctaccaagaatgtggtgttttttttgtttgtttgtttgtttgttttagaaaaattgggatttccccccaccccgccccacccagataaactatatctacactgtctcgtcaagttctctgacacgatctttctgggctctacatttcctactagtttgtgtccagaaactgcaagttgacatgaatagaggacaaaggttgtgtcttgcttttgtctctctcttccctccctgcaactctctctcccctcctcccactctcttccccctcccccctcctcccactgtctctcacctcccccaccccccactctctctcatctctcgctgtgtcctgtgtatgtgtgggtgtgtgtgtatttgggtgtgtaaatgttggttcttccactactggattttgtaatctaggataaatcactttttttggggactttgattttgctccattacgttttcattttttctgagcactgactgttctgaaagctgcacaaaacgtagaaagaagacatagcgcctgccagggaataggaaatgagggcacttacacattaatgtgaattagtaattgtggtatagaaatgttttatagtgaaagattcaaatttgcttttcaagaaaaatgccaaaagctatttaaataattcgaggttacatcgtaggttttgatttttctcaatttaagatacagaaatacagcaagccttaatataaagtttcctaaagtttcttcaagtattttttaaggtggagaaatgcaggaattgtataaccagaattgttcctgcctttagcttttcagaacttgagatgtggcagcactggactgggtttttttaaatgttaggactaggaatgtttgctcttgttaattatgaattaattgattattaagtttagaatgcatttttacaagtatctaactatcaaattgtgtttagtaacttgagtgtatgcacaagtttgatcaacagcaaaatagagttctgaatttcttttaaagtgatgatatattattttgtgaaactttgtgtttgaaaatgtttatttctgtttatggtgtaatcattctgaggtgaggcttttcttatttcctttgcattttgctagagctgtgctgagttcagcatttgcttatttaaccactacataatgacagaccagttattaggtattagcatgtgtggtaataataatagtggaacttcacacttacatcaattcagtgcaggggcatagaataaaatattaaatattggcagatgtatgaaaagaagtgtgagttaaaaatattgaatattggcaggtgtgaaaacaagtgtcaaaattcctcatatagagaaaataattttgagtttagagtattatcttttaattaagtgtagtctaaacttaactttctgtaaaggcactttgtggtttttccaaagatgttctagatctatttggttgctctatagtcaaacagctcttttgaagacaactgtcttattttattacaaattggcttgacatatttatactgtaacattgtaatattgctgtgctgtacattttggcccttacgaaatacgtctttttcagaactgttaaagttttgatgtacatcgagctgaattctgtttttaccagtttcaaaaccttcaagtgatatgtggaaaaaagtgaatgagacctctgatagggggttttcagaaccttgttcacaccaaaatgtgacagttctttcatgttttcctaaaccaagttaaaattacatgtatattttggtgttaaggttgatttttaagatacttctgatttgtacaaaaggaatgtttcctttataaatcacagaagaaaatgacaatatctgttggatatttgatataatttaatggtgttataaaacctttaagaggattcatggtgaatatatgtgataacatctttatactttgaaaaatgttccacttacccttcagatatttgttgtaagttaattcaattcttaatactttaattttgctccaacaagggctttatgttgctggtaagagaatttatttactaaatgcactatgtataaagtgaaagatagtttacttatctgactttgatattagatggctgacattagtgcacataatgcagagtttaaccttgattcttcaacagagtccagatttaaatgtctacttagttaattagttagctgatattcttccacaattaatatattcaatttcccatcagtatatcactttaaattttatgtttttctaaggaaactttccacagaattttaaacaactgatgcatccatactcagggtgtagggagaatactttgcatttaaaaaccctgtccacctgtcaccagcacaagagaattagagcttcagtgagaatttagaaaaattatactaaagtgagatgcattttttctcattttcagcaagactcctctaagcatttactcatttactgtattcctgctctgaagatgtggatacagaattagtcactcttgtcactttatttatttattggtttttttttaaccatctgtgtacattcctttcatagggtagagttctagttctagaagttcttattttgtttttgttgtaatgtttgaatactatttaatatccggttttaatattgctggatttgctacctttggttacttgtgcagtgttaaaagtaatccactttcttgtttaatataccagatacatagcaaaagcagcttggaataattatagctgtttatttggctgtgctcagttactatattaagatcttgtactgtgtaacagtaactcttttttgcttttcagtaatttaatatgttcacttaacaaaatacgaactttgagatgcactaaagttttgtttcagcagtggctcaaaaaatttcagaaattacttttgtaattatttgcaattaattgttcttttatcttacaattgtttaagcctgtgatctttcttctcccagctaagagttcttcaataaatttaagaaatacctggtcttggttttcattctataatatctcattaactgctctgtactgagtgggactgctatgacagaagaccacataagaggactgaagtgctagatcatggttttgagaacaagagaagttagaaatatttccaattggacactagattctacctacttatagataccccaaatgcagacatagtgacttaaaaggctggttgcccaacctgtttttgcaaagtagaata

SEQ ID NO: 8904 - DNA, 1183 bp, Homo sapiens
aaacagatgctatttaaattgatcctgtagcagaagattccatttcaatggaagcactccttctgcccaaccagactgtgtttgttttgtaaattcacacttggagcctaaactgtctttaagcttagcccctttataatcctatttttatgtagcacctatcaatgccatgattcttgacatctctctcatatgtgcacaaactttccataatctggtattttatgtaagattaatctgtgttgctgacattggtgtctacaggaccaaggactttccctaatactcttaactactcaactgtgccacacctcggtgaaattcagctgaggcctagctgaagttcttaaacaatccatacctgtttgatcctagcttagacctgggtggggtctccacaaagtttcctgcatgacagcccagcatgttcccagctcctgtcaggccctggcttcttgcttagtgctatgagtcccttgagcctggtggagggcttgagctgatgggcagttggcagggagaggaggagaatgaggacatgagcaaccaatcttcacaaagggagagccactgacgccttgacctgggaaaggttaagacgcatgaccagggagtagtacagggtcactgcaccgccgcctgtgtgcagcccaaagtgccctgatgcttattgactgccaggaacaccattatctacattacagtttattatgtgttctgggcatttcattccggtaaggtttgatgcaggatcattacataggagagtggatttaatcctgtttctgtagcaggcttgaaggacactgagggaatatttatgtaataagatgcaaagttgctatggaaagtactatagcaacctaacgtcttagcagagccaagcagccacttgtaacagcaatccaaatttacatttattttagtgtcattttatcgacactcttagtatctcattctgacaggatgttaaaatatgttttcagcttgcgtttgagcaaaattaacacagtgttgttggaatttaagtgcggtttgcacaacttctagaaaaaatcaggatattttttgaaggagtttagatgacagaatctgggcaactttgtaagctttttattgttgttgttctttcctaaacacaggagagaattcttcagtagaatttattcctgattttccgttt

SEQ ID NO: 8905 - DNA, 1165 bp, Homo sapiens
aataagggcatgaatgtccaagctaatatttcttttctgctattctggcaaatgtaaattccctgttcagttacaacaagcaaatatagattagccagcccttgtactctgtctctgtgacagatttatcctttataacctcagtcttccacaacgtgtgcacttttggtatagactcagcttgcaagaggcctaccgatctggaatgttcctgtgttaggaagaggagaaaggtaaataataatatagataaagataaataatacaacaccaaacaatcctctgcctccaaaatgtcttttgataaatgcaggaaaaatgactgctattgaaagtgtggctggggcccatggggtagccactctctgacctgggtatgtatttacaaaatgctctgtgcttggctttggggatacagtggcttagctagatagatactttcactgaggaagtccacatactattcagagtatggtcaggcttttttcaggatgatgatataggtactttgtgtgccttgctaataacactgccactttctaacacagctatgtgcccaggtatctgcatcaccacggactgggggcaccttagggccagggatcctgacttacctctatgcccccagcgtcttgcctagcaaacttgtacgtaattaatacatgttgaatgagcaaatatctcagaaggacctagggcagtatgccactctgcttctcagtttttccaactataaaaactggctgaccctaacatggagaatggcatagttctgctgagaaccatggattgcaagcatcgaggatagacacatacatagacactatctctctctctctcactcaccccccgccccgttctttttctccctctgtccctctcacctgtcacacttctgtatacttgttaaaacacagtaatacactgaatatattgaattctctttctggacaaggtgggcacttagcaccattgtagagtctcagaagccaccaaaataggaaaaaatgctgactataatttacatttgtgtattgattgcttgtttgtaaattgctggcacataaacgtccatcatacagtttggcactcataataacaacgtgaagtaaataggcaggttgcagcctcacatctgagatgaggaagctgaacttgacattca

SEQ ID NO: 8906 - DNA, 1192 bp, Homo sapiens
agataaaatgagctcaagtctttatttcttggtgctcttaaagctgtctccagaatgtcttcatagaagaaggaggtttgtgttctcatagccactccagcatgcagttccatttgggctgcctgtgagttcagtccctgttttcccccagttggcccagacatggatctcagggttgttttttttaaatttccaccaacctctctccaagttctgggtatgtgcattttactaagaaatgagtctagggctgggccagctgacatcaaagtcaaggtaaattcaatggaggaaagcaaaccggatgcaccattgttctttcgatagtgtagttagatcttttaattgtattttccctttctgggcaggctgactccattttacaaagactctgtgtcattgtgtgatgctgagttctcagagcagagtgggtgtttaataaattaggtaagaacaaggaggacgctcttcagtctggaagcaaccactcaaatatttgagaccttttgagaaagtttggggaatacgaagaacaacctcttttggtaaaccagggtttaaaatggcattttcttcttgaagctttcactttctcatgtgaaaatgtttcttattgttatcttggtgaagggaatagttttcactgtggaactctagtcacctcccatgggtcagtgggattttgctctctgtgtgcatatatatacatatatatatgtatttaaacgtttgcctgtaacttatctcttcctaccaccccagccacctaccagtattcttcgcaggctctttgtgctgcattcctgagtttgccttggagaaagcagttccaggatcttaggccataagtaaggacattgaatgtttttttcttttccagtgaggaatttctctgggtccagagcgtccccatatccttactgtggctcagtttccttcggtgaagagtggaattgtcaatattccgatggcttaatgccctgaagactctctgatggtcaattttcaggcagtttgtgtaggaaacatggcctggcaatggcctcaggaagcctggctgtgatttccaaagatgctgtgatcagatcgaacacggagataatttcactgctgatggaatagagaaaatatctttctaggaccagaatgggaaaggaacttgtgtcagaccactctaggtgatgggtcagat

SEQ ID NO: 8907 - DNA, 1947 bp, Homo sapiens
gaatatgtaaatagttagggagatccatgtaaaataatgtcttggaaactcaaaagagtccagaaaataccaaataatgagttaaaccttttctgtcttctttccaggatctagtgaaaagccatttgatgtatgcggtcagagaagaagtggaggtcctcaaagagcaaatcaaagaactaatagagaaaaattcccagctggagcaggagaacaatctgctgaagacactggccagtcctgagcagcttgcccagtttcaggcccagctgcagactggctccccccctgccaccacccagccacagggcaccacacagccccccgcccagccagcatcgcagggctcaggaccaaccgcatagctgcctatgcccccgcagaactggctgctgcgtgtgaactgaacagacggagaagatgtgctagggagaatctgcctccacagtcacccatttcattgctcgctgcgaaagagacgtgagactgacatatgccattatctcttttccagtattaaacactcatatgcttatggcttggagaaatttcttagttgggtgaattaaaggttaatccgagaattagcatggatataccgggacctcatgcagcttggcagatatctgagaaatggtttaattcatgctcaggagctgtgtgcctttccatcccttccggctccctacccctcacttccaagggttctctctcctgcttgcgcttagtgtcctacatggggttgtgaagcgatggagctcctcactggactcgcctctctcctctcctccccccaggaggaacttgaaaggagggtaaaaagactaaaatgagggggaacagagttcactgtacaaatttgacaactgtcaccaaaattcataaaaaacaatagtactgtgcctctttcttctcaaacaatggatgacacaaaactatgagagtgacaaaatggtgacaggtagctgggacctaggctatcttaccatgaaggttgttttgcttattgtatatttgtgtatgtagtgtaactattttgtacaatagaggactgtaactactatttaggttgtacagattgaaatttagttgtttcattggctgtctgaggaggtgtggacttttatatatagatctacataaaaactgctacatgacaaaaaccacacctaaagaaattttaagaatttggcacagttactcactttgtgtaatctgaaatctagctgctgaatacgctgaagtaaatccttgttcactgaagtctttcaattgagctggttgaatactttgaaaaatgctcagttctaactaatgaaatggatttcccagtaggggtttctgcatatcacctgtatagtagttatatgcatatgtttctgtgcatgttctctacacaattgtaaggtgtcactgtatttaactgttgcacttgtcaactttcaataaagcatataaatgttgataaacaagtgtttttcatatgaccctgttaacataatggcagtcatttccacaactgtttccaggtaaagttaacaatttgactagtaaaatcctgaagggcagtggaatgattggaaaagtaggggcgtgatttgactgcatgaagtaaaaggaaattgacacattgagttgttcagcaggtaagagaagagacagtggaggagtccagctcaattctaactactgtgtgacttggacaggttgcttcactcctggacggatgtaggggtttgaaagagatgatctcttacattcccctttggctttaaaattctaggagtccttgaaaatcttaattttttactgaactgagaggaagaaggagccttattctgtgtataattggaataagcagatctaggatcaaaagacggaagttggagaagctgatttccactttaagaaccctgtcaccctgggttgggatgtttctcctagtgt

SEQ ID NO: 8908 - DNA, 1259 bp, Homo sapiens
aagtagaagaaatatcttttgagatgtaagtagcttggtctgtcttctaaagtaatacatacctgttaaacttgaggtatttttttcatactgaaggcattctaaagtttggtactgtcacaaaacagtagtttacagagcagaagcacttagtattagaataagcctgtaggtgtgaaggaataagtgttgcaaaatagttatttatccaagctgtcaattaattgattgaagtagttatcaaaatgtttctgtttctttctttggtatctattaactggtcagtcaaaagctattaaagaatgtttttaaagtcacctaatgctgccagtttgttaaatttggtatacattttaagaatagacattctagagttattaatatggaagcagctaaaatgttttaggaaatctcaaaagttttagaagccacatttgctaaagcataacctgcacttagtctttcttggctatctgtatttttttctcattaattataaataaatttttgttaagtatagtatttaaaagtaagtttaaaggttcaatttgaactgaaatttccccagagagctttgaattcccataagtgattacagcttttactcccgacttgtttttagtaaatgttaataagacaattggtttacaaacacatataaattaaaaaaaacaactgtccatcgttttaggaagaactgaaggaactaaaaatgatatttgcttggaaattaagttagttgaactctttgaaccacagtagaaaccgctttgtgtggcctgtgagattataagctttttgtttcagctttgaagatgaaaagtgatttaatctcttaatctcatgctttgattgaattttagctctgttccttaaaatatgcaaaaggaaatgtaagtgcatttctagtcacctcatgccactacaagctatttatttaaaagtgaaactttttgtatattattgtgaactgatttgtttatttaaacttttattttggtgaatttacctttgagtttttttatattttatgtcacaaaatgaagtcctatatttttcagtgtttatgaatattaatataaactatttttttctagaatgactaattgtgtaatatctgtattatgtgataatttgaaatctaataaatattttctccatgaaaaaaatgcacttactgataatggcttatttctgtttcaggagtagaaagtgaaaactgcaacagtatttttaaatgtattttaattttctgtgtc

SEQ ID NO: 8909 - DNA, 1112 bp, Homo sapiens
tgccctagagtcagtgtgtcaagtccttactgtaaatccatgactttgaaatttgttgttttttccctttaaactgcagccagtgaatacaaatttacttgaaaatagagggtatggggttttgcctgttttgtaatcagtttgcttgttttagcactcagggctttttatttgttatttaattttttaattgtttttaagtcagaaagatctctgggttatctcatgtgctaaggaaaaactattttgctttttccaactttaatagttagtatttctaggggaggcaatcaagataagatatgccattaactgttagcattgtgaaatctgtaagactcaatctctgatctcaaccaaagctttctgagtcctggaactttgctttgggacaactttactttacccatttatatgctgtacttaacagtttgtagctaatttatggggtcatatcttttttttagctaatttacgggggtcatatcagtcatgaatagccttttttaaaaatttaataatccctgaatacaaaaatggaaatggaaaatttataatcataacccccctaattgggagtattataagtttgtaatgctttaagcactgcctcttaagatgataaatttataagatgagaaattctatttaaactattaaactattgttaaataaatgccaattctataagttatattttcttgcagattaatcccaattgttccactagtattctagttttgatgagacacaaatttttgttgttgtttatttttgtttttttgagagatggagtcttgctctgtcacccaggctggagtagagtggcgtgatctcagcttactgcaacctccgcctcctgggttcaagcgattctcctgcctcagtgtcccaagtagctgggactacaggcgtgcaccaccatgctcagctaatttttgtattttttagtagagatggggtttcactatatattgttccaggctggtctcgaactccagacctcaggtgatctacctgcctcggcctcccaaaatgctgggattacaggcatcagccaccatgcctggccaagacacaaatttttaatggaaaaatattctgattcccag

SEQ ID NO: 8910 - DNA, 1160 bp, Homo sapiens
actcaccttagaactgagaattctgaatacctgtcatatgcctgcttgatagaatattctcaaaaatgttgctcattttttttatatgctactgctcctgaaactactggtttcaatctgtgaactgagtcccatgaggccactgaactcaagggcagattacccttggtgtaccgtgtcacactgagtgaggaccagtaattttttcgtgtatttcatgtagtgttttttgtgttttttttgtttgtttgttttagcttttaagttgttggcattcaggactttcaactcctttaatgcacatgatcatatatttagtgcagttaccatgtcgcacatgtagaatcaaaaggcagtttattgaacctccttatagagaaatcttgctgagcttttaggatcataatttttatggcttgcatatgtgctttggcatatcatcttattttaagttttgtcccctgcatttataatctcatttgttaggggttttgtttttgttttaggtgtacctgaaggaaatcttaaaagaaattggtgttcagaatgtaaaagggatccacaaaaacacatgggagctgaagccagagtacagacactatcaaggagaagaaaagagtgactaagaagactcctagccagcatgctagtgaaacgactagcagcgatgctatgcaaaaggcgctgatactggaaggcttgaacaccgtatgttaataggggttaagtgacagtactttgatttctctcggtaaattttttaaacctgtaattcttgtaaagtttcttaactgtttttttgaggagaaagaacagatttatttatagacttaacttgtattaaaccagattattcacagtaggaataggggttggaggattaagagggtttttcttaaatattagcttttaatgtgtacaattaggaaatttttttaagtgaggactctctacccttgccgtatctaaggagctgaggtaatacagatccaaggagaattgtatagcaagaaaaaaacagtcaactacagaaactcttaaaaggaataaaaacccaaagttccttattttgaaattgtcaaagaacaaagcggtgtttttcttttaaacaggtgatcacgtttcgtgttcatactcaacgttaataaaaggagagagtt

SEQ ID NO: 8911 - DNA, 1141 bp, Homo sapiens
cgggggcggggtgcagtggggtagggttacctgttaattgctgagactcagatgaaagtccagctctccctgggcaaccctagagggcagcagaggaccccagagctcattcaggccttgctgcttgttctaaactacaccttaggattttttcttctttccaaaacattccattgattttataaagactttctatagagaggctttcacttttgagttctttgagtttaaagattgcttttcttgaaatgctctttttttaatgtagaaaaattttactttttcaaatatgcatacaatttttaaaacagtagaagcaaattcattttaatgaccatgtaaagagcgaatgtcagacagtattattaccagtttattcaaattacatacatgttcctaccaaggtggaaagaaattcaaacctcatggtaaaacttaagcacgatttaagataaaagcatagtatttcttcagtgtagacttattaagtgccttattgaacaggatcttaacctgctttttctgtttttttgaaagagttaatgcaattgttgaagcttctaaccaagaaacaacttaaggaattgggagacttggtcccctcgttgtcagggttctggctataagtacctccccacctttgggttttcttaaatatgccaaaaggaattctagtttttataaccaatgggtttttttgtttgtgtgcttatggatttgtgtaatcattgatgcttaatgttgtggattcataatataaaaagtggctcctgtcctttatatttattcatgtgctagaaatagtatgcattatataaagagtatgaagttttcataagcctttatatttcaagctctttatttaaacattgttggaatatgtggcataagccttgtttcatttatttaataaactggagtaatatataataataaaaatgatttctggttatttcagataaatagaaacattcaaacaaaggcaaactacatggagtctagaaggctggagtagaaatagtgttgcagctgcagacatttctctctgcatggagaagttgctgggataatcttactcattgcctggcacctgtgtgatccccctaccctccccccccccaacccccctccccatgtatga

SEQ ID NO: 8912 - DNA, 1522 bp, Homo sapiens
gattacaggcgtgagccaccgcgcccgtgaggcagttaattagacactgaagggcagagtgatgaagcaggaatgctggcttttgctgtcctcttgttgctcttcatcagctcctgcctcccaaggaaggatgcatagtggaagcctttgaggagagcttcccagggcttgctaactctctctctctctctctctctcaaaagcttacagtgctggaaagtttttccaccacagcaaagccacaaaagcttatcagcgtagatgccatctcagaagaggctgataccaggggatttacatatctcagctgtgatctttctgctccaagctgaccttggaagatagtttgatgtggttaagggtggaaccccttttatttaatcgtgtccatagcgtgggtctgcctgtacctatttgttattaagtgtgccatttgtaagtctgttgttatgcactggagttgtgaagatggcattttctgtgtcatccttaacccataaccacagttctttgtgacatacgagcagttgaagaaattggatttgtgacaagccaaggctgcatgagacatctttctgaaaatggtaacttctgaaacagcaaagcttcctgtgtttcactctgcttctcactgcttggctcatcacagattctgggatgtgagcaacagatgaagactgggttagttgagattgctgtgtgttggcattggatgctcttcatcaaacgtttaatggcataaactaacatccaaacactagtctttaccactgaagtgcccttcaacatcaaagataatatgtgaaatgcatgtttcttgctaaagaaaacttgcaagaaaatcaggagcgatgtattgttttattcagggagagtagctcctgatgcatctcagctcatgactgagaatcagactgctctagaaaagctcactggaaccatggaatggagcctccgagaaggtgttatggtttctgaatttctgggagattttgctccttgtcaactgaagaaatttcatgtatggagacctggactgttcaaccccaggtataaacggtgcaggaaatggatcctaggaatatcacactgctttatcatttcctattttggcaggatcttccacttataataagtgattttaagctttgaagacttgacatttgtgagaaattgttacaaagtaataatctctaaattcgtggtggtgttatgtgttggctttgaaggttgcaaggtctgtattggtggggggtgttttcaagcagcttaggttctgtcttaggtcatgttagtaattagctttatgatttttagcaaagcatatgtatttctcaatgagtaaaatggggataataacgtctattgatgtagagggtcaaatgaagaacaaatagtagctgctgctacttgactggaaaggtaaatgtgtttacatcatgctgtggaacagctctaaacagtctatgtagaagaggggcatgttctcatgggcttctcatggtaattgtgaatgaagccc

SEQ ID NO: 8913 - DNA, 1171 bp, Homo sapiens
ttaccagcaaacctaaggatgacaaacactatccacatctgaaaactaccacaccatatcagggatcataaattatgcatatctatgaattttccaacaaattcctacttcctgattggattggttttgccgctgatgttaaggcagccagcttcttagttcaaaaagaattctgagtttttcaaacactagtctagaggtggacattgtcaggggttctggaatgggaccaggggaccttttggtgcagtgggtgcctgtaactcattagacgtactgaggcagcacttctgcagggtgcataccctgattgttgtcatttgtaacaggtcacttccttttcactcagtttaaattggtgatggacgttgcttgattgagcttattactctctattttgagaaggtagaaggtaagagggcccatattcattctttgccatgaaatgaatgaattaggaagattgtatttacttaactgttttttaaatacatgtttaatgaaataaactgtaaaatatccagttttgtgtattatatgtacatttgatttttaatagcctttccaaagaaatgagggcatgattattgtacagtaagtacgtgactgatttaatttgatttacagagcggagtgtgttcttataaaaatatttaatgacattggttcttgtcttttgatcttttatttctgaaacactcaaacaccttacaaagtgctgagtaggtaatagtgacccaacttgtttgctaaatgattatttgtttaaatctgtacagttttaagtgttcacttatacaaagagtgtatatactttcaaataatttaaaatgctttatattatttggctagaaattgctgtttttaataaatgtgaattttttaaaaataaagatttttgcttcctaccttgtcctcacgtgtctgatacgtgtgtgcattccttgaggaaaatttctttaattaaaattttaattgagataacttgtgtcagactcacatgcagttttaagaaataatacagatagatcccatgtaccctttgcccagcttccccccaatggtagcatcttgcaaaactatagcacagtatcacagccaggatattgacattaatatactctatcaatcttactcagattttgccagttttacttgtactgtataaatt

SEQ ID NO: 8914 - DNA, 1137 bp, Homo sapiens
tctttggtttgacaagcattagtgacaaaggcagaaaagatttatcagccatgctaaaagagtgaagaattttgatctttagagacactagttttggccaacttaagattttacgttaatttttacatagtatttgacactcatgcaaaataatgtgaaaacatctagatttagtagtttattctgcgccttttgttaaaactgaagattttggaaaatggttgtcactgctcttccagcctatgaatatttttgtgaaatggaaccatggatttatgtctggatcatccatacagaaccaacaattttattcaaaaacaatgtgttcatcaaagtaattgctcacattgtgcagtactatgttgtacagaccacgtgaaagggaatgctggtctagctggcgtggtatgtttataggcgaatttcagcagaaggaagccaaaatagttttttccttttgaaagttttttaaaaattatttcatgggtcttttttttaattaatatgtgtgcattgttacaatgtatgttggatgtcttttgaccctaaatgctttttttgttatcagagattgtgtactatttttatttttaataaatgtatcttccctttccttgttttagatttactttgctcttcgttaatcttattcctgatgatctagaacattagtcatcaacattacatgtttcatgcttcagatattttactgcttgtgtccttattgttggacagctttaaacagagttgatgtacttcaaatatagctcattgatacttaaggcatcttcttggaatgtggcttttgaagaaaaaaattactcaaagcaaatcaagagttaacaaacctaacgtaacctgaggtttaatattctactatcatattttttagagctataacttttgattatattaaactgcctccagctgtactatgtaaaacagatttacttttaaaaattacagtatacctgctttgttctatatgtatatgtttaactcatgaagtggactcttagaaggatttgaaatggactctggccacagaatttgtgagcagacagtagtagtgataataataaaagaaggcaatcaaaatttaattttatcatgccctctcacaggtttgtgttataa

SEQ ID NO: 8915 - DNA, 1188 bp, Homo sapiens
tctctttggtagttggagttccaggagcgggatctataaacaggaaggagggtggtggaataggattggggccttagggtctatacagaactgacttggtttccggccatccggttccgctccctgggggagggtttgtgtcatagcaagcgcccaacatttcccagggcagtgggtgctccgttttggagccgctgcccagacctcttggctgtcatcgcctcatggcccagggtcagaccccctgggtcttggatgggttgactctcatcacaggagcacccagtttaatcttgtagtgggcaagggagcaggcagtgggtttttggaggctaggtttccagtgtcttttcccccttttaattcaataaacatttatctagagccttaatgaatatttagatacagttctgagttcactggaggcaaagatggctctccagggtcattaaactttgtaatttggatttagggatagtcaggaatcggcaaaaaagagggaatttccaaagttgagctgtcaacagctggggagtgtctttcaataagacctcttagttacatcttctcaagtggaacttattccaagaattgcctgaatcactgacttaaaaaactacattaaattttacttcccttctgctatagagtgtaccgtgagctagctatgctatggttggctatatctgcagaaaatagagctggcatgactaataataataggtttgtgtagttcagtaagggggcttcatagttgttctacttcagttatgctaaggattatttacaaagttaggtgaacttgatgtgtctgctgtgttggcatttctttgagaagaccagtgcttttagggatcacatcttttagctaagacctcgccatgtgaagtggatgctgaaagtgttcttgttggcttgtttatggcaagcttaagttgtgagttttgcaggtttttatttatgagctcacttgcacatgttttatgctcaggaaaatctaactggttaaaattcagaggctttatgttaattcctcatccaaaaatacagtattatttgggggaagaggagtggagggatattcatgtttgtagaaacttaagtcaaccccatcagaaaagtattcattgcagctagttattttacatgaaattagaatacccaaatgtattaaatatttgcttctgc

SEQ ID NO: 8916 - DNA, 1195 bp, Homo sapiens
gcaatggatgaaatgatgcctgtgtggtgctggttgctttggtccagctgagtttcctgcacacattgtcaggagagggcagttggcaccagcttcccgttgctattggttgtgcaggatgtgctctccatctgcctcctggctggccgagggctcagcttctaagtggcggtggcggggtggcggggtggcggggggactttgatggcattccttgtgttgaataaagttgtctctttgagaactgcccatacccttattttttattttttatttttttttaaaaaaagaaaaacatattttgttttcttacatacttgtcatttgagttgtcacacagaaaatatattggacttcttgtatttgtaaaatgtcttctcagatcactcctttttcctttcttgttaaaaacaggttcacagacagtatgaagtggcctttctgtttacatgtgttcttgttgtattgtctttgcagtcgaaatcagctgtccgccctgcctgcctgcctgtgtggtctgcctctcaaagtcttaatcgcaagtaacaacaaacttggatcattaccagaagagataggtcagctcaaacagttaatggagctggtatgttaccgatttttaagatgctcttttttgttggttgactgatcatagcctctcaaggtattcagaaaacctttttgctacggttggacaaggtagagcctctgttgtttgagggcaggtatatgataaagacattaagtggggagaggaacagctttgaaacttcactgtgacagacacagttcctggaatttaaaggcttcctgtaatttacagctcctgaagtttgcaggatttgccgtttttgaagtttatgggctatcatgttgtagttagtattttcagattgcatataaatttgtaaaaaattatggctaaactgccaaaataatctccaaataagttagtaggccacacttcatgaaggtataaaattaagtcagaagacagaaagaatggggtgctctgattctgtcgagattttagaaatcattgtcgcaaatcgttgtaattttaaaatgtgaccgtgtccctagggatagaaaaggagaacaagctatagatgagcagagatggattacaaatgtgtgtgaagctgagatgcactgttatatttcagctctttcactactaatttaattatttacc

SEQ ID NO: 8917 - DNA, 1356 bp, Homo sapiens
tgatttttattaatttggctaaatgtgtatttttttcctagtcttaaaaaaattggcacaatagcttatgcctgtaatcccaacactttgggaggctgaggtagcaggatagcttgagcccaggagttggagaccagcctggttaacatagtgagacctcatctctacaaaaactttaaaaagtactcaagcatggtggcacatacctgtaacccagttactcaggaggctgaggcaggaggattgcttgagcctaggtcagggcttcagtgatgtattcgtgccactgcactcaagcctgggtgacagaatgagaccctgtgtcaaaaaaagaagagaaaaaagtaaaattaaaaaaaatacttcaaattgttgcataaagggaaaagtaagaactagattaattacagatagagctgttcttatctatgcttctttttttctccagatgtccttgctccacagtatccatggcagtcaaatgacatgtcgatgaatatgttaccaccaaatcatagtagtgactttttgttggaacctcctgggcataataaagaaaatgaagatgatgtagagattatgtcaacggactcctcaagcagtagtagtgagtctgattgaaaaaccttaaaagacaatatacagaattgaatactgtagaattctgtttctttaacagtagcagggaaatgtaaactacaggtgacaaaaaatacccaggtaaacactggctttggtagaattgtgcagtcattaaaagtcaaaattttttgactttctttttaaagccaaagaccatagttttagttttaagccactaggtagatatttaggggaatagtcaaaatttactgttgaaaaagcagttgctatgtgctttcttaccctgttctgttccagttttgctggatttgtacatagccattctagaaatagagttgagggaaattatccatatacatatcactaataggcttcttggaattatttagaaaagcatttttaaactggcagtggatgactgaataggcatcatatttctttttgtgtgtcatttaaaagtaacaaaaactgccatttgacagtaaaggctcttggcttctgttggaggcatgggaaattgtctcaatttgtacagtttgtaattgtaatttttgtaaataaatttgtttgtacattgtatgctttttttttagtttaaatatactgtcagtgtaggtaggaaattatttctgtaaatccagttgcattttataatacttgagtgactaactgaattgaaacctattacaattaatagggttctcaaaggcctattcctattagaagaaataattttttttaataattgaaaaa

SEQ ID NO: 8918 - DNA, 1650 bp, Homo sapiens
attgcaagggatacaccaacatcagctggaccaaactccttcaataaaggaaagcatgggttttctgataaccagaagctatgggagtggaatataaaatctcatcttcgaaatgtctatgaccaagacaattaaatgatgttttgaaattggggtgtgggtgggtataaagttaaaaagaacagtttcctttttttaagaatggtataagactacctttggagccactttttttttctttttcatctttttaaaagattgagtggtacaccaataaatgagagtttgaaattagaggtaatttatgttttgtatacagatttcaagacatttgctaatttggtagttttgtgtgattagtttccaaagtttacagataataaagaaatcagaaatggtacctttttaagaattgcctatttttttagacacaactattagcacattaagagggaagcaaaaagttaattgtctatttaaaactgcaagcagttactctcttaactcccttattacctaaacttgtctggctcccaggaatagccttatagagagagggagtattgtattgggaggaaaatgttactgaactattgactgaaagtacatttagataaaattaaaatacagcttttttcttcatgggcatttgttttctttcaagtcatcataaactaggtgttgcattgctatcagtggatacagacgcttagctcttaaaataacttttttatatgtaaactgttgaatatttgaaatagcccacttcaccttaatgggtcttgtctatcttcattaatcttcaaagaaaaaccatttgctaccaaagtaaatcagtattttgaatgtgcttctcttgttttttgtttattagctagttcctgtaagcatttccaccagaacttgaagcgaatcataagaaaactgtttcttttaaaatacaaaccaccaccaaaaatttaaatgtacatattgcttaagtatttggctgcttttattttttaaaaggtataaacaccaaaaaaaaaaaatttaacattgtatgaagatggaaaacaagaagatgcactttctgtaactttgtccaaggatttaaattactaacttgtgaaatccaatttgaattgaacttaactactggctttcttactagtaaaattatatggtttattttaaatgtatacatattgaccaatggcctctcaaaaagcacattttagatactgaaatagaaggaaagaaaatgcatcttcaaacattttttggaatctcaccacacatactttgtgaatttgtgtattgtagggtgttttctttttgtatttttgtattgtatacgaactttttttttaatgtgacagttaaacacatctttaaaagcacagtcacagacaaaaaaaaatacagtataaaaatttccttgaaaactcctactacaatattgtatttggaggcagcttcagaccgttttattggtggtaactgctcgctgagctcttttagtcggtaataactcagagaagcaacctgtgtatattcctaactctttgttaactagtatttaagtttagaataagccccaggtaaaacaatggaaatgtatatagaactcttagttcttatatgatttaattatatcaagatacttga

SEQ ID NO: 8919 - DNA, 1751 bp, Homo sapiens
acatgaacacccttagaaaatgtgtcctatctatcttccaaatgcaatttgattgactgcccattcaccaaaattatcctgaactcttctgcaaaaatggatattattagaaattagaaaaaaattactaattttacacattagattttattttactattggaatctgatatactgtgtgcttgttttataaaattttgcttttaattaaataaaagctggaagcaaagtataaccatatgatactatcatactactgaaacagatttcatacctcagaatgtaaaagaacttactgattattttcttcatccaacttatgtttttaaatgaggattattgatagtactcttggtttttataccattcagatcactgaatttataaagtacccatctagtacttgaaaaagtaaagtgttctgccagatcttaggtatagaggaccctaacacagtatatcccaagtgcactttctaatgtttctgggtcctgaagaattaagatacaaattaattttactccataaacagactgttaattataggagccttaatttttttttcatagagatttgtctaattgcatctcaaaattattctgccctccttaatttgggaaggtttgtgttttctctggaatggtacatgtcttccatgtatcttttgaactggcaattgtctatttatcttttatttttttaagtcagtatggtctaacactggcatgttcaaagccacattatttctagtccaaaattacaagtaatcaagggtcattatgggttaggcattaatgtttctatctgattttgtgcaaaagcttcaaattaaaacagctgcattagaaaaagaggcgcttctcccctcccctacacctaaaggtgtatttaaactatcttgtgtgattaacttatttagagatgctgtaacttaaaataggggatatttaaggtagcttcagctagcttttaggaaaatcactttgtctaactcagaattatttttaaaaagaaatctggtcttgttagaaaacaaaattttattttgtgctcatttaagtttcaaacttactattttgacagttattttgataacaatgacactagaaaacttgactccatttcatcattgtttctgcatgaatatcatacaaatcagttagtttttaggtcaagggcttactatttctgggtcttttgctactaagttcacattagaattagtgccagaattttaggaacttcagagatcgtgtattgagatttcttaaataatgcttcagatattattgctttattgcttttttgtattggttaaaactgtacatttaaaattgctatgttactattttctacaattaatagtttgtctattttaaaataaattagttgttaagagtcttaatggtctgatgttgtgttctttgtattaagtacactaatgttctcttttctgtctaggagaagatagatagaagataactctcctagtatctcatccattcctagcctttaaggggctctatatgctagagatttccaaatttatttcttcagccctgatcttttcacagaggtcaaggcttttatagccaacagaactcttgattcctactcccctctacccaatgtctccaaatataaactaaaatcaaataaataaaaatcttttttttctaccctggtctttctccattttattaaacatttatcaagtcaaaaacttaggagctatctattaattcttgtctg

SEQ ID NO: 8920 - DNA, 1219 bp, Homo sapiens
accttcagcaataacaacagcaggaactgcacaattgaaaacttcaagagagaatttttcccaattgtatatctgataatatttttctggggagtcttgggaaatgggttgtccatatatgttttcctgcagccttataagaagtccacatctgtgaacgttttcatgctaaatctggccatttcagatctcctgttcataagcacgcttcccttcagggctgactattatcttagaggctccaattggatatttggagacctggcctgcaggattatgtcttattccttgtatgtcaacatgtacagcagtatttatttcctgaccgtgctgagtgttgtgcgtttcctggcaatggttcacccctttcggcttctgcatgtcaccagcatcaggagtgcctggatcctctgtgggatcatatggatccttatcatggcttcctcaataatgctcctggacagtggctctgagcagaacggcagtgtcacatcatgcttagagctgaatctctataaaattgctaagctgcagaccatgaactatattgccttggtggtgggctgcctgctgccatttttcacactcagcatctgttatctgctgatcattcgggttctgttaaaagtggaggtcccagaatcggggctgcgggtttctcacaggaaggcactgaccaccatcatcatcaccttgatcatcttcttcttgtgtttcctgccctatcacacactgaggaccgtccacttgacgacatggaaagtgggtttatgcaaagacagactgcataaagctttggttatcacactggccttggcagcagccaatgcctgcttcaatcctctgctctattactttgctggggagaattttaaggacagactaaagtctgcactcagaaaaggccatccacagaaggcaaagacaaagtgtgttttccctgttagtgtgtggttgagaaaggaaacaagagtataaggagctcttagatgagacctgttcttgtatccttgtgtccatcttcattcactcatagtctccaaatgactttgtatttacatcactcccaacaaatgttgattcttaatatttagttgaccattacttttgttaataagacctacttcaaaaattttattcagtgtattttcagttgttgagtcttaatgagggatacaggaggaaaaatccctactagagtcctgtgggctgaaatatc

SEQ ID NO: 8921 - DNA, 1136 bp, Homo sapiens
gcctcagcctcccaagtagctgggattacaggtgcccaccaccacgcccagctaatttttgtatttttagtagagacggggtttcaccatgttgtccagatggtctcgatctcttgagcttgtgatctgctcgcctcagcctcccagagtgctgtgattacaggcgtgagccactgtgcccagccccgagtggactaaatgttgataaataaaaaataaaatgacaaaacttttaaaagttaatttaaaaactcgttggagtagagaaggccttttaagtgagacatcaaacttagatgccatttaaaaaggaaggcaagcaatagactgggataaaatattcgacatgtaatagacaaaattaatattcaaggtatataaggtgtacctacaaatcaatatgaaaaagataacctgatagaaaatgggaaagaatgtaagcaggaaatttatagaggtagaaatataggtagcctgttaagttttgaaggaatactattgaaccgaatataaatagcttcatctttttaggagaaaagtttggcagtatctatccatttcaaatgtacgttctcctgagccagaagttttatttctatatgtctgtaatatagaaatgctatcattcattaatagagagtattgcatgattattccatgcagaggagaaaatgtatgatgggaaactggaagtaataagatcatcattagaacagttaaattatggtgtgcccttacactataatattagatacttatgaaaaaacatgaaatagacatagatgtacttcttaagatattttacatgaaagggcgagatacaatataatacatacacaaagacacaattcatacacacacaaaaaaaatacaatacacaaaagcagtgtatgtgatttcacttacataacaaccaatcccagaaaacctaacacacaggtaagcacagagaaaaagactggaagggtacaccacagttgttagctatagaaataggagttggattagggatcaggaaagagttaaaaacaatgtttgtatgtgtattttcaagtataagcaagtacagcctttgtgatataacaaacataacaacacatgcaaggctttgttatgattggtcctgattaggacca

SEQ ID NO: 8922 - DNA, 1222 bp, Homo sapiens
taggtaatgggtttataggtgcaccaaaccaccatggcacatgtataccgatgtaacaaacctgcacattctgcacatgtatcccacaacttaaagtaaaaattttttaaaaatttctctaagttaatttaaatcatttgtgcagcagttatggcaatttcacaaataggaagagttcacatattatacttaaaagaaaccaggcagtagaatttataagcagtgtgataagcattacctgtctttacttgccagttaagtttttatgaaaataattttattctgtgtacttcatagagtgtaagtttctaatagagcacacatctaggtttgtacatctcttttcaaattgttttcaataaatactgtttatggtgggtacattttaactaatacagcattgatcttttctaacacatttgcagaggaagatactcattactgttttagtgtgactcagaacacaaaaagtgctatttatgattggataaccagaccctgaattataagtagcttatatttcaaaagttaatttgtaactgcaatctgtaaaccccacctccataaatcaattaaattgattttatatgcggcagtgacccctttggtcaggaccaaaaaagcctatctaatttataatgtgcctgtaatactaacagtatcttagtgataggaactaactaccatgagaagatatttttaggcagggacacatttctctgcttcagtgggaaatggattcctttctctatatgacagattgtaagattggagactgttttaaaattattgggtagaggttttaaaaacacaggaaaggataaagggaaccagacagaaaataagaaggctctcccctctttatgtttttgactgtccaaaattacaagatggaatatgggtggaaggaatagtagtgagcaagggaactggggttgaagtctttgtaaaatcaacatgccttcactctgagcaagagaagacaagaaaagacttctggagttcattttcttccacttagccatcactagtttctgtcatatggcaagccccttcgtggactagctctggatctaggcaaaaagtgagattattaatagaagtggaggcaacagataacaaggagaaagagaaattaagggaagaaaatcatatgccagcgaagtggagagaaacatagatcattatagccctaaggccatcaagttaggaaagctgttct

SEQ ID NO: 8923 - DNA, 1179 bp, Homo sapiens
taaagaaactcaaaagcaatctagttttacatgtgctcaggtaaagagcatttttggccaaaagctatttaatcaacatcaagactaagacctttatccttttcttaatttaaaggttcctttgagtaatggaacagatgtcactgaatatcgactggagtggggaggagttgaaggaagtatgcagatatgttactgtgggcctggtctcagttatgaaataaaaggactttcaccagcaactacctattattgcagggtccaggtaaagatgatcagtaccttgtcacttaactctatccagagttttatatttcattggcattttcatggtcatgactttgttaactcggaggctctgttaatttgtaggctctgagtgttgtgggtgcaggccctttcagtgaagtagtagcctgtgtgactccaccatcagttcctggcattgtgacctgtcttcaagaaataagcgatgatgagatagaaaatccccattattcaccttctacatgccttgcaataagctgggaaaagccttgtgatcatggttcggaaatccttgcctacagcatagactttggagataaacaatccctaacagtgggaaaggttacaagctatattatcaacaatttgcaaccagatacaacatacaggtatactctaaaaattatgttgatttttgcctagaccagagagacgctttaaataaaacaatcataaccaaactttttttcttatgtggcacttagaatacgaattcaagccttgaatagccttggagctggtcctttcagccatatgataaaattaaaaactaagcctctccctcctgatccacctcgtctggaatgtgttgcctttagccaccagaaccttaagctgaaatggggagaaggaactccaaagacattgtcaaccgattctattcagtaccaccttcagatggaggataagaatggacggtaggtttttttaattgcttctttatatagtttcttaggtcttaagtatatacatttctgtaactattagaagtaggccaggtgtggtggctgacacctgtaatctcagcactttgggaggctgaggcaggcgaattgcttgagcccaggagtgcaagaccagcctgggcaagacagtgagaccttgtctctaaaaaaaatttattttaatgaa

SEQ ID NO: 8924 - DNA, 1169 bp, Homo sapiens
attgcatgtggttaatgttgcattagagcactttgcaattgcataattcattaatgttttgtgagcttgcatttgtgagttattggatgatcagactgaattttgtcaagtatcacattgtacatcttgcctagatgtcgatgactgcaagtaataatacagtttataatgaaactatctacaattcttgttttagcacatctgttatccgtaaaacacctgtaactagcttttttaatttattatttgaattttaggatagcgaatcactaatttttagttgctgaggttggcattttagtgattattaagcacttctgtcagtctttgaaaaaagaacgtattttttgtgctttgaagatctctgaagaatttcttttataatagaatgggcatgtattgtaacagttttatgtcaaatgatctgtgctgtagaaaaacattaacccttgttcaaaaaagaaatggataaacttggcctttctaagtggtaagaatgacctgtcactataatatactgtatgtttacattttatttaaatttaatctcttatgtatagggtgataaccttccccagaaacaacagtgattgcgattgttttctagaaacttctttaaagtgccacatttggcagtacaaatgagtctgagtgtaatagcccagagatttatatatagttgaatgtctaaaatggtaaaatgtgccactgtgtcaagttacagtggcttatgtttttcatagtaattcaaatgaacttcctatttttgatagtaaatgtcatttaatagtatacttgccatttgagcctcactgcaaaattagtgcagaggagaaaacaatttttaatgtaatcttgattttacctcatatactgtacattccaaaaactctaaactttttaaagattatagatacactaccaaacatatcaccttaaaattgtataaggctgaatgaacttcatacaaatgaaaaaaatctcataaaaatacataaactatgtagcaaaagtatctgtaaaatccatggaaaataaaagttgtatcattctttttgagatacgtttattgtattcatatatattcattatttgctacctgtttaagaaagtgaaatgttatggtctcccctcttccaatgagcttaaaacatttttcccaacagtat

SEQ ID NO: 8925 - DNA, 1176 bp, Homo sapiens
catttttagcccaacagaaattttctgtttaaagtatttaaaagtttttgacttgctaaccagtagcatggcacagagcacataagaaattaacaatcacttgttgagtacctgctatgtacagaatactcgaacatgttgaagggatggaaaagaaatatataacatggtttctgctctccaggatctataatttatttgggaagtaatatctgaatcaagtgaaataatttgttagttaagtaagatagtatttaattaattgcaaaaaacaaggacttccttgagattatagattagagaggtggttggccttcttggaatttagctttgacaagatcacactgcagtaggagtatctggtattatattttttgatagctcagtttactgtagaaaattgaatgaatattcattatacaaagtatgatagcaagcttcaaaaatacattgcaaagtgtcttttcagaatgttgaaactaaccattggtttgctcactctcgtagagaagttgtgatggaacaggtgccatgtactttgtaggatgtggttacaatgcttttcctgttggatctgagtatgctgacttcccacacatggatgacaagcagaaagacagagaaataaggaaattcagatacatcatacatgcggaacagaatgccttgacatttaggtatgaaatccttcttggtgtacttttctttaaaatgtagcaagggttggttgaaattaattttcttataattgtaatttatttcctttttcaaattccaagaaagtttcctttcagaagtataactttggtaaagcttggtcctcactgccagacctgaagctatgacctgacctgaggtcatcgcctcttcaggtcttcccaatttgttgagcatgtctttttttcccttgcctctctccaatatgaaactgctttaagtttatcctttgggatcttgctcagcctctcatatttctggatgttaaggctcctttgttttctaaatctggagcacgcatttattaatacagttacacgccacagaaagacattttgagcaacgatggactacatgcacaacgtgttcccataagattataacagagctgaaaaattcctgagtgaagtagccattgtaacatcacacgttaccttttttatgttcagatacgcaaat

SEQ ID NO: 8926 - DNA, 1165 bp, Homo sapiens
tttttttctgactttatatcaggttttataataaaagtcaggggaaatgtaagagtcatttaacaaactgtcttaatagtgaactcctagcatacatttatgcaggtaaagaaggtatcattatggtaccaattttgttattacttctacctgaatgcctatggagcaatacattagtgcgaagcaagataattaaagtgagtattgaaaaccataaatttatttctgcctagctctaggtgagctgcagcaaagaccaactaaaaaaaggtactaagcactgacatcagcaaagcagtgtgaaaaaattgctcaataactattgcttttatgcctgtgctttgagatgcacttaaggacactctaatttttttcacaacaccattcttactcacatttatattttgtttttcagtgagaagacgtgagctatattttgaatcaggtggctctgagattacagctttggttttgtgttttcctctagctgctaggggagctgatcctggaccgtcacaactttgccatcatgacaaagtatatcagcaagccggagaacctgaaactcatgatgaacctccttcgggataaaagtcccaacatccagtttgaagcctttcatgtttttaaggtaaaaagtacaagctctggaaacaatgttgtaggcaattttttttccagttccaaatggcaaactccctgctctttactctccttcatacttgaaagaaaatgaaataggcagtctttgtgttttgcatgatttagatgaaatttcagagttatcttaatgaatgcccattcataaaggtttgctgactaatccatacatctaaatatttttattttttcacggagaaaatgcatgatactctttcccaaaacttctaaaacaatcagtgattgagctagatcccaaaccctgagtgtcggccttgaatgctttgcttcctacaagcactgtctcttcgaactttaaatgacgccctgaagacacagtcgggtactactcacattattaatattattatttttttacaatgtattttgttatgatagaaaagtaacccctttagacaatagtggtttttttgttttttgttttttgttttgagatggagtctcactctgttgcccaggctggagtgcagtggtgcgatctcgg

SEQ ID NO: 8927 - DNA, 1169 bp, Homo sapiens
tgcactccagcctgggcaacataggaagaccccatctccgagaaaagttttaaaaatagatataatctttgtatggctgtagaacatcttaaaatgtgtatcttagagtctggcttattttaatattgtctaagaaggtagaaaataatcatagtttttttaaaatgaggaattgaactataaatttgagatactaatgaataatttattttaacagaacaacagaaaataaggaaattctctctcttgaagataaagttgtagactttagagaaaaagactcatcttcgaatttatcttaccaaagtcatgactgctctggtgcttgtctgatgaaaatgccactgaacttgaagggagaaaaccctctgcagctgccaatcaaatgtcacttccaaagacgacatgcaaagacaaactctcattcttcagcactccacgtgagttataaaaccccttgtggaaggagtctacgaaacgtggaggaagtttttcgttacctgcttgagacagagtgtaactttttatttacagataacttttctttcaatacctatgttcagttggctcggaattacccaaagcaaaaagaagttgtttctgatgtggatattagcaatggagtggaatcagtgcccatttctttctgtaatgaaattgacagtagaaagctcccacagtttaagtacagaaagactgtgtggcctcgagcatataatctaaccaacttttccagcatgtttactgattcctgtgactgctctgagggctgcatagacatgtgagtagaaaaacatggcgtttcaaaaaaatcttctgaatgtaaggacgcttgttaagaagtcttgctatgtattaatttgtctatctaaaacctgttcaagagttacagtaagactgggcgtggtggcccacgtgtgtaatcccagcacttttgggagaccgagtgggaggccagcttgagcaaaggagtttgagaacagcctgggcaacatggcaaaaccccatcttaacaaaaaatttaaaaattagctgggtatggtggtgtgcatctatagtcccagctactctggaggctggggtgggagatctgcttgagcccaggaggtcaaggatgcagtgagctgtgatcacacactgtaccagaggcctggacaacaaagcaagac

SEQ ID NO: 8928 - DNA, 1085 bp, Homo sapiens
tggtgttcctgaaaagatcctattaaaagacagtagtttatttgaactggttatggaaggtgactttgggatgtaagagtgttcaactgtgagtttcatcatgtgtgtccgttgagcttgcttttaagagcaatgttttgctttgctctctggtccatgaactcatttccatttgagtgagttcccttagtgaattttgtctcctgcttggaaagtctctcttctgaacctggagcctgaatacattttcagagccaaattacaagtgggtgaagacatgctacaactactatttttagcaatgtttttaaatttgtgtctattggggtgggaaggggagtgaggccctaaagataggaattcactgatagctgaaatagatacaagcctaggagccccagcccccttttcttgaccatatcacaagtgattgaagcccagtgaattagtcggttagaattcgttctacaacatgatagaacttttcttactagcttcagaaatgcacattgatttgtgctatgatgggtggtgtttgtaacaatcactgttctataggcttatgatctgagcaaaatgtgaacttcagtatgtttactattgctcttacttgaaaactttttttcaaaaaaagcacaaattaaagtagtaaattcatatccatagatagttcattcattcaacaaatatttaccaagttcctaatataagtgaaggaccacttctcatattagattactaagtcatttgtatgaatatgtgtggcagtgaagagaacaggtctttcaaaaagcatttgattattttttttaaatacactctcttatttttctacttgtttttttgttaatcatagcaggatatgacaactcttatttgaattgattttttcatctaatgtaataatggaagccaaagtattcatatttcttaagatagccctaaatgtactcttgaacttcttactggaacaatgtttgatactctagtatgtaagctgtatttatgtaatatttagaacgacatgttaataaacaaagtaacattaaaacaggcacatagagttgtttttttccttcaaaatc

SEQ ID NO: 8929 - DNA, 1266 bp, Homo sapiens
ttttctttcagagcctctgctctgtcacccaggctagagtgcagtggtgcgatctcggctcaccgcaacctctgcctcccaggctcaaacgattctcctgtctcagtctcctgagtagctgggattacaggcatccaccaccacgcccggctaatttttgtagttttactagagacggggtttccctatgttggccaggctggtctcgaactcctgacctcaagtgatccgcccgcctcggcctcccaaagtgctgggattacaggcgtgagccaccgtgcccggctgggattttctttttaatgtgccactttaggttgaccatatctcttcattacctttctgtttcttaaactaacccacatcttaattcttttctctgatgtcttgaacgtgacaaaacacattctgcagactaaagtggcattctgccttttacaacaatgtctttgagcataactagattatgtgataatcgtgcaggaaattctttcccttgtagatcttgcgtgtgtgtgtgtgtgcgcgcgcgtgtgtgttttgaagagtcgtactttgagttagaggaccattgcttttactgcgttgaataaatagtatgtgtttttctcacacctacctgtggtcacctttttgcctagttttaggtatctggcctctcaaatatcttttctgggggagggtgagagatttggggtaaagggctcagagagaagtaattcaatcaaagttgcctaaaaaagccatttttgtttttatttttgttgtgtgtccaggatttagaagaattctgctttaagttttgcatcaatcatttgacagaagttacacagactgcagcattttggcaaatggatggccctctgctaaaggaattcattgctaaagccagtaaatgtggagcctttaagaactgaagcgcaaggctgctgggttctgtgtgagtgctctggggcactgttgaggatgtgtccagtttgtgctctacgggtgatgtgattctgcaggtaaaagaccatcaggttgtttttttccacatctgggacacagttgtttgtgtaggaacataacaagggtgtacggcttttcttgagcccattttaaacaacccttgtttccagataagtgtattttaaatgtgacctttcgtaaatttgggctggaacatgtaaaagggtgaaagttagtcgtttttggtcttcttttcatttttgattagaggaacttctgaacttggaaaggggaagttggcagcaactctcctgg

SEQ ID NO: 8930 - DNA, 1101 bp, Homo sapiens
cctctactttcatttctaagtaagacaggaaacgaaccaaggtcctagcagctgtgctgcaggttggaacataaggtgccacaactaattggactaacaaacagcatattttagtttcaagtctttcttaatgtcagcatatgtgtttatttcgagacttaccttgctgtctttccacctctgccctgtcataagctggggatgtgtatgatttgtatctgtgtacgctctgcaattctattagtgtctaattacagctcacagttatttacctgttaagaacttgctgtggactccttttgtttttgcactgggttgagttcttaatctgagattcacagatctgttgagcctgtgaattaatgggctttggggagtctgaaagtttgtgtgcatttttttgaagaaccaaagcatcagactgtaagctcctcgtgagcaggaactgtctcattcgtctgtataccctatagtgcctggcacatattaggcacctgataaatgttgaactggatgaagatagtaccttaaaggaagcattaaggatgatcagtgagctgaaggcgggtatggttggtttcacagattcagagagaataaaaggtagagagcaatagccttggagtttcaaaatatctagctaagttgtgcatgtagaatgttacaattagcctatccttgcagatactttgtcatttgacaaagcagaatatctggtatcaaggagtttatcaaacacctgcaaagatctgcagctgtgtcctttgaggtataagaggacacacttcatcacacatagggatcaaagttgaccacgatgttttcaaaatgtatcttatttttgtttgaggctatattctgattataaatatttgataaggtcaaatgtagctgactttgtctgcagcccgacaacagatggaatgatgatcaaagtaaatcatttctaatagaaaatggggtatgatttttttcctgtccttcctgtgacaccctgaacctctttattagaaaagctgtttctttagattttatttccacccggtgatataattttaaattgggttagtgccttttctgtccatttggtgacggatgtta

SEQ ID NO: 8931 - DNA, 3085 bp, Homo sapiens
taaggatttttttcttgttttttacagattgatgaagatccctgcctcattcctgaagcaacacaaggaggtacctacaattttgatccaacagccaaccttcaaacaaaagaatttaatttttaaattcagttgagtgcagcatctttcccacattcaatatgaagcaccaccagatggctaccaaatgataagaacaacagcaacaaaaggctccaaaacacacatgcctctttgttttgatgcttctaaagcaagccatgtctcagtcactttgcagttgccaaaagtcactatcacatggactgtaaatgcatatgcatgatttcctaaactgttttagaactctccttaacaatctcaactaccctatttttccctgttccctggtgccacaggctgacaactgcagtctccagtttagaataaatattccatagtggtgacatgtcagctgcccactgatactcctttggaaaatggtgcgctgtggatcaagacactttggtatgatgcatatacaagttggaagactaaagaggtgcagtgtgatctgagcctccatcattgtcctccacaaacatattttcatattctttatgtggaagaatagattttaaagtacaagccaaatgattttcattggtggaactgacacaaaaaaagtaacttaaaaacaagaaacttggttattgaataaacagataagtttaaaaaaaaaaaaaaactacttcatctaccagtaattgatgtgtttattatctgcctcagaagccagggttggaggaagaactttagatatggatattaatgcttttgccattatacctaatttttgagaacagcaagccctatttgaccactctcttcagcctgtgtgttcctgctgttttgaagtaatcaaatgctgtgcatggtattttacctgagctgcaacctgttatggacttgaacttctgtttaagttgaaagcaagagtccctgagtataaaggaaaaacagcaaaacaaaaagcaaacaaaaaaaaactgcaaaagtctaaaatacccattggtgatgttttttaaaaaaatcttgctttcagctttcaggagttaatattctttgttttaatttgataattggatatggttgatttatattgggtttaaactgtggagctttcatgtttactgtaatttagtcttaaaatattttttacttagtaaccagtgcttttgataatgtggttggcaacaaaccagcaactatttagaagtgtcataagagttcattctttgagtattgggaaagttaattcagatcctactcaaaaagcatcttcacatattaaaagattcagacagggatctgtgtagaggagtaatttgcagttatttaacataaacctgatttgcagtgatctctaagtaattctgcaaaatccggtattactatgtcaagttattgcttttggtaaattgtctgacccagttattaatgaaagaatatggatttaaaaatttttaaactaaataatttgtgctgtcacagaaatggtattgttgctcttgtttactgggtataatttcccaatgcattgatgtgaagggatagaaaatctaaactaatttagttatccattggggggtgtatttactgtgatgaagatgagacagatgccatcagagctttgtgaatcagctggggtgttttcactgataaacaacacatagcaggtgtgcattcattacaaatatatgtatctgccaaggtggagccactttaaagagtgagttttgtcttgtatctaaagtggatacaagcgtatgtttaaactgcaagatttttacttgctagagaatctgttttaatatagtggtttggcctctgattatttataggttttataaattttagaatcaatttctctttaaggtggctcagatttttcaactcttgtgcacataaaattgagttgaagttcattgtgcctttttttctttatccaaattttgagttaaagcttcatatggtaactgcatcctgttcggacactatagtctaaatttttgaaactgtgtggtgttcgctaaaagtaggaataacaacgtaaaagctaattaaggtcacaaacttcggtgaaacccttaaaagtccaaatcttcttgatattgtgaaccgtaccccttccagtttagtttcttctggactttccttacttaactgacagttaccttttaaaatttgcacacattatgattaaaattgggcctctactgtgatgattcctatttcctctcatgttttaaagtgcaaactaacatttaagtgaacattagcatcaagtagtgcagacacttgtatgcatttccttgattcaatttgtgaccttaccagttttgaattggaattgcaccatttcgtagataaaggaaactaagtatattgctgcacttttaagttttcaaaacagtgtttaaaaattgcattgttatttttttttaaactcagtttaaaaagactaaaacgttctttcaaaagaggcatctaaatgtgttcctaattttgtatatgggcttaggttttgtaaccaataaaaaaagctgctatcaaatatgataaaacattgaaaacttatttctgaaaataacttgtttgttttctgtatggttaaatttaaatttggaattatttttttaaaaatcacaatggaggtaaatcatgaattactcttttactgtattttaatatctccttcacaccatattactgaactaaactggagtctgttcacctggcacagttaggccaaacattcatagcaaggttttgcagcaggaaaaaggagggcatttatctgcaggcagggcaccaaacaagaaaaatgaggcagctcacacttaagacccaacttccctcatggctttacaagcaagggtttttaaaggcaggggtgaatttcaggaaagcataaattacaggcagaattgtacatcagtacacaatggtttggcctagaaaggtgggctgtcttgaagccgagggtggcagggggtgacttataggtcataggtgaattcacagattttcttatttgcagttg

SEQ ID NO: 8932 - DNA, 1178 bp, Homo sapiens
ggtccacttttagtatataattgcctaattagcaatcatttttattttttgctcactccctggtctgaatctatctgtctattcagatattttttggtaggtttggaaaatggagaagtgagcctaattggtgcctaattgtctggtgtatcattcactttattcagtttgttctatcaatatgatttacccctcaaggttaacctagcaggttgctcagttattatctctcaaggtcacagtactagaaatacttggcttgcatctttcagatgccattcatgttatcaagctcaaattatagttggtcacaggattctaaagtctttatttgacttctcctttttgaactggctcaaatggaaaagtgtagttgcttttaaatgttaaaaataagtttaaactttatatttcccattggtttcccctattttgtcctttctttgtgtgcttgaaatattttatttttcagtttgtcctcatagggaatcaagtattttagctaggtgatgtcttgcaagtacgttccactttgttacaatctactatctgtatatactatttgtatcttaattcttttatgagatgttctgtaacatttttctcactttgacaaatgtttttagactgtacagtcaagatctggcgcttgggggtaagtggaatgatttgctaatattgagaatctgttgtatcaaacataataaactttttttgagatgtgctttgtagtttggtaattcttagattttactattggtttctttgcttagaatgagtttctaaatgtgaactacaaaaaccactctacttcaagcatgatcattagaagaaggttagggatgtccccaagcatcattttatcccttaaaactacagatagtttaggtttctgcctgaactaatctaagttagctttttcttcacatctcataaactaatggtgggaggacacaaagagctttatgaaaacatttttgatggcagataaggacggagtcataaagctgtatccatgcagatgtgttatgctgacattattgttattattgagatggagtttcactcttgttgcccaggctggtatgcaatggcgtgatctcggctcaccacaacctccgcctctggggttcaagtgattctcctgcctcagcctcccgagtagctgggattacagg

SEQ ID NO: 8933 - DNA, 1178 bp, Homo sapiens; identical to SEQ ID NO: 8932

SEQ ID NO: 8934 - DNA, 1104 bp, Homo sapiens
ttctcgtggggtgggggggggtgtaactctaacacctgatgacagcttgaagctgcgttctgtgttctttgcttgtgttttcaggtcatgtgcagcgggtacgtgctagtgatggccagagcatgctaatgccactgctcattctccttagctcttctggggcagggtcttagccacttacatgtccctggttcaggcagtgcagagggggctctgggggtcgggtcttcgtcatcctggctcgcctgctcttggctgcctcccaaactgccaggcgagctggtacttggtggaatgcctttcagctcacccccctgctctgaggccgggcatttcgcccttctgcagagctgtaaacattcactcatccatgcagacttcagcatggtctttgttactgctctcagggaaacctttgtgtaactgatagagatggcacagggctgagcgccctgacagctccactggagagtctcagaagccaccttctcccgggcctcttcacacccaagcctctcacgccatgctataggctttcttgggtgactgttatgcattcctttcacttgtgcacccacctgtggtgctggcctgtttgagttgccctcgagggcactgctgagatgtgaagacctgggcatgtgccaacagggagggcagtttctagcttattcttcctccaagacctggggccagaggaaagaaatgtaagtgggtgtccaagaaatgaagctgttggctggtggctgggaatgaagccagtcagaatgaggtgggagagccgtgcagaggggccaggcgggagctgccgtggccacacatggatggagaatggcagctggccactctgctgtgaaagggatacagtggagaggcgagcacacttctctgcagagcctgggctgatggtgcacacggaactcggatactggagctagtgctcatactctgtgtgaccttggcaggctacttcacctcctgtgcctcaatttcctggtttctaaaatggggacaatcatagcacctcccctttctatggtggttgtaaggattaaatgagttcatacatgtagaacatggagaaagcacccatgttagctaaca

SEQ ID NO: 8935 - DNA, 1210 bp, Homo sapiens
aaacgtatgtgtgcaggagcctccctgcacggcccaaggggcttcgttttcagtcttctgactgtcacctcgtggggttcagtagagaattcatgtgactagcgcctggccttgtgtggcttggaggaaatggtactgcccaaataggaggaaaacacagcctccctgagcctgcattctgcacgctgcccaggggcttcagaaaaggagtggccacagcaccccgaagggagcatctgtttacctggcagtggctctcagagcagcagaacgggttcagttttagactctgaagttggttgtgattgacagaaccctttgggagcaaactagtagagttggattaaattctgggtgaaacccttttctcccacacaaaatagttttagtgatttttttcattgtccattacttgccaggggcagttttagcagcacttttgatagattacgtctaatcctcccaaccaaccagcagggtagctattactgtccacattttacaggcaaggaaacaggctccaagaggctgaggactttgcccaggatgacatagccaatggacaagcagtgtctgtcagctgtgaaggcttcactcttattgtccttctaccttgaatagaagttttcctgataagaataaacgaggaaaaggtccttgcctcctggaagaacaaatctaccaggtgatctattcattgtttcaactcagaatgcacttgattcaggaggtcatctgaccttcaccttggatggttagtttcactttttacatatagtttttgcagggttttattttataaaatccaagcgcgctgttgattgtgttttccttgttttcagcccccccactccagcccgcagcacatttccgctgtccgtcagtaattgtgtcctctctttatgcttgcttggggaatgttgttttctgactaggctgatcattatctaaagaatctaattctgttgatttttaaaacttttaggaccataaacgttgtgttcatatatggacatggaaatatttatataattttatagaaaataaccttttagatggtcaaagtgtaaggagtttttttgtcagataatcatttctacttcaaaaacatttcatgcaatattagaataaagttcctgtcattcctctaaaaatctgcctgtgagtgagatgcgtggtcagaggccagtgccgtcttgtcttcacgagg

SEQ ID NO: 8936 - DNA, 1215 bp, Homo sapiens
ggatttgaagctgccatcaagagcaaagtggctcccttaagcctgggaccaattgatattgagcggttacaaagcactaacccaaagagacctttatcttctgctaaccagaattttaataattctgagaccttggggcaccaaggaagccatgtggtcaccctccaactgagaatagatggaatgcattgtaagtcttgcgtcttgaatattgaagaaaatattggccagctcctaggggttcaaagtattcaagtgtccttggagaacaaaactgcccaagtaaagtatgacccttcttgtaccagcccagtggctctgcagagggctatcgaggcacttccacctgggaattttaaagtttctcttcctgatggagccgaagggagtgggacagatcacaggtcttccagttctcattcccctggctccccaccgagaaaccaggtccagggcacatgcagtaccactctgattgccattgccggcatgacctgtgcatcctgtgtccattccattgaaggcatgatctcccaactggaaggggtgcagcaaatatcggtgtctttggccgaagggactgcaacagttctttataatccctctgtaattagcccagaagaactcagagctgctatagaagacatgggatttgaggcttcagtcgtttctggtacgtagtgtgtttgaggcatgtcctgagcttgtctccttttctctttgtgtcttatagctcctggatggtggtataggtgagccctgctccctgcctcccatgtcaacagtggaacaaaatcctgcaaactttccttgcatgttaaatttgttaagatagaggaaatataatctccaagtgtctagattttgcttttcatgtagttgggattttgtattagtctgttttgtgttgcttataacagaatggctgaatttgggtaatttataaagatatggaatttgtttcttatagttactgagaagtctaaggttgagggccacatctggtgagagccttctgccagtggggactccggtgccacagggcatcacatggcaggggtgctgagcatgctcacgtggttgcttaggtggctcttcctctttttagaaagcctcgatgccacacctgtgataacccattaatccatgagtggattccattcatgagggtagaaccctcatgatccagtcacttcttaaagccctcacctttta

SEQ ID NO: 8937 - DNA, 1140 bp, Homo sapiens
cttgattttaacctaatatattcttttttttgtttttgtttttgtttttttgagacggagtttcacacttgttgcccaggcaggagtgcagtgatgcagtctcggctctcagtctctcagggtaggtagcaggcttttttttttttttttttttgagatggagtctcactctgtcacccaggctggagttcggtggcatgatcacggctcactgcaacctccgcctcctgggttcaagcgattctcctgcctcagcctcctgagtagctgggattacaggtgcgtgccaccgtgtctggctaatttttgtaacttaatatattcttaaccattacattctattttaggtatcctgaagcagtttatgttgtttataccggcgatgttaatgtcaacggtcaacagatactagaaggtgctttcagaagatttaacatcagattaattcacccagtgcagtttgtttttttaaggaaacgctatcttgtggaagattcactgtatcctcacttcacactgctgggccaaagtctaggatccatttttcttggctgggaagctctaatgcagtgtgttcctgatgtttacattgattcaatgggatacgcttttacgcttcctctgtttaagtatatagggggttgccaagttggaagctatgttcattatcctactatcagcaccgacatgctctctgtagtgaagaatcaaaatattggatttaataatgcagccttcattaccaggaatccttttctcagcaaagtaaagctcatctactactatttatttgcttttatttatggacttgttggttcttgcagtgatgtagtcatggtcaattcttcttggacactaaaccatattctctcactatggaaagttgggaattgcactaacattgtttatccaccttgtgatgtgcagacatttctggacattcccttacatgagaaaaagatgaccccaggacatttgctggtttctgttggccagtttaggccggaaaagaatcatccattgcagatcagagcctttgctaaattgctgaataagaagatggttgagtcacctccttcgcttaaacttgtcctcattggaggttgtcgtaacaaagatgatgaacttagggtaaaccaa

SEQ ID NO: 8938 - DNA, 1140 bp, Homo sapiens; identical to SEQ ID NO: 8937

SEQ ID NO: 8939 - DNA, 1349 bp, Homo sapiens
cattcatcaatgtggccagcttatctactcccaattatgttgttgatacatctccaagccatctgtcatcagatcaaaaagcagcaaacagagggtcagtcacaggatgttctgacacaccattgtaactttttgttagagatgatcccatttagaaaaagactggtagaaattggagtgaaaggaaccctacagattagcccagttctctcttattttcagctttacagacaagaacaatttaaatctaaagaatttagtagattccttcagtgtcacaaagctgtttcatgaaagaatcaagattataacctggatattctgactcctggcccagtgctttttcttactttgtagctacactttgaagtaagattcaaactgttatccactcaattgccttattcctgaggatgtagtgaaggaagaaaaagttttctggaattccgtaaattatattttaagcttatttcttcaaaattattttcatatatcacagatatatcattggaagatataatttgcatatatgttcattatcagtgttcctaatttggtattacatgtattctatttttttctgaatgatagcatgaaaagtgtcaaagtggtttgtccgctagcgtctgtctgcagaactttcaggatgactattaattcctctcagatgtcatttttgagtggtccaagcctgctgttttgaacccacagcagtggagatttgtattcttatttacagttgtgtactataaagtgtgtgttacataggttttgtgtaataattatttgtaaatattatttagatttgtatttagacatgatttatatctaatatagatacaaagtctgtgtctaaatattatttaaagaagtgatttttcattctcttggattctttccagtgtggtgccttttatatgcctcacatagtctccttgttctcctactaatattcccaagctccatatgccaattaaagaagaaacaaaaataaaagtttgtcttgcttgtgaaacattaagaagaggctgtcaggtttaataaactttttaatgaatatttcagacataacaaaaaactgcagagcttcgtacacttgatttaaataattcttgagggattttataaggtcatcttatagacaaaattaagagacaccagtgtggttatcaatgctttcagaatacttgtgtttatgtaaatataccccagagtccaaaactctgatatattcatatatattcacaatgagaggatgtctgtgccaaatctgtcaatcagtacaatagaaaagttaattatataactacaacacgaaacacaaatttttagaagcaaattatgtcctg

SEQ ID NO: 8940 - DNA, 1131 bp, Homo sapiens
ttcccctggtgggagaaaagtgcctttctgaaggtggaatggcctgtctttcacgttgacttgaataggagtgccaaggcagcagaaggcaccttccaagtgggcctatttaccagtcaaccactgtgcccgtttcctgtggacaagcccaacatcgtagtggatgtcatcttcaccaacagtcttcctgaggcaagaagaaattcaagacagccgctggaaataagaaccagcaaaaggacagaacttgctcaaggtcagtgggttgagtttggctgtgcacccttggggccagaagcctatgtcaccgtggtgctgaagctgcttgggcgagactcagtcattacctccacaggacccattgacctggcccagaaatttggatacaaactggtgatggtgccagaactcacatgtgagtccggggtagaggtgacagtgctgcctccaccatgcaccttcgtccaaggagtggtcactgtcttcaaggaggcccccagataccctgggaagaggaccattcacttggctgaaaacagcctgcccctgggagagaggaggacaatttttaactgtactttgtttgacatggggaagaataagtactgctttgactttggcatttcaagcagaagccatttttctgcaaaggaggagtgcatgctaattcagagaaatacaggtttgtattgagatttttttaacattttaaatcaaatccttcatgtaatcaaaattatttagaatttaggtgaaatttaggtgaattgtaccatcatttttatggttcatgccttataatgtaccaattggcattatcacccttagctgaaaaattaagagtactggtaaacctacttaacctctttacatctcatttccccatcagtaaaataggggcaatacaagtacatacttcagagtcgtggagattgaacgaaatcaacatgtaacactctcaggatagtgcctggcatttaggaagtgctgaataaacattatattagatttttaaaatcccattattaaatcatatggtaagttaatggcagagattattggaattcaaagccaaatcccaaattagcaacttctgtcctcctctagctgagcatgtctcttctcttaagt

SEQ ID NO: 8941 - DNA, 2532 bp, Homo sapiens
tctttggattttagtaggacattcagtaaattatttcttgcatatactggtatacattctgcctaccattagaacccagagtgtgtttaaattagtgtcctaaattaattacattttttttctgctgtgtgtttctattaggtttcagaaaagggatccctaacatcagaagagtttgctaagcttgtgggaatgtctgtcctcctagccaaagaaaggtaagtaaggttcttacctttcattacaatgtatgtttgtgtgtctgcatgaacagataattgtgtgggggtttttttgttgtttttttttaggttgctgcttgcagagaagatgggccatctttgccgtgatgactcagtggaaggcctgcgtttttacccaaatttatttatgacacagagctaagggttttgtatttaaaatcctttttgtccatatgcttgcgtcatgtagaggttgtatgacattgagctaagagataaaccccgatcaattgagaatttattggaacttcacagtgcaatgtaaatctcttttaatttctcactaaatatggtccaggaaatttatttagtatacgcataggaaaattcagaaaagtgaatgccaatatgaatttaaaatcatgctatagtgcagaaccctcagagtttaacttggaatatagtggattttaacttgatcctcaaatctaatcattttataaagaagggaatttagttttgcagagaataaaaagagaagttgcatgttcagacaggttagattattattttggtgtaactgaaattcactgattgcacatgacaatgttgggacaaaatatactgcagcatgctatatgaggctcctccccagggcttttagaagcagtcatagacatgtcttcaacataccaaataaaatacctttaaaaatgaaataattttatttgacacatatatttatatatattctatctagtttctctttgtttttttaagtgatgatttcatgactggcatttaaagaatgcaactgtgtcattttgtttccaaatgctgtggattttgaaactgaactagagagctgtatagacatgcccagagttatgattacaaatttaggaggtagacggctcaggaattccctgggattgttgtgctggtggaatggcagagggaacttcacaggaaccttagtgttcttttacctcaaagccacagacaggaaatagaaagtggaaaagtaatatctccttttcttttccataaggagtttcaacactgaactttaaaaagtctatcatattccagcaatattttttctttgtcctttatgttgtaagttgtgtggaaaaactacttcggtaagaaatgttactgagataacaacaactggctaatactgcatgtagattgcttaggttttaaagtgactgcctgacttcacatgttattgctacagcctccagtatgttcgcattatctcaaactcagggaccccacaggacaggagacaccctttctgaaactgagttggaagtgaaagggtggtgatggttttggccaagcctgcgggagggaaagtattgtattgggagcacccttgggaccaggaagagggatgcccaggttcacactctgggacccctaagacattgtcagtgggtaaggtggagggccactgccagaggctgctgcagtgccctctgggaagtgccagggaccctcagctgcagacccaggggatcccaatcccttatctctgcctgaaaagtggctattgctgcttcgtatcctccagtgtcacaggaatgctgtgcctgagacatcccactttagtttttgttttccaaacctgtcactgactcttcattgtggtgacagatcctctggttcccccattgctcagcctcaggtttattttgagggtaactcagtgtctgactgcccaagtcttttaggggttagttggaccattgtgtaagcttgtttgtatgtctcacctctttctggttggtacttactgtctcacactgctctggcaaacttgtacacacacacacactctctctctctctcacctggctaaggcttttaaaattatgaagataaataatctgtttcaccagctggagtgagttgcaaggaagattgctggagctactcaatctagcgctaatggtttggattcattactgcaaacctacataatttaacatatttgtttactttagtgtgacaactgatgaaaaaaaatggagcaatctgaattgtataaaataacttaagaaggaagaaaagtgatatataaatatattttgcaaatgtcacattaatttaaaaatgagtatgattgattttatttttaaagtgggcattcttcactgtttcgagacctttgtatgtatttgtgtatttttatctttttttttcaggccattattataaggtgttattttggccctctaatgtagaagttatgtttaaatacaaccaatcaggccctaagtgcaaaaaagttctgtcttggtgcttatcactggtataa

SEQ ID NO: 8942 - DNA, 1359 bp, Homo sapiens
ttaaacaaatagaatgtcattagaacatttcacctcttaaatactgtatttactttccctaactattgccattttgaaaaagaaaacttttatttgaatttactttaatctgtgtgttattaataacagtaggttttggctttcaggaattagccagttctacagatactcaggtatctactgtatacaagttgtaatgacaaattgagaaaaggataagtttctcacttcggtgagcttatagtacctctctaaaagacaattaaatgcttttacctgcttataacatacaagctatatagtatggtacatatcatgaaagtacagagtaaaaatgttaacatgtttttgaactctggaatattgttttaattttcagtgtgaaaaaaaaggtgcagtttgatggaacaaattccgcatttaaagagctgaagtttttaacaccagtgagacgttctcgacgtcttcaagagaaaacttctaaattgccagatatgttaaaagatcattatccttgtgtgtcttcattggaacagctaacggagttgggaagagaaactgatgcttttgtatgccgccctaatgcagcactgtgccgggtgtactatgaggctgatacaacataagagaaataaagctctgttagggaatggggtttttattatttgtggggtgttttgttttgagtagctttatattgctcttaggtctggagttggccatgtacctatgtatcctaagcattcacggcagtgagctcctttactaacattcatgttatggcaagagttgtcctctacattggaaagctaatcctaccttgtcagtttcaaccaactgagttttttctttaagaaaggtaaattttgtcagctagtttactatgttccttgaatataaacaggttataatactaccctgttcactttactaaatataagtacagtaatgatgcataattagaaaatgaggtattctaggtaaaatgtatgtttgccttgacatgtttttaaaagttatgatgtacctccctgcctttaaacagaatacttttttcttttttttggcctttctcagattagtcaaaaattctatagaatgactcacttcgaatactaagacacaggaggtttagcctgctttcttaccaaattcatgttacccagacttgtgttctcttgcgtcccttggactgcctgttgattgatggaaagtgtctgcactgacacttttcgtcagtagtctgtagtttcgtggcctcttttgattataactggggtcaccaagaaggtttacttaattaaataccgcatttctaagagaagatactttgtgtaagaaaagatgccacatttagtg

SEQ ID NO: 8943 - DNA, 1730 bp, Homo sapiens
ttggttatcatggtgataagttttatgtttcttttttccttactgtagaaaatcagaaagtgcagttgacagaagggtcacgttcacactacaatatcaattgcaactcaacaaggactccagtcgccaaggagcttaattataatctagacactcatacgtctactgggaggatcaaggcagctgagaagaaggaagcgtgtaatgtagaaagcaacagaaaaaaggaaacggaacttcttggctctttttctaaaaatgaatcagttcccgaagttgaagccctgctggcaagattacgagctttataagttaaactggtttttaaaaaaaatgattaagccaaatataaagccatgctctaaactataacacttgaaaaaattgcttttatgtaagtgactttatatagttttaaattatgatatatattagaaaaataaagctaaatatatgattgcaatgctttttctatgtactggaggttttggtttattcaagattgtaccgggctttaatccttttttttttttttttgtctcctggtattcctcagttctttatttggtggttaaattatacatattgctttagagagcaggtaggtggccatgtgttcagcagtgtgtccttaagaaaataccatctttctaagccactggaatttttactttactatttttaacattaatggatgtcaggtcatcaacctcaagtctttacatatccatgtatattccatatatattgtttatataggcccaagtttctccttaattgggatctatatactaccagcacaacatcaaaaacatgtaattgaatacatcagagctatatatgtaaggaaatgactggtgaccccattatcatcattgttgaattcatgttaagtagaccctctaggggaccataaggcaattgagcacataacgaaaaatgatgcaataagaatgtatgcactctctttgccaaatgcatgtgcttttgtgtaacgtggatgtaaacagaattgcagtgctgccgaaattcttgatcttggctaagagagtatttttccccttgtaattatgactctgagataaaattgccattttgaaatttccaaagtaacaactttttttattttatgaataaacttgggattgcaatttctctgatctgacaatcaataactttaacaaagatctaaataagtgtttcaaggaaagttttcctaagcaaatgtaatattacctcatttgggcatcattactctgttaattctatatcaaaggaaataaacttgctacttgcactaaatgaaaaaaaatgctttcttttgtctctctttttttgaaaacattctgtggataagctgagaatagactgtgctatgcagtctgtctaagcatctattttgctttattacatgtaataagtaagtgactgttcttttaccttcagttaaaaagcagttatatggaactagtcgggcaaggtctattgctttttatttccttaagttgccacctcctttcagctctaagttaataaagttaattaattagaactatgagccaggccctgtttatagacattggagaacagagtattctctgtagccagtgtaggaataaatgtgaatttgtatgtattgctgaaatgtgcattttgccatccagttgcaattcctgtttttctgaaaacaaaccttaaaaatcaagaaaggtgaaggacatttacatatt

SEQ ID NO: 8944 - DNA, 1147 bp, Homo sapiens
cactgccccattgaaagacatgataaggaaaaaaacattaatgtaaaaagagacccatttctatttctttgaagttttttaatatctataaagagaaaagataatttatatgaaaaggctttatagatgagtatattttattattattcttgatttctaacatctaatttctactccattcaccaggacctcttcatcaacaatcttatacacttttatttttaatgtgtttgtatttacatctttgttcctaaggctaatgttttattatattgcattttaacactcaattactcatttttcttaaatgtctagttaggacagttaaaccatcagttgaaaactaaaatgttgagacggaatagccccacagatcacttcccttatgagggaagggtcactacatcagccatctgagcccctcttggccaggcattgaggagtgagactctcaggctggatctatggctaagtacaaatggaagaaatatgtaaaggattgggggattcttgagttggttaactggaccagggtgctcaattatcccatgaaaataaggtcctgaggtagatataaggaggtgtacattgtatggaacataggataggaaagtcagataagagcaggcaaatagacctagccattgtctgggaccgatggctgccctttcccaaagtgttatactcagattaactggttctatctgtgaataacacattcacacaaattcagcattatttgattcagtgatccttgttttattgtatgtgcattccagagaatacatgagttacatataaaagatgacatatgtaggtccagacacacaaaaacacacatggacacacagacatatgaacatatgaattatatggaaatagaaataagtggttttatataaaatgctttctataaatttggctatatgaaataatacatgcaaatctatacagttctagaataatatacttgtaaagtgaaattttaattcatagaatggaataggctttttatattctgttaaatatggcagctatgttttcaagagaaatatttccccaccaagttaataatcaggttggaattttaataagtaattataaatttttagcagaggaaagacattggtcatcaaagcatatgatg

SEQ ID NO: 8945 - DNA, 1158 bp, Homo sapiens
ggcagatcatgaggtcaggagatggagaccgttctggctaatatggtgaaagcccatctctactaaaaatacaaaaaattagccgggcgtggtggcaggcgcctgtagtcccagctacccgggaggctgaggcaggaggatggcgtaaacctggaaggcagggcttgcagtgagtagagatctcaccactgcactccagcctgggcgacagagcgagattctgtctcaaaaaaaacaaaaaacaaaaaacaaaaactactctctcccatacctggttgactttagaatagaagatgatgccttgaaaatagctcatctctacaaaggaaatgtgatttataactcaagactcaaacatgactagaaccacattccatttaaggtaattgtgctgttggactataaaagcagtgctctgaagtgaatccgtggaactcggtccctttagtgcacagtaacataggcactaatgaggcagttttcattaaaagatagttgatttaatgagagagttaaagtcctgtcctattttgaaattgctagcttagtcctggcatctgatcttttttctccctaccatcaccatcaccagtttttgtatatgctttgacattgctatggtaaccctgagggctgatggaattccctgcatctcttttcacagagggtgatgagacaggagtgatggataatctgctggaggccttgcagtccggggctgccttccgcgacagaagaaaaaggacaccgatgccaaaaggtgaaccctatacttgtttcatgttactttctagggagctatcacagagaaagaatcctgtttttctcattcttttgaagttgtgtgtcaagaatgcagtgccgtgggcaacaactgttcagaagtttcataagtttgcttaatcccttgcacagacaaatgtcagagagatatgcattccagttggccgatgtcagtagcacattaacaaatcaatgcactgaacctagaaaatcctaattagtgtgacaagtctcatctaaagaaccatatgtaccttatcccagtggagtttacagtagcataattaaatgggaagtaaaagtcataacattactgcttcaagtatttcaggatattgaagcattactttgctgccagaaatacataaccttgga

SEQ ID NO: 8946 - DNA, 1214 bp, Homo sapiens
aaaacaaaccctctttagacttttctgaatgtgttttaaacatgacccagtatattgcagtattgaacaaaaattattcaaaataatgacatgaatgccttgtaatttgtggcctatgtatcttgttacctttttagaatttagtttaaaaaatgcttactttattgcttaattaaacattatcatttaattaaagctttcttttcattgagcatctaaattgttaatttgggttttgagggatgactctggattccttacaaaaacaagcagggcttttctctcttcctgctatcagttttaggagacatatttcttctttggtactgtcataccaataaatcatcccagattacttgcagtcgtacagtactaaactataccatgcattttaaaggaaatctgctgttttcttttcaatcagatgagcaatgtgaagagactacggccacggctcagtgctattctctttaagcttcagtttgaagagcaggtgaacaacatcaaacctgacatcatggctgtcagtactgcctgcgaagagataaagaagagcaaaagctttagcaagttgctggaacttgtattgctaatgggaaactacatgaatgctggctcccggaatgctcaaaccttcggatttaaccttagctctctctgtaaagtgagtttgtttttttaaaaacacatatttgcctgaacacttgctcttaaatgtcagccctgattgcattatttaaatatttttttattttgatgtgctcattatcaagaacttgaactgaaccatgaactcaaacccagagtgaactgagctaatttactcaacctctgaactaaatccaaatattaattttcttcaatctgcaaatccaattcaaggattttatttaataacaaaattatatcataaacctatgctttctcaaaccaatgaaatggaacgtcaaaatattattaatactgactcgtacttactcagttcagatacctgtatatatattgaatattgcttaggattgccattaacatttttacctttaactatttaaatatttctctgcattgctttcataagcagactgaaaggagagaaaaatgggacccctttatataaaggggaaattattatattggaaatatatgcaactcggatattattgattttgaagtgtttctatctaaatataattctagaggacatgaaaatggag

SEQ ID NO: 8947 - DNA, 1190 bp, Homo sapiens
attttgagaaagggtccacttctttgactgtcaatggggtctttggcaaaaaaggttaagaattaatttagactctctaatttgtgcagtggtgagagtgaagtaacatcaaagacctgggcctgagcctcagcttaactgctgcctatttaaatttatattgcctttttttcttttttttaattcaaagaaccaatacatgtaatgaaatatttcatccaacttagaataatgttttaaggcagtttcaacatcagactgtccatttttgaatctcactttagcagactactctgatgcatttattaataaaagtatacttaggtcaaatctggacaaaatatgaaactcattaattagataataataaaacaacatattattgatgtattttttactagtcaaatgtttgcttatgttactttatttgctcccagaaacatttatgtgaaagaatcaaggcagatattgtatacatttatatataagaaagttacattcttcggtgaatttcagctaaaagaagcagcccctctgaatggaatacagatccgagtctaaagccattgctctttgtgctatgccatgctgcttctctgattaaaagaaatcctattatgttttatttaaagtgctctgcattgatttaaaataattttcctctcatcttctgccaccttaccactgccccacagcagttcaccctcattccacaatgtatattaaaggctttaaaaacttgccattttttattaaaaccatctttcatcatttcgtacctctattcacttctgtaagtatttgagctgtaaatactaacaccatgctgtgtaatatacacgcgaagtgagggatgttgtggagtccaccctacaagtgtgtgaccctggcttttacagcgtagtttctttcctctataaaatgggggacataatacccatatcatgaggttattgtgaggattatataatgcatattgtaaagcatcttttgcagtgcccagctcattgtagttgctcaggaaatgttagctgaacttaaatgttgagaatacagaactcatttcaacttgtaaagttttgtgtatcatctctgaatcttccacaatgtaacaagttaaatggcctatgttcactgtagccttgctttcaagtgaaactttctaaatcatgaaactactgtgttaactg

SEQ ID NO: 8948 - DNA, 1336 bp, Homo sapiens
cctcattgctttatccttgattttaggtctgtataaacttagctggacaataaatttatcaggtgtacagctcatttagtgattctgttctgaactacagcaatactttcatattcttcctacttatttgtgaatatttatcctttattatgtcatttattaacctattttctttctctgcagtcaacttagaaatcttttataaaatatttgaaatattttacagaaagaagcaggatagaatcactaaatcttttggagattctggtatttcttttctcctacttttataatcaagtggttgttgacgttttatgaatttgcgtaggttactataacagacatctctggatcatgcacattatgatcagcctttcttctttatctgcataaataattaacttagttgagagaaatatctcctcgaaatatagaggccaccagcttaacatatctcaacctatttctattttaaaaaatatttgtgtgcatatagatgtaaaaaaaccctgaagaaatatagtctgtgttgctgtcagtacatgcaatgtagagttcatatagaattctcttagcccctgagagtattgaaagtgttaatgttggggtctttgagtactttttaaaaattttggtaagaggaaactgtaacaagttttaagtcaaaaatgtacaaaattatcaaaaaacaaaacattcactgtaccaataagaaggtaactgtaactgataagtcatactagaaaaattaaagggctgcaaagctgcagggaaatggttagagaggccttagcacaattacactatggattgtggaatttttaattttttaacttgtgcactatatatgtgcactacaattttttttattgtgaaatggtattgtatctttcattaagatttatgtttgtattgccacaagattttggaaaactcttgttttcctaaatgtagcagtgatcatttagtgaagatttttttaaactagtttgcagaaaaacagtcaaaaaagcctgcatataagccaaaagcctttgtagaaaattagttgcttgtgttgtcttttaaaagtataagcataaatcattaaatagaaagcatgatatatgaagtgactcgatgactaagttaataccttgttgtatggaaaattaaaataaaaatcaagttaatactttaaatctaagtgttaatgtttttctcatgaaatttagaaattatttgccttaaatttgtcagtagaccaaatatttatttctccttttcgtgtggatatgtatttttacttccagaacatactcagggagtatatttttgaaatattttgaaagtatta

SEQ ID NO: 8949 - DNA, 1269 bp, Homo sapiens
gaaaagcactgcattactgtgataaaagtggttctgttttatggggaatagttgtttgttaatgacagtgcagtattgacaaatttatcttcatgatgcctctttttccatggttttattgtaatgaatcttactttcttgttctaggctgctgaaaatatgacaagctgactttctggagaaattctgatgagatatgtcaagctctgcaagagggtttgaagattgcattgtagttgagaatgtacaatgaaattactgcatgcagcagtgtagaaaaattttactttttaaaagaattataaaaccatagctttataaatcagtggaaagtggcttacagagagaactatcagatgtgtttacatcacatcttattcactttttttaacagctctaatgctttggcattgctatgttcatatttatgtattccttatttatagctctgatagctttaattttctaagcagtctgtctatcagatgtgcacatctgctgtgccaggttgaagtatagtggaacccatcagtagtaatgtgtagtagttatgacttgttgacatttccattataaactttaattttgaattgtttatgcattataactgtggatttatattgtattgggctgaaagttgacaggatttcagccaccacttgtgaatttttatttagattcattatgtatatcagaatcttgttttttgaaataagagcatggaaaacatttcttgtaatctactcttgaacaaagaatatttagtttttcaaacagtttgttgggcagctaatagtgtgaaccaggtcatttttgtattgagtaaaaaaatcaaactttgagaaacttggattttaaaagtaatgacaatgcttaggttagtattatttgtaatttgaatcatttacatctaatgagaatgttagttgagaatgttttcttaaagttttatatcctataaataacggaataaaaaaatttgtaaaatgaaacaacaaacatgcaaaattcctatttacttttattacataaaagtaattttagtgcttacctaataaatcttgaatggttatttaataaattattagatgggtgatgtgtttcaaaagatacttgctattttttgaagaaataaggatttccagtcattaaacaaaactaaacaatcttattagatgggtgatgtgtttcaaaggatacttgctattttttgaagaaataaggatttccagtcattaaacaaaactaaacaatcaaatgttctatatt

SEQ ID NO: 8950 - DNA, 1273 bp, Homo sapiens
tgcacaggatcaacatgatggtgactgggaaaaaattacttcaagtaacatgcttagctttccctccttaatgtgaaaaatcaagggcttactgacataggaacaacagaaatgctcctggaacttcaagttgctgaattataagtttattttttatcaataaatatttttatacttacattgagtgatgtgtttaacaacaaattgtgacagagctgagtgctcctatcttacagggtcaatgaactacttattaagccttactggtagcactgaatttagcagttctgagaacatgtgaaactatgttaaaactgaaggcactatatatttttacataaaagcttgaacatacagatgaattataacctatgtgaagaaatcttagatataaaactaacttttcaaagatacaaaagaaattaaacaggtttcctgaaattttagttcttggtctgttcacctctgtggggaaaattcttagttccagtgataactgttctagttactacttttaagtatgtaaatactagaaaggtagtactagtgacatcatcacgtgtattgttatctatggggcaaatgtgtggtgcccagaataaaatatacctcatgcctagggtagggacatcctttccagctcaaacgtgggtagggatgtgggagaataagaatgtgggagaaccaagagaaaaagtggggctgggagagtggagttcccgtagggcataggcctgtgaagtaacactggggcagatatgtatgttatatacaactatttttttaaaaaacttatatccatgttgggagtagatgggtatataacagtttggaaatactatctttggagaatgtatttttgtatttataaatcaacttttaaaaactgtctcattcaaaagggaataaagacctgtgttatcaatgtgtcattttcttctttcctccataactgtaccttgaaaccttactgctgacctgcagaaaatgtgccgcgttatgtacctggctcatcttcaacacactaaccatgaacactaatagccattaggggacatggctacagatactacattggaaagttgtctttaatcacacaggtgttaaactcaatataaatttacctaaaaacaattgctatacctaaaaggagttctgggtactaagggtagaagcctcactggctacagttttttaatagtacaaaagtcaagaaataacacaatagtgactataacctgtattcaaatccctactctgtcactacttgatc

SEQ ID NO: 8951 - DNA, 1138 bp, Homo sapiens
cactaccgtgcccagctaatttttagtagacatagggtttcgctgtgttggccaggctggtcttgaactggcctcaagtgatccacccacctcagcctcccaaaatgctgagattacaggcatgagccaatgtgcctggcctcttttatgtaagtttttaaacctataagttttattgatcatgactatgaaaagtgagttctatatagattctaatcaacaaattttgaaaagattatattggaagcacattttaaacttgaacattaataagaaatagatgctttagaatgtaagagctggacccttacaaagtttccatcataaatcagttgagaagtcttgtctaatttactaaagggtcatttttcagaaatcgttatgggaatatttaggaatactgagaagatatgtaaatgctgaagaatttaatatgataagatgtaaatttgctataaaataggcgtttctaataatgcctcttggtttcagggacactttgtgagaaatttaggtgatgttggagagaaagagactgaaacagaagttttgttacttgaacacgatgttccccatcagcctttttcacaggctgttcttagttttctgccaaagatgccctggagcattactgaaaaggtaagttgaaagtaatttgtagtgactttataaattattatatcctgcctagttttgtttaatttctatatgtgtttttaaatatgtagacaccacgggccctcttttcctgcattttgttgggtatagcattcttaggaattatagaagaagtcatttgcttcttcattgaagggtaagtttttctatgtggcagacactttcatatgttaaatgtttcaaagggaaggaaaccattagttacaaatcatacgtggtgtctctctgctccagtgcaggaaaaagaaatgtggttgtcatcaagaaaatacagctaaattgtttttgtatacatattactgatttcacaagagctattaatatgttgtagttgtgctttggaaataatttatttgtttatcatttcatgtcttctaggacatgaaaaaccgagaagacctgaggcatctgtgtatttgtagtgtagacccaccaggatgtactgatatagacgatgctc

SEQ ID NO: 8952 - DNA, 1217 bp, Homo sapiens
cgggattcgcggcggcgctgccaatcaggcgatcgggccccgcccccccggagttgggtgaaatagaggcgggcgtcaagtgtcagtagtcgcggggcaggtacgtgcgctcgcggttctctcgcggaggtcggcggtggcgggagcgggctccggagagcctgagagcacggtggggcggggcgggagaaagtggccgcccggaggacgttggcgtttacgtgtggaagagcggaagagttttgcttttcgtgcgcgccttcgaaaactgcctgccgctgtctgaggagtccacccgaaacctcccctcctccgccggcagccccgcgctgagctcgccgacccaagccagcgtgggcgaggtgggaagtgcgcccgacccgcgcctggagctgcgcccccgagtgcccatggctacaagggtgctgagcatgagcgcccgcctgggacccgtgccccagccgccggcgccgcaggacgagccggtgttcgcgcagctcaagccggtgctgggcgccgcgaatccggcccgcgacgcggcgctcttccccggcgaggagctgaagcacgcgcaccaccgcccgcaggcgcagcccgcgcccgcgcaggccccgcagccggcccagccgcccgccaccggcccgcggctgcctccagaggacctggtccaggtaggaagagccgctcccctcccaccgcagcactcccgggctcgggcgtgtcccgttgctgcgactcgcgggcgacaggggccgctccaggctggggcgtgcgtcggggcgcaccggagccggtgctgggtgggcagccccgccctgcacgcctggccggggccccgcgtttcgctgagagtaaatgggggggggggccgggggtgggaaggatggaggggaatctgccccggcgggtcggcctgggagaggtaagagggagggaactgggtgctcacgcgcaccttagttgtttttcttacacttgagggacgaaaccttgtaccttacgctcagttttacttaaattacgccttcgcctgtaccgctctccaatgccaaggcattggagccctcccccccatccccatcgtctcgggttaagtagaaacgcaaattggggtgctggggagaggttccccaaggtttcatacccggtggctcaacctgctttagaagcgattgcgggccgcgtttggaaaatgagagttaggaaagctaaggttg

SEQ ID NO: 8953 - DNA, 2556 bp, Homo sapiens
ggtacacaaaatgcttttttctttatgaggtaaaaaatacttggaggttataagaaataactcttaactagcttactttgagtggctttgatatgtatttactcataatggaattcatgagctttccttctttcgcttggccaagattttttttttctttgaaattccttctccggtgttatctaggatgtttgcattacaagcaggccgctttacctcctttgttcgttgtcacaggtgaaaagccatacaagtgtacctgggaaggctgcgactggaggttcgcgcgatcggatgagctgacccgccactaccggaagcacacaggcgccaagcccttccagtgcggggtgtgcaaccgcagcttctcgcgctctgaccacctggccctgcatatgaagaggcaccagaactgagcactgcccgtgtgacccgttccaggtcccctgggctccctcaaatgacagacctaactattcctgtgtaaaaacaacaaaaacaaacaaaagcaagaaaaccacaactaaaactggaaatgtatattttgtatatttgagaaaacagggaatacattgtattaataccaaagtgtttggtcattttaagaatctggaatgcttgctgtaatgtatatggctttactcaagcagatctcatctcatgacaggcagccacgtctcaacatgggtaaggggtgggggtggaggggagtgtgtgcagcgtttttacctaggcaccatcatttaatgtgacagtgttcagtaaacaaatcagttggcaggcaccagaagaagaatggattgtatgtcaagattttacttggcattgagtagtttttttcaatagtaggtaattccttagagatacagtatacctggcaattcacaaatagccattgaacaaatgtgtgggtttttaaaaattatatacatatatgagttgcctatatttgctattcaaaattttgtaaatatgcaaatcagctttataggtttattacaagttttttaggattcttttggggaagagtcataattcttttgaaaataaccatgaatacacttacagttaggatttgtggtaaggtacctctcaacattaccaaaatcatttctttagagggaaggaataatcattcaaatgaactttaaaaaagcaaatttcatgcactgattaaaataggattattttaaatacaaaaggcattttatatgaattataaactgaagagcttaaagatagttacaaaatacaaaagttcaacctcttacaataagctaaacgcaatgtcatttttaaaaagaaggacttagggtgtcgttttcacatatgacaatgttgcatttatgatgcagtttcaagtaccaaaacgttgaattgatgatgcagttttcatatatcgagatgttcgctcgtgcagtactgttggttaaatgacaatttatgtggattttgcatgtaatacacagtgagacacagtaattttatctaaattacagtgcagtttagttaatctattaatactgactcagtgtctgcctttaaatataaatgatatgttgaaaacttaaggaagcaaatgctacatatatgcaatataaaatagtaatgtgatgctgatgctgttaaccaaagggcagaataaataagcaaaatgccaaaaggggtcttaattgaaatgaaaatttaattttgtttttaaaatattgtttatctttatttattttgtggtaatatagtaagtttttttagaagacaattttcataacttgataaattatagttttgtttgttagaaaagttgctcttaaaagatgtaaatagatgacaaacgatgtaaataattttgtaagaggcttcaaaatgtttatacgtggaaacacacctacatgaaaagcagaaatcggttgctgttttgcttctttttccctcttatttttgtattgtggtcatttcctatgcaaataatggagcaaacagctgtatagttgtagaattttttgagagaatgagatgtttatatattaacgacaattttttttttggaaaataaaaagtgcctaaaagatgtatgtggtgcttttcttctttacctgcaataaagagtctgatcagggcggttagtgagaaatcaattccacacatttgtagaggagccacattgaacccgtacctacataagacggggatttattttttgagacggagtctcgctctgtcacccaggctggagtgcagtggcgcaatatcggctcactgcaacctctgcctcccaggttcaagtgattatcctgtctcagcatcccgagtggttgagattacgggcgcacgtcaccacgcctggctaatttttgtatttttagtagaggtgggctttcaccatattggccaggctggtcttgtgaactgacctcgtgatccacccacctcagcctcccaaagtgctaggattacaggcgtgagccactgcgcccagctgggggatttattttttaaattagcataaagggagtcataattcacgaatacttatctggccacgtaatgcacgagacc

SEQ ID NO: 8954 - DNA, 1128 bp, Homo sapiens
attaacagctgcatgttttatgccatggcatcatttaacaatcattgacaggaattagattaaaagtattaagacaaccagtagtcactaagcatgtaatctttggagtcaaacagactttggcttcagttctgattccagaaatgtgtgactttatgcacattacctaagctctctgaagttggcttttgtcatctgcaaagtggaaacaataacctatagtgttatgttgattcagtgaggtatgtaatacatgtaaactgcatagcacatcacccagggtatgtatctgtcatgaacaatgatgaaatccaaaaccaccttatcactatacatgctaatgtaagtcttgagcatggaacagcaaagtgaactaaaagatactccaagcctgttaaaggaaaccaatactgccacatcttccttccacttccgttatacattggaggggagatttttttttttcactttttgttttttccattttaaactatgatggtgttttttaactgtttatatcccttataacctctccattttttcatttgattattgttcctctagcagtattaaaatgaagatactttatgtaaatatgaccagcgttgaaactaaaagttgagtgtaactgcagtaaaattgaataaatatctgcattccaggtaatgttactactaatgtattattttgtcctgtcttattaaagcttgtagattttcagtggaaactgggtatggctgtgagctcagacacttgcagatctcttaagtatccttacgttgcagtgatgctaaaagtggcagatcattcaggccaagtaaagaccaagtgctttgaaatgacgattccacagtttcaggtttgtgatttaactcatccagttttagctcagcttttctgtaatcattgcataaaaagatgtataaaatctttctacgggaaaactttaatggtttttatttgtagattgatatgctttacgtttactagtagtatatgcaagagacattaatttgtcttctttgggaatttgataaattattttcaatataatgtgctgaagttgtgtactgcgccatttgatcgcttgaacagtactcctctctgagtatatttaggaaagtttta

SEQ ID NO: 8955 - DNA, 1215 bp, Homo sapiens
ctaattcatagttttatatggttctatcttactctgtttttattaggattaggttttgaacttcaaaaaatgtcctttggcctccgtcacagtggtcctgtaattacctaacctataagtttagtgttagtaataactttttaaaaatatggcactgtctgtgcattactggaatgccctaaccttagtgatggtgtattttttaaatgacagagttaactgagttttatttctttttaatagatgggatttagaattggtttcattttcttgtagacaaaattagtaatagattttaaatgtttgttacttcccttctaattcaactatgcacattttaaattatatagttttgtggtaagggaactgtgacaaacttttgtgggacatgtacttgattgaatttttcaacagataaacttttacaaaaacttgcaaataattttttttttctttcaaggtatcctttgtgtggctgatcagtgtcacggcttaagagaactagccctgaactaccacttattgagtgatgagttgttacttgcattgtcttctgaaaaacatgttcgattagaacatttgcgcattgatgtagtcagtgagaatcctggacagacacacttccatactattcagaagagtagctgggatgctttcatcagacattcacccaaagtgaacttagtgatgtatttttttttatatgaagaagaatttgaccccttctttcgctatgaaatacctgccacccatctgtactttgggagatcagtaagcaaagatgtgcttggccgtgtgggaatgacatgccctagactggttgaactagtagtgtgtgcaaatggattacggccacttgatgaagagttaattcgcattgcagaacgttgcaaaaatttgtcagctattggactaggggaatgtgaagtctcatgtagtgcctttgttgagtttgtgaagatgtgtggtggccgcctatctcaattatccattatggaagaagtactaattcctgaccaaaagtatagtttggagcagattcactgggaagtgtccaagcatcttggtagggtgtggtttcccgacatgatgcccacttggtaaaaactgcatgatgaatagcaccttaatttcaagcaaatgtattataattaaagttttatttgctgtagttctgatataattctactattttgtggcacagaaatttgatat

SEQ ID NO: 8956 - DNA, 1067 bp, Homo sapiens
taaagtttgtgtgctaatcgaaatgattcactaaattgagagtaattgatgatgcatgagagagaacaaggtgattgcagcataaaaatgttgagggaataagattcacagcacaaggggagggactagctttggatcagatccaggacacttcctccattctaccatgagagaaggcaggggaaagtaggtttattaatcacattgcaactttgaggttgtatctgattgcttattgtctcacagaagaaagaggtgaggtcatgatcacctgagagttaggaagagaggtgatgcaggtttgaggtaagaaagaagtgaaattcaagcattttggagagtaggcaagcgtactatggcagggtggtaggattgccaggaggtatgcaaacaaattaaatgtttgctgaactatcgtaatgatgttgactgcttaaccaaaagtaaaatttccaatatccatcttatttcttttcagacccagtgagaatatgctgatccgtgtcaataatgatgggacttattgtgcaaattggactccaggggctattggactctacactcttcatgttaccattgatggcattgaaatcggtattttctttaaagccatgagctactacttacttcaaataactagagtcaaaattatttttatcttctagttttgcccattaacttgcactagacatatggataggtttcataacttatttgaggccttgttttctctttcataatgagtatttaattagtgcattaacattttgtaataatttctggtgtccgcccaggcactgtagccctcatgactctctccctccatttcctgatgttactagtcaggtgtgctctcttccacgctgctgttaccctgtctctcccctgtgggtgtgtctgtgcctctcctgactgtgagcagaaagcattcatgtttggatcttccagtgtagctcagtgcctggcacataatgacagcaaatatggatgaatgaatgcatttttaaatcgatcattgtgttaatctgggttctccagagagacagaaccaataggatatctataca

SEQ ID NO: 8957 - DNA, 1208 bp, Homo sapiens
taagaatatgatgcagaatgcccttacacttatttgtgcccagcttcccaaaaagaaaattgttttgttaagaggaaggcagttaatttggctagaatccaaaaactcattcagcatggctgttttcccttatttcaaatgaaaaacttttctaatactaaaatatgtaatcctgctttgctttaaattcccatgtctgtcactcaacaggaggcatagtgattcttaaatatttacggaacatttggtgagttgtaaagagaagtattattgcattgtaggtttttgcattgatgtgtcgatttttttgttttgtcccaagatttccttccagcaccttaatgaatgttcatatgatagaatgttttaagtatcagcaaagcattcatggatgcctgcttttcattctcagaaggctaaacctgttttgggtatgatgctacttcagaacatattgtctggcacaagatttcttctaataagtggtttatttaaactcaatttcggtggactgttgaattgaaaaacaccaaaggagtcttcttgtctggagactggattgttccagttttaaatacctgtgcccataagtatcccatttcatgaatgtgtgttggcatggggaaaaaatttccctgctctttgagtggagcgaaagcaattggttaagctgtagcagcttttttgtttatttttttaaagtaataataaaacttgaactgaaaaaagataaaacttgaactagaatactactcttgtatgcttagaatgtttatagtgttaaatgtttatgtggggttgtcaacatttttattatttatagttgaattatgttttgttaaatccatattgtttattatttttatattttgaaaatttttaaaataaaagtcttactaaaaacagttgttaacgttttaaaattgtcctacatcttacatcagttaatttatactagaaaaaaattgcattcattaggcattacataattgagaattctgaaaatgtttatacgaagaaatgactccacatttcctcttcccctctttaccctccattttcagttgtattaagtcaatcttggcaccagtatgtcactggctttatgtctcctcctttcacagatacataaatcctcatgatccttcccccaaattcctgactcctttcctgcttggaagtttttctctttattctgcttggcagcc

SEQ ID NO: 8958 - DNA, 1214 bp, Homo sapiens
aaagtccaattgacactgatttttattcacccttgttttatttttatccagccatactacctttatcacttttttttttttttttggtgcaaagcttaacattctgcaaactttttttccccttgagtatgcattgcatttgtcatgaagagtaaaaagaatgtaataaacacatcagtcataatgtaaattaactgttttgatccacattggttggatacagcatggttaattctaggcttggttaaaaatacataatttggaaagtcttctaatattttaaagacctagtagtttacaaggcctttttttgttgttgttgttagacttttggttcacatttacaaactagccacagggtgttcataaatatttccccaaattagttgagtatttttaattgtaaacaaagaattttctgcccctactacactggtttactgctagggtaaagaccattgtctgaagacactaaacttggtgttaacagtgttgattgtttaatggatatggactacatgccactacctgcaactttgtcatcctggagtttttgtttggtttggtttgatttttcactttttgcttttaaaattaaaaacaaagcaaaacaaaattgaagataccattgagaatcagaattcaagatgacttgattctcactaagatcactgcgcttttttaaaattgctttgagatctagtcagttacatatttaaaatccccgtgttgattagagataaggttttcattattttattttcctaaataggattctcatggagctattgtagataactgtacagaatcacttttgtgtaattgaatgaagcagtttcctctgcatgattgcataatgaaagccttttatatatctatatttttcaatacttagattttacactattaagctgctctagtcatgctatatttgtttttttaatagagtttataaatatttatgctcaaaatacagatcaactgaatatttttggtcttgtttacaagataaatcatactttaaaatgatacaggcccctcaagtgtcttaggaaaaagtcattggtgctataaaacctttcagtatcatttttgaacccattgttcagactttgctaggttttaatctgattccttgtgatttattataatgtagcagcatacttataaaagtggtctgtgctgagtcagatagagagcccagcccattagaa

SEQ ID NO: 8959 - DNA, 1149 bp, Homo sapiens
ttcttggagaagatgatttgactgatcattgatctgcatatgctagaactctacctgtgtttcattagtattatctaatgtacttttacatatttgtaaaaacaatttttggtaaaatgtgatgaagatggatttcacaaatagacaaaaaagaagaaaactaccttctgatcttgtattttgaaagattgatgtttgcattttacttcagtaaacaattgctaaagacatcacactagaaacatatgcaatgtttttattacatacttctactggacatcacagaattctttgggttctttgtaatttaatgaataggtctgaaaacttatgaccaatacttgttataacttagaggactttgttttattccaaataaggaatgaatttgcatttaaaatcttaatgaatgttttcaaaactgaatagataacatagtactctaactaaagtctccaagttatgtattataatattacatagtagtatgcttaggctttactatgtattagccttttgttggactgtgtatgtattttaccatatgggttttaatgataatggtgtatgactgctttacatgagtccttatgcatccagatgttataataaagtggaatggtctctttaaaaaaaaaaaaggaaagaaaagagaaaagcaatgacaaaaaaaaaaaaaaaaaaaaagccaagacaatgttccttgatttaaaaaaaaaaagaaaagaaaaaagaaaagaaaaaaattaaaatagaccattccagatggtgatctacccttccccccaattatcacaaaaggagctataatcactaacttattcttaataataatggttactggtacccttacaataatgtacaatccaatgtttaaaaattataccacttgagtttggtttgatcctataaattttcaacaaatgtcttaaaatttaaaagcaggctgattagtttggaaccagactgcaagtagagctaacatttggtgaataagaaaacatcacattacattttggatgtatgaaagaaaacttgaccatttgaagatatatgaataaagaaatgtactatagatactactttaggaaaacactgtttggtaagtgttccagtctgatattttaagtgtgtacttcctatacttgt

SEQ ID NO: 8960 - DNA, 1203 bp, Homo sapiens
tgacacagtctctgctcagtgcaaccactgcctcccgggttctagcgattctcctgcctcagcctccctaatagctgggcttatgggcgccagccaccacgtccagctaatctttgtatttttagtagagatggggtttcaccatgttcgtcaggctggtctcgaactcctgacctcgggtgatccacctgcctcagcctcccaaagtgctgggattacaggcctgagccaccacgtccagccagattgtcacatttcaacatgagatttggagaggataaacatcctaactatatcagtatgttaaatatactatcactttacaagtatttatattactggagaagatcaggtagctcttgggaaatggttaattatacttttgtccaatattaaaaatattcatatttttaaatattttacttttgctaacttagagaaaatatatatttccagtgcttttgacatttgtttctaactattccttcctcatagaaaagggtttttgtatgagaggagacatgtgtccttttgatcatggaagtgatccagtagttgtagaagatgtgaatcttcctggtatgctgcctttcccagcacagcctcctgttgttgaaggaccacctcctcctggactccccccacctccaccaattcttacacccccacctgtgaatctcaggcccccagtaccaccgccaggtccattgccacccagtctcccacctgttacaggtaagtaaatctgtttgtttccctgtatttatctagccattcttagtctatttttaaaacttaatagattcttaaattaaaagtatctaaaggaatcccaaaaatgcctgatagaaattaatagcagtatacttccatttggaatacacctccactttgtagcctgtgccaagccagttactatggtttggagtgaccctgtgaattaagtatatcactggtaaaacccagctgcctgcaggccttcatagcttaaggcaaacctgctttggaatgtattaaaaggatattttaccctggatatctaattcagttgtaagggcttggtgtttgtagatattatagtttgataaatgagaagattatgttcggatgtgcaataacttgttttatttgtttgctttcagatgatatttcttattctttggttttgacaggaccaccacctccacttcctcctttgcagcc

SEQ ID NO: 8961 - DNA, 1146 bp, Homo sapiens
agctccctgcctcctccggaaaggcgagggcgcaggccaacggcgagccccccccgggcgggccccagaccctcctcctcctcctcctcctcctcttcctcctcctccgcacccaccgcccccgcctcggcctcgctgcctcgcctccacaacgcccagtctgcaccgccgagagctgcgcgccgcagcgctagcggaggagaggggccggcggagcgcgcagcgcccaggcccccgcgcccgcccggcccggcccggcccgcgcccccgcgccgcctccgctacgacgcggccccggccgcaccacttggcgatctggctttaggttctccgtaaggccgttttcttttcccattcgctcatctgccaggaaaagggacttgccgttggcgcttcggcctcttgttcattgagaaaaaagaggaaatactccgcgtgcgcttgtagaaggggagtcgtctccagctccgaaccccggagtgttcatcagcggggaatctggctccgaattctctttttttctcccgccgattgctcggaagttggtctaaagcagaggttggaaagaaaggaaaaaagtttgcatcgagactggatttatttgcacatcgcagaaagaagagaatccaagggagaggggttggtgcaaagccgcgatcacggtgaggcacgtttggctcttcccctcctggcgccgcggccggcgcgttgtgggcaacatggagtaggtgcagccggaccaggagttgggtccgtctctccccgagcctccctttctcaaatcccgcagggtcttcgcgaggatccggggcgctccccgcggacctgcctcgcccggggcttgggctcggcctgcctctgcggggacttctgtatgcaccccgtgcagtgtccccgacaggcgaccccgcgcgcccgcgctctagggggttgggacggaggacagctagcctgaagtctgctcccagccgtgcactggccgcgaattcggcgctgagagcgggagagggagagaaaaacactttgtattttccaggttgcctttgcaggcgcccgcatttctaacctgttcttcctcttggtggaaggcaaagtccagggagaggctgtccctaggcggggcgctggtggggctgggggacacag

SEQ ID NO: 8962 - DNA, 1202 bp, Homo sapiens
aagcgggcagctgaagatgatgaggatgacgatgtcgataccaagaagcagaagaccgacgaggatgactagacagcaaaaaaggaaaagttaaactaaaaaaaaaggccgccgtgacctattcaccctccacttcccgtctcagaatctaaacgtggtcaccttcaagtagagaggcccgcctgcccaccgtgggcagtgccacccacagatgatacgcgctctccaccacccaacccaaaccatgagaatttgcaacaggggaggaaaaaagaaccaaaacttccaaggccatgctttttttcttaaaagtactttaaaaaggaaatttgtttgtattttttatttacattttatatttttatacatattgttagggtcagccatttttaatgatctcggatgaccaaaccagccttgggagcgttctgtcctacttctgactttacttgtggtgtgaccatgttcattataatctcaaaggagaaaaaaaccttgtaaaaaaagcaaaaatgacaacagaaaaacaatcttattctgagcattccagtaacttttttgtgtatgtacttagctgtactataaggagttggtttgtatgagatggttaaaaaggccaaagataaaaggtttattttttttccttttttgtctatgaagttgctgtttattttttttggcctgtttgatgtatgtgtgaaacaatgttgtccaacaataaacaggaattttattttgctgagttgttctaaaaaaaaaaaaaagatgtatttcattccaactacaaagacattacaagtgtttgagatggtaaacaaactgattatcataatttgatcaatatgcaatgtacacatgtactgaaacatcacactataccctattaatatgtacaatgattatgtgtcaaataaataattataaaaagtaaaattgggggaaaaaaggcttatgaatggttatattatctattttaaactgttttcattgttcaattaaataacagaataacatattgagtttttacaactttaaaaatactctaatattgtttttcttttggagagagctgaaatacttattcttctctttggataagagctctcatatttaataaagtatgtttttaaatatatggctttcacaacaattaccctaatctgattatatctttgaggatagatttacaaatacatattgat

SEQ ID NO: 8963 - DNA, 1214 bp, Homo sapiens
gcatatttgtggtgtgctcatttaaaaaaattaatcaacctttaaatcaaaatgtataatagattttaataaaatctagagaatgtcaatgtttcacttggggaggtgtgtcatttgtatctcttccttttgggttttagagtaataatgttaagaaagagagagactttctgactgatcccttaaatttttgtcatattctgttatttccttgttttctctctcccttacaggaggtaaaatgcacacttgctgccccccagtaactttggaacaggaccttcacagaaaaatgcatagctggatgctgcagactctagcgtttgctgtaacatctctcgtcctttcgtgtgcagaaaccatcgattattatggggaaatctgtgacaatgcatgtccttgtgaggaaaaggacggcattttaactgtgagctgtgaaaaccgggggatcatcagtctctctgaaattagccctccccgtttcccaatctaccacctcttgttgtccggaaaccttttgaaccgtctctatcccaatgagtttgtcaattacactggggcttcaattttgcatctaggtagcaatgttatccaggacattgagaccggggctttccatgggctacggggtttgaggagattgcatctaaacaataataaactggaacttctgcgagatgataccttccttggcttggagaacctggagtacctacaggtcgattacaactacatcagcgtcattgaacccaatgcttttgggaaactgcatttgttgcaggtgcttatcctcaatgacaatcttttgtccagtttacccaacaatcttttccgttttgtgcccttaacgcacttggacctccgggggaaccggctgaaacttctgccctacgtggggctcttgcagcacatggataaagttgtggagctacagctggaggaaaacccttggaattgttcttgtgagctgatctctctaaaggattggttggacagcatctcctattcagccctggtgggggatgtagtttgtgagacccccttccgcttacacggaagggacttggacgaggtatccaagcaggaactttgcccaaggagacttatttctgactacgagatgaggccgcagacgcctttgagcaccacggggtatttacacaccaccccggcgtcagtgaattctgtggccacttcttcctctgctgtttaca

SEQ ID NO: 8964 - DNA, 1434 bp, Homo sapiens
cccattagggattatgctgaatttgtatggtttatagttgttagagtttgaggtgttaattctaattatctatttcaaatttagcaggaaaaaagagaacatcaccttgtaaaactgaagattgtgaccagtcagaataatgtcaaagtgcttacagtgcaggtagtgatatgtgcatctactgcagtgaaggcacttgtagcattatggtgacagctgcctcgggaagccaagttgggctttaaagtgcagggcctgctgatgttgagtgctttttgttctaaggtgcatctagtgcagatagtgaagtagattagcatctactgccctaagtgctccttctggcataagaagttatgtattcatccaataattcaagccaagcaagtatataggtgttttaatagtttttgtttgcagtcctctgttagttttgcatagttgcactacaagaagaatgtagttgtgcaaatctatgcaaaactgatggtggcctgctatttccttcaaatgaatgatttttactaattttgtgtacttttattgtgtcgatgtagaatctgcctggtctatctgatgtgacagcttctgtagcactaaagtgcttatagtgcaggtagtgtttagttatctactgcattatgagcacttaaagtactgctagctgtagaactccagcttcggcctgtcgcccaatcaaactgtcctgttactgaacactgttctatggttagttttgcaggtttgcatccagctgtgtgatattctgctgtgcaaatccatgcaaaactgactgtggtagtgaaaagtctgtagaaaagtaagggaaactcaaacccctttctacacaggttgggatcggttgcaatgctgtgtttctgtatggtattgcacttgtcccggcctgttgagtttggtggggattgtgaccagaagattttgaaaattaaatattactgaagatttcgacttccactgttaaatgtacaagatacatgaaatattaaagaaaatgtgtaactttttgtgtaaatacatcttgtcttgttttcattcaaaaacatttcacttttggggttgcgtgtcagatttggcagtataaattctggctatattttttgttgttagatttatttggctgttaagtattgcgatatgactaaacatactgtatacctgatgatcatctgtaaagttagagtatatctttttgctttctttggagttagtgttattccaggatattttacttaatctaaaagttaatttatgttgctcatatattactcaagtatttaaatttagagagaatgccgctctgtttaaagcaatgtgtaaagatgagtttttttaagcatggaatttagggttggggtacaatttgtttctattaagcaagtaccagtttaccaatacatgagtaactgaagtgta

SEQ ID NO: 8965 - DNA, 1434 bp, Homo sapiens; identical to SEQ ID NO: 8964

SEQ ID NO: 8966 - DNA, 1434 bp, Homo sapiens; identical to SEQ ID NO: 8964

SEQ ID NO: 8967 - DNA, 1434 bp, Homo sapiens; identical to SEQ ID NO: 8964

SEQ ID NO: 8968 - DNA, 1434 bp, Homo sapiens; identical to SEQ ID NO: 8964

SEQ ID NO: 8969 - DNA, 1434 bp, Homo sapiens; identical to SEQ ID NO: 8964

SEQ ID NO: 8970 - DNA, 1434 bp, Homo sapiens; identical to SEQ ID NO: 8964

SEQ ID NO: 8971 - DNA, 1399 bp, Homo sapiens
tgagtcagtaaaatgattccgcttatcaatttaatacagagataaaacatatctatgaatcagagtgatcggaactaaaatggatctacaggttgtttggcattcagcccagccctgctgagggttttagtggggctaatttctctgtacagtagattcatccctgttcttaaattgtgcctcagtgagggatatgatttgcttcacatgaagaagtagacacagaagtgcattgtttcagggaggagactttaaaattttgaaacattctttttatgcttaccttttttttttctaggtatacttcaaaagaaattatccacatattggtcacactgaccacatggttacaaacacttccaatggacagccctcgaccttaactattttcgagacagcactgtgaatccaaccaaaatgtcaagtccgttccgaaggcattttccactagtttttggactatgtaaaccacattgtacttttttttactttggcaacaaatatttatacatacaagatgctagttcatttgaatatttctcccaacttatccaaggatctccagctctaacaaaatggtttatttttatttaaatgtcaatagttgttttttaaaatccaaatcagaggtgcaggccaccagttaaatgccgtctatcaggttttgtgccttaagagactacagagtcaaagctcatttttaaaggagtaggacaaagttgtcacaggtttttgttgttgtttttattgcccccaaaattacatgttaatttccatttatatcagggattctatttacttgaagactgtgaagttgccattttgtctcattgttttctttgacataactaggatccattatttcccctgaaggcttcttgttagaaaatagtacagttacaaccaataggaacaacaaaaagaaaaagtttgtgacattgtagtagggagtgtgtaccccttactccccatcaaaaaaaaaaatggatacatggttaaaggatagaagggcaatattttatcatatgttctaaaagagaaggaagagaaaatactactttctcaaaatggaagcccttaaaggtgctttgatactgaaggacacaaatgtgaccgtccatcctcctttagagttgcatgacttggacacggtaactgttgcagttttagactcagcattgtgacacttcccaagaaggccaaacctctaaccgacattcctgaaatacgtggcattattcttttttggatttctcatttatggaaggctaaccctctgttgactgtaagccttttggtttgggctgtattgaaatcctttctaaattgcatgaataggctctgctaacgtgatgagacaaactgaaaattattgcaagcattgactataattatgcag

SEQ ID NO: 8972 - DNA, 1164 bp, Homo sapiens
gtgcacttggctgatgtttcctgcttgggtccctctcaaaccacaggtttccttctccactccctttaaaaaagaaaatttgtttcagtagattttggggtacgggtggtttttggttacatggataaatttacagtgcaatttattatttaaaggaaactgttttaaaatttatttttcattgtgtatcatttcaccaagagagtgattgttttcagaaaagatgaagtgtttgattgtacactgaggttttcataaacctggtggatagttgatgaaaactgagcatacttaatagagggctataagttctagaagatagaaaaaatggtaaatactgataaatactatgttaccttctttgggccataaaaatcagtgaataatggcattaaagggctctccccaggccctgtgcagtgtggcctggacatcctactgttcttttatgctgtctggaaaaggccgccacagactgtcacaggtgtgatgcagaaggcttccagccaggtttgtgaggaatgagtaattttgcttgaacaatggctggaatatcagagtctgtcaatcaggtgagtagtatttgctggcgatttggatagagaaatcattgcttgtttaatgggctgtttcttcatcctggactattgttaatgagagatgatgcattttcggaaatgacattaagttagcagtaatgagctagatttttattgaatagtatacactatataggaaaagatgcgctaaggcaagctcctagttattcagatcctaccaggtcttatttttttttctctgtctcacacgctcacacatatgcacacacaaagctgtgtaaagttttaatcttttgccatgatttcccagtgcctttgctattgctatcctcattttgtttatttttctgatattgctagcctcgcttttttaaagtaaaattttcattttattcaaagtttgtacagaattgctaacatttccctaaaataattactatacttcagcttgtcctgctctggtgtccccccactgtcccctgcttccctgaagatccattttagagaaattttgcagaaatatagggtcaaagtaggagaatatacaaggtgatttcagtgtgttgcagtgagtggagtgtatcatgttttagggagttgagaa

SEQ ID NO: 8973 - DNA, 1169 bp, Homo sapiens
gcttttgcttatggtgtattttctacttggaccttcccctctttgccatctggagaaatagtccttgtcctttgaggccccgttcaaatgctcctggtcctctgaagcttttttttttttttttgctctcctctttcccggtggagttaacaaacagccctttcttttctgctccccagcacttcattcccattttagcactctctgaccactgtgttatcgtcaggctcgggtgcctttctgcctttcctgcccacctgtgagctcctcgaggggacagatgacatctgactcattttcatgtcttcctcagcagatattacaaattctccaaaatacttgttgagttggtatagattgttgacttcctaatcgaagtctttttctatttgtattttgagtaggacctgtctgtgttgtcggaagcaaaagcgctgtagggaaccatgtgatgcaggtccctgcctgtgcctgccgctgataagggcaggctgtgatcgctcaggctcatctcccgtgtctggttccccttaggagtaaaactgcaactttcacggatgccaggatcaggaccatgaatgaagttataactggtataaggataataaaaatgtacgcctgggaaaagtcattttcaaatcttattaccaatttgagaaagtaagtttttgtatacattgtaccatatttttgtatttttctatttgctattcttgttgatggttttagaagttttactatgttttcacattatgggaagttcagtacaatccatcccagtccccacgcttggcagttgggttaagtagaatggtagagaacgttattttcacttggtcttccatttaccatgttcttaaacagaaagcatgtatgcttcttactaatacaaaagtgaaattccaaatgtttctgaatatcccaaatcccaacaatgagtctaagatgttagtatttgagaataatggtgtttaaaataaaactataatttatattaatgtagccaaatggacaagttatagagactgggcatatctatattggaccaaactatatgaatcagtatttttcattccaaacaggcatggaaatactgttagttgtgctttgttttattagaaattttggagggggctgggcgcagtggctcatgcctgtaatccaagaac

SEQ ID NO: 8974 - DNA, 1184 bp, Homo sapiens
tgcaggtgggggtactgaagggctgcagcttaaggtggagacccaggctggagatttaaatctgggaatcactggagtagagctggtctggctgaggtcacctagatagagaatagaaagtgatgaggtcagccccaaggtcttcccaatgctaggagctcagaaagagcagcagcagagagtgaggaatagtctctagcaaagctggagggaaacctggggagtgtgttgtcatggaaaccaagggaaaagtatttcacagaggaggcagtggtcagtcatatcaaatgccgctgaggtacagagtaagatgaagactgacaatggacggctgttgtcaagacggttgttggtgaccttggcacagcagcttcagtagacagatggggacaaaagtctgattcccctgagctgagctgagtatcatgagggagtggtcctactgtatccagacattggtttcaataacacttattgggaaggaaagcagagacatgaggcttcatctggacagaaatgtgagacccagggacaactttgtttcatttgatgtgggagatactaagatgtgtttgggtgtgcaccaccgacaatatagatggtatgcaaaatgaagacgcaagagaggggaggggactctgaggcttaccaaggagccaggttttctgccattgaagtattctcaaaagcaaagaatgtaagggctctttctccatgggcagatcaaagcttcctgcagattgccacagtaacccacagaaattcttatttttatcgttttttgtttttttttttgagatggaatctccccctgtggcccaagctggagtgcagtggtgccatcttggctcactgcaacctccttctcctgggttcaagtgattccgttgcttcagcctcccaagtagctgggactacgggcactcactaccacacctggctagtttttgtatttcttttttttcttagtagggattggggttttgctgtgttgcccaggctggtctcgaactcctggcctcaagtaattcatcccccttggactaccaaagggctaggaatacaggcgtgagccactgtgcccgacctcattctgatcttaaatgttctcagtatctagacgtgggtacttggcttatatactcagtacctgcatttccctccagtttgggccaggttgtttc

SEQ ID NO: 8975 - DNA, 1227 bp, Homo sapiens
tagctgtgaaatctttagtgtgcatgtgtttgcacctctgtggtctgtcaacgtggctgtcactgaaggagcaagagaccatcttttaggaaccctgccaccaaataataatatatccaggcttagactttggattaatgttaaatgtacatttttttggttcagtacctgaagaagaatactgaaacttgaatctataaattcctatggacccttttaatattaaacacaacaaattaaaagttgttataggtaaaataagttcagataaaatagtggtggtatttaaaataatattgctgaagtgcagattgaaatactttttaaacaactgaagttctgagtttttatagggaatttcatgtaacaagactggtttagaaacgtaaagttgcgcagtcaacataaataaatacagaatgccatgttctccacttctaagtaaagacagtgggcagcttctgtttctccttctatcaaggcttcaccctatcttaaaggtctgtggtgcctcccacgtgggacctgtctgctggtatgtgttaaacagcagaccggcccttctaccagatcttgatgcctctgattttctcctgcctacaagaaaatacaggcaaggttagtcaggtctggctatatttccactgttgtttcatttaataagatggcatctcctcttgagatatgttcttcttaccttttaagaagatactatttaagaagtgaactattcagtctttgtatactgaatgctttttccctaaaaaatgttaatcaagaatattgaatatttatggcactcttgatgctgcatttgaaagctgaaggaattactttagatagataggaattgctacctttattctggaaaggttttgtttctgcctcaaagcattttgaagtgttttaaccattaaagggtctaatttttttttcttaatgaaatcaagcattttaattcactgtgggaggcatcctgaccacggacatccataacagcaaagcacaaatcgttttcgtctgtagtcatatcctgaaacataggtggacaaatttttaactgagagacaaaaatcacatagttgaattgagcagaacacttaagtgctttctgcatctatttaggagtctatttcttaccaataaacttgacaacgcatttggaaaactagtgaacaccttacagctttcattttgctttaatgtttcaattcaagccggtgtaaa

SEQ ID NO: 8976 - DNA, 1303 bp, Homo sapiens
ttctttcctttttggtgagcttcatgggtggagttatcagtggtctgtactttgtggatattttgcccagcaggaagtattagacacatcagtctagaagcattgtgaaaaggttccaaaacgggagacaaaatttaattcattcctcagttctgaaagtttgtgctttcttaccatgaatagatgaaaacttgaaaaaaatcttgacagtttactaatgtgaatcagatgtaacgtactactaattctacaatgcctttctctttagtcagtattaaaaatcttttttaaagtattggtatgaaaacaaatttttgttgccctgataatggaattttaaaactacccacagtttaagagaaaacataacttggtaaaaaaggtagccaataaaaccacaatttgaaattgataccattttctactcacaatggatgatgaaaaatttcacctttaaatgggtcagaagttgtctttgacatttaccatgaaaaaactacataaaatggctccctggtgaggttacagacacggccctggtgatgggcgttgcaaagttttcactgagcacacagcaatggtatcacctagagaagttcacgcaactttgttgaatgtagttgacttttccaaatttataaaggaaggaagaaggcaaatgttaatttgccaacaacgaatatcctttttctaaatcagatcattccttttttgttagtggcagtttatcctgtaatttcaaatgacgttaagaggtgggattatttgggggttttttttgtttgtttacagatgatctcatttgctgaatgattgatttaagagtaaaattagccactgcgtggctttgtgtatagtaaccggttttgttgcacttgtctgtggctgaaacacttacctgcagtggaaagccgagcaaggaggaggtaaacattggagatgtttgtgaaaatattactcttgctgtgaggttttagtttgttttgaatgagaaaagactaagtaacttaatccatctcaatgtagtgttttaataaaaaaggaacctaatatttgaaatgggtctcagacatgtctacaaatatgggtactatttttatgcccgtgtattttcacatttaataaaaatatttatggtcatatcagtatttccttgcttttgattcatttttgtccttgagtataaaattctaagaaagtccgtcttaggaaaagtctattatttccagctttgcttcacgcaaaaccagtgactgaggtgacaaaagggctcttcctttacacaagttgacagggaaggtca

SEQ ID NO: 8977 - DNA, 1145 bp, Homo sapiens
aaatatttgctagctgggtgtggtggtgggggcctgtagtcccagctatttgggaggctgaggcaggataattgcttgaacccaggagggggaggttgcagtgagccaatatcgggccactgcactccagcctgggtaacagagtgagactctgtctcaaaacaaaaaataaaaataaaaatagttaactctcatagaccattctttgtcttttaaattcagactgaggcctaaaacaccactgcagataatttctttgctttgaaggttttattctccaagttccttatgtgtgctataaagaataattaatgtaatgaaaaaatcaatattgtgtataaattatttaggctttactatcattgtaattttctcttcaacacctattgatcggcaacaattcatttgttaatttcttcctaataagatattcattgtattaggtctgtagtagtgctgtccctgcactttcgcaagcaagtcatgaattactaatgatacatggaacaagttaacttactagtgagtggtatgagatggaaaacaggcaaagggagtaatttgaaatgcagtcctatagaaacactgtgtaggcagacaactgctaataattcagtgagtatactcttgcaggatattaatttgtactttaaaattttatcggtacgtgtttttcttggcatatatgtgttttctttttaaaattaattttaaaaatccatgattctctttttttgagaagggggtggaggggccggttttccctaaccatttacagtaatgccctgaaaatgatggttattaaacagtgttttgaccgttgataacagagttacttcagagtttagggaaaatctgagacctttttaaaacctaaagagagatgagtccaagaagaaatcaaactaccaaattcatggcaaagagaacttctgcattgcataatttggcagagtggtatccagaaaagacctctaaatttgtaatcaggcaaccaggatttgaatctgggcttcctcacttactcgttcacttatttattatatcatttcctgccaacatatcagtttcctgaggttggtgagtttgtggtctcctctgcattatcagtgcctagagtagtgcctggtacataatggctgtca

SEQ ID NO: 8978 - DNA, 1133 bp, Homo sapiens
aaatgtgaacaaattttcagaaaatgaggatatttttagtgcccatgatacatagttcttaagtatttaatgaatcacaaaagatttagtatagattatagatagcggaagccaagattcagacatttattacctggagtagaccattggcttacaaaagacagatatggacaagaacagagcagccactgacctaggtccagatctggatgttccactctgatttacagtgttttcttgattaacaaatccctgggagggttgggtaggggaggagacaggttttttatgacagttattgaggggtgagggaatttgctgcaatggcagccacatgcctgttctcaaaatggagcctggcctcctgggttgtggggaccactctctggcccaccttccagggctaggagccagccagggtgagggattcacctctatactccttcccactcctaggtatatgagaatgttggagaattaatggcttcatctggatgaacatcatgcctggaaaacaaactcatgcctatgattttttttttctgttttaatctcagataatgcagtttcttatagcaaagaatgctgcgaatgcatcttccatgtttatgcaggtatcactatgcctccctggactggctgtgcaaataccagaagaggtactgaagtgaggtaatgggtgagatctccagaataaagattacagagggactgtgccttctgttcacatagagccatttttaactagctttcactgaaaggggctccagagcctgtaaaaccaagtgccaacttctcccttgctgcagaaaaccctgatttctaggaaagtgttttggctggccctggcttgtccatacttgggaggcaattcacacagcccgtggaccatagcaaattagattgcttgtatttctggtactaccaaataatgaacaacctggtctctctttaaagttgttctgtctataaagtggagcctggccctcatgaatggctgaaaacaaagtatctaatcaactctgagcataaacgtatgtaacttctattcaagcccttttcccagttttattttacagtgcagggaagtgaactctggggatctggggagatgagaggttttgcagctctcc

SEQ ID NO: 8979 - DNA, 1124 bp, Homo sapiens
catttagtaggctttatagtttatttctatttttaaaaatctgtaaggatatttctctttaactttatagaaaatgtttctcatttgaagaaacgtatgtgaatgtccctgagtctcagaatacaataacgtgaataaaccattgaataaatagttgacaagtagtgcaaagtacagtattcatggtatttatcactagacatttttatatgacataagcttaagtatttattaatcatatgcatggattttattttcttactaaggttctccatacagaatttgttcctcattgactctaatagagaatttcattgagtgttttttgtagagacagggtcttgctgtgttgcccaggctggtcttgaactcctggcctcaagtgatcctcccatctcccaaagtgttggaattacaggcatgagccaccacacccagcccattgttgagatttcaatagacagaggataacattgaaaaatatacctgattgttgaggaaccagggtgttaatagataaaagtcatgtgtcccctcttttacttttcctcatacaaggtaggctcactataaatatttatggaatgagatgagtacatatgagcatttcttcttcgtgggcagggaagaggcggaggagaagtctttgcattgtgtaaattgtataaggtggaatcaaatcaaattgaaattttgtttgccacaactgataacattcactgaacctaactggactagtgctaggaatagtattagaaacagtctttataattcttatacactaatatgctacgtacttagatacaaagataaaaagttaccatccctgtctgtgtggaacttagactgtttaaccattatccttgaccattgtgatggtattgatgtaatactatatttggattaccacagtggaacatatcacatggagagaaccctctctcaacagacatcatctgtcactcgtactaaactctcccaccattggcttctaattcattatggagtagagtttaatatttggcccaatgttaagttgggtcaattgttaagtctactagagttagcatagtcacaccaacagttccgcctgggcaagagtagggagcctcaggatttatatt

SEQ ID NO: 8980 - DNA, 1106 bp, Homo sapiens
gatcacccaaggtcaggagtttgagaccagcctggccatcatggccaaacctcgtctctactaaaaatacaaaaattagtcaggcatggtggcaggcgcctgtaatcccagctactcgggaggctgaggcaggagaattgcttgaaccctggaggcagaggttgcagtcaaccgagatcgcgccattgcactccagcctgggtaaaaaagtgaaactccatctaaaaaaaagaagaacctctgttaatatctgattatctaacccaaatacagagttgtttggtttgttggtttgtttggtctttttttttttttaacatgattgtgatgccatttttatggctaaaggacagaattttgtggagtttttaaaaatagcaaaagtgacatttttcactactccaggtttgaatgaggcttatgaaatgaaaggatttactcctagtatattgaagttctgacttacacaactttatgtctggatttctttactttcagatgaggatggcaataaccagtggcccgaaggtttgaagttcctttttgattcagtcagctctcaaaatgtgggactgcgggaagctgcccttcacattttctggtatatacattaatctagttttttgagacatttgatttaatgaatgccctaaacaccttttaactgattattttagcctaatttaaccttatacttaaaatgataataatgcctttacataagttttgtttgtatttgtattggaagcaattttttttaaaagggccttttatttcacattatgatcttttttgtacacaaaggttctctacagcttgcttgctttctctttgtcttttatgattctgaaagttttattgaacagtttcctctcctttatttggagattaacacaatactggatgtagcttttcaaaagccacattaataatggtgtcttgaagaggagaaggagaatgcaggtgaatccccattatgttttctgggtcttgtgtgacccaattttataatatgttaagaaacctgtatatttataaccaaatagtctaagtttagaattaagtgattattctttgccccactgtgctatatttttttactacac

SEQ ID NO: 8981 - DNA, 8554 bp, Homo sapiens
agccttaagtattgtaatggttattatagtttcactgattttcattttgacttagatgtaaatctgttttgaatgtttctagttaacatccatcagaaggaaggtatacatgtgcctgcaggtagaacatttgcataatatagattgctaaattatttagtgaaaaatagtttagtaatatttctctattgtcagcatcttaggaatcttttggctaatgaggcattataaagtgaatcttcagcaccgactttctgtttcatcttttctaggcggtaaatgactcgtgctaccagaatgatgattctgtcctaaaatccctcgttgagattgcagatactgttccaaagtatttgcgtcctcacttggaagcaactctacagctaagtctaaaggtaaattaagtacgttagtaaacgttctgtttgttattttcagggactaatctaaattattaaatgtatacaaatatgtcttctttgtagttgtgtggagacactagcctcaacaatatgcaacgccagcttgcccttgaagtgatcgtcaccctctctgagactgcagctgctatgttaagaaaacataccaatattgttgcacagactagtaagtcaatggtcttcagatagtttatgtgtattgtggccaaatttttggataaatttgctgagggttgtgtgatttctcagattgttgagaatataatgaatatccttttagaatcagatgaatttgggaaaatgcatctcaatacatgcaagcgtggacccccacattgtggttatgcctttaagactttgcagacaccctgaaatctggtgttaaaaataacatttctagagtggagtgtgacagactctatcatttatatgttaatattgggcacagttaatagagtcaaaaacaattcagcggggatatatagatgcacagtagcgaactacaaaccaaaatagcatgtcttgcttaccagtgaagccaagattagaagaacaaggtctaacactagtcatggctctgttcactatattacattgcttttgttttatagaccctcgttgcagcagaaacttaaatggctattgtgctatggaaatactactttaagtttcattgtgctgggataaggacttgagaactaacctgatcattttctggcctagccatttcttaatgagctaatgagtacttgaacacttaatttagagggtaaatacgtcaccagatttattttgtagtggtacctaccttttgtcttacactgaggtagtggttggaattttagaaacattcccatttaagtcaggaacaagaaaaatatctcctttatcactgttcatgttgtactgactgccccagctgatgcattaagagataaaaataagttataagcattagaaacaatggctgggtgcagtggctcatgcctgtaatcccaacactttgggaggccgaggcgggcagatcacctgaagtcaggagttcaagaccagcctggctaacatgctaaaaccccgtttctactaaaaatacaaaaaattagccagatgtggtggtgcacaccggtaatcccagctactcgggaggctgaggcaggagaattgcttgaacccgggaggtggaggttgcagtgagcccagaccatgccattgcactccagcctgggcaacaagagcgaaactcgtctcaaaaaaaagaattagaaaacaaaaatattgcttatttgtaggctatgtggttattgtctacaaaaagttttaaagactcaacagataaactgctaatcaaagggttaagcaagatccttagatatgagaacattttattgtaagtgttccattattcataataatcatttagaaaattttataggcatgagttatagtaactgggaataaatcaaaagatgtacaagacatatgggaaagttgaataacatattgaaagactaatagaagaacaaattatcagttctcaaattaatctagggttatgatagaacaatcctgaaattcttctgaaagaacatagggcctggagtagccaagacaattttgacgaataaagtggagatcttgtttcatcaactctgtgaatttagaatgcattgatgatgcaggtgttgacaatggatcggatggaacaaagggtagagtgtaggagaagatccgctcacatgggaacaaagccatttttaaaaagataattgatcaaaagttcttggggccaggcatactggctcaggcctgtaattccagcaatttggaaagccaaggtgggtaaattatgtgagctgctgagtttgagaccagcctgggcgacatgacgaaaccctttctctgccaaaaatacaaaaattagtcgggcatggtggcacacgcctgtggttccagctactcaggaggctgagatggaggattgcttgagcccaagaggtcaaggctgccgtgagccaagattgcaccattgcactccggcctgggtgacggagtgagaccctgtctcaaaaaaaaaaaaaaaaagtttctgggatatctttctttcattctttctttctttgttttttttttttttgtttgtttaataggtttatggggaacaggtggtgtttggtttagtggtgatttctgtgattttggtgcacccattacgggagcagtgtacactgtacccattgtgtagtcttttatccctcactcccctcccaccctttcccctgagtccccaaagtccgttgtatcattcttacacctttgcatcctcatagctcagctcccacttatgagttgagaatataactggttatttctatggggaaaaaaattccaactctagacagcttattaaaaaaacaggccgggcgcggtggctcacacctgcaatctcagcactttgggaggccgaggcaggtggatcacgaggtcaggagatcaagaccatcctggctaacactgtgaaaccccgtccctactaaaaaatgcaaaaaattagccgggcgtggtggcgggcgcctgtagtcccagcttctcgggaggccgaggcaggagaatggcgtgacccgggaggcagagcttgcagtgagccgagataccgccactgcactgcagcctgggcaacagagcaagactctgtctcaaaaataataataataataataataatttggggtctactcaagacctgaatattaccttgcacgctggaactagttaaaaaagttaagggctaaatattacagatatattttacaagtaatgcttaatagtagataattttctaagactgaatcacaaaccattgatgtaaacattgccaaattggcaaatgcgaaaacaattttttgaccaatcagatacaccataaatgaactgaaaaaataagccacaaactggaagaaaataattacagtgcacacaatcaacagttttgttatctagagaatacacaaaggctgagaagaggaaattcattgcttttttcttctttaagatggggtcttgctctgtcatccaggctagagtgcagtgacatgatctcagctcactgcagcctcccaagtagctgggactacaggcacgcactaccacacctggctaatttttgtgttttttggtagagatagggttttaccatgttgcccaggctggtcttgaactcctgggctcaagggatcctcccacctaagcctcccgaagtgctgggataacaggtgtgcaccagcaggcccagtcaggaaattcgtaaaagagggatctgaaatagctaatgaaccctgctaagtctcaataaaaacaagtgtaattgtggaatacaagttgtccagaagtttgacagtatcaattgttaataaaagatgtggaactgagaggacgcttattccacccccagggcacttcacacatttttgtgaaataacggagacctccacttaaacttcacatagtttatgcaacagctgtgcagagcgcagcttgtttggtaattttctttttttctttttttagacagagtctcgctctgtcgtccaggctggagtgcagtggtgtgatcttggctcacagcgagctccacctcccaggttcacgccattctcctgcctaagcctcctgagtagctaggactacaggtgctcgccaccacacccggctaatttttttgtttttggggtttcaccatgttagccaggatggtctcgatcttctgacctcgtgatccgcctgcctcagcctcccaaagtgctgggattacaggcataagccaccgcgcctagacttgtttgataattttttagtactatttgaagatagtaataacaatttcatgcctagactcatgcttgtcaaagaaaagatgtaataatctcatcaaagcaaattttataggaggaaaaaattggaaacaaccaaaatgtttatcagctagacagtgggtagtatgtttatataatggaatgctattaaataaactgaaatccttatgtgttgagaaaaaagcaaattgccgaggtacatatattatgaaaccatttattatataaaaaatcaaatcttgaaatagtactataattttgtatagagatatggaaatctgtagttcaagtgtgaaaaaacaattgcggaatgagaaacatttgtgatgttgcttcttacctctggtgatggggagaatgtaatcggatttgggaatttcataggagggtttgacttaatgaatgttgctttttaaagaaacgataaaagcaaatataacaaggttaaaatttaacaaaccaggttttgggggcacagacaaataattgttttgtcttgttctcttacaggcaaagtaaaatcttaaaattcttgtttataaatagtgatatggataagataaagtcacagtcttcgggtatgaaataattgtttactttagttcctcagatgttagcaatgatggttgatttggaagaagatgaggactgggcaaatgcagatgaactagaagatgatgattttgacaggtaatcaaacattgtgtccagggtggcagtgaaagccctagggctccacggtccatctcttcactattgcaccctgtaacctgaaggtaaacttttaagcctggaatatggggcactttgccttgctgttgtatttattgctgtgtcacatgttataagtagtattttctttagttttcatgtataatttatattaataaaatttatgtttcttggaagttcataaaaatattttaatagttaatacataaagttgtattttataatcaggaactgaaagatacctacaacaacaaacaaggaagtttttcttttttaaaaaaaagtatgacatgaaaacagcaaataaagtagctatgttttttgtttggttttgagacggagtctcgctgtgtcgcccaggctggagtgcagtggcgcgatctcggctcaccgcaagctccgcctccggggttcacgccattctcctgcctcagcctcccgagtagctgggactacaggcacctgccaccacgtccagctaattttttgtatttttagtagagacgggatttcaccatgttagccaggatagtctcgatctcctgacatcatgatccgcccgcctcggcctcccaaagtgctgggattacaggcgtgagccaccgcacctggccaagtatctatgtttttaactgtcgtactctaaattatttccaagttttttgttgtttttgtttttgtttttagtttgaatatcttttaaaacgtgtataaagcagcttttttgtgataaatgcttttacaggcagagacttcccttagaataattgtttcaacaaaattccctgcaatacacatcatattttcctagtaaaaagcagtttaactttaggataggcagcatccagtggtgaaaagatgagagtcaactgggtagagtattactattgtacttatttatttcagcttaggaagtcccatgaatacaggaaaagtcaaccaaaatctgtattcactgtgcagtagtaatgatggccccttacatgtatgtgaaacatagcacctctgagctctgttactttaatcaactttattagcagtcccagaggtgtattatattacagttgcagaaagggagattgaagattgagtgatttgtctgaggttatgtagccagttaatggactggggttaattaccattgttttcattcttcccagtgcattatactaccaccttttctttaaaaaagctgaaattggctgggtgcagtggctcacacctgtaatcccagcactttggtgggcagaggcaggcagatcacctgaggtcaggagttcgagaccagcctgaccaacatgttgaaaccccgtctctattaaaaatacaaaaattagccgggcctggtggcagacacctataatgccagctactcgggaagctaagcgaggagaatctcttgaacctgggaggtggaggttgcagtgagctgagatcacgtcattgcgctacagcctgggcaacagagcaagactccatctcaaaaaaaataaaaagctgaaattattctcctgaaagacttggagtcagtataaactactaggttaataaaagtaaaaattaaagatttttggctttagaatatatatgcatttttgagacttaatcccattgttaaaaatgactgatttctggctttaatactgtcttgaagtatatgaaagtaatctttcactggaaatcacctgataacggctgaagagaagaccagggctaggtcgaatttcctttttggttcagttactgtaatgtgctgctacctgtcctttcatttgccctgcaaatggcacttaaatttatacagtttaagaaactttgttttctaaactagatgaataagattttctcatttgtgaaacagcataaatatattttcagggtgagatttttttaagtctaaaaacctgttctgaagataatttatagtttcatttttatagtattgtctttacatagtaaagataatgcacatgaaatacactactgatcctccagttctaagccaggataagtccaaatgcttttatgcccacattcctttggctttcagagaagacaatagaattgagtttcacatagctatgcatagtttttggcagtgcagtttgcacccctttaagggtgaataaactcacagtggggaagattatacattctctgcacccttttcagttttctatgttctgttcattgataggtttgaagactgtatttctaggaaatgaaatacatgaggctctttcaatactgcttttactggagtgttgaaagtgtcagaagctatttctgagaacagtttttagccagtagcgggtgggggtggtcttgaaaaataagattcaggctgggcacagtggctcacgcctgtaatcttagcattttgggaggcccaggcgggcgcatcacaaagtcaggagatcaagacaatcctggctaacatggtgaaaccccgtctctactaaaactacaaaaaaattagccaggcgtggtggcgggcacctgtagtcccagctactcgggaggctgaggtaggagaatagcatgaagctgggaggcggagcttgcagtgagccgagatcgtgccactgcgctccagcctgggtgacagagcgagactctgtctcaaaaaaaaaaaagaaaaataagaatcaggcatgactttctaaactatggtggatcatgataaaaacatttactcttttttcttttctaagctgcagagtttttaacccctaatttcaattccacatttaaagacagcttgaattctttctcagtcttagtttaataataatatggttagaagtatgtctgtagagtatactatttcttttgtgtttcagatatattgagtacataattctgtttatgtgtttagcaatgcagttgcaggcgagagtgctctagatcgaatggcttgcggacttggtggaaagctcgttctgccgatgatcaaggaacacattatgcaaatgcttcaaaatcgtaagctgtgtccttcaaatgctagaagagtgaagttgtgccctttctaaagcttaaattctaagatatgtttagactgttaaaaattaatctttgtctttttatcatccatatttaacccaattcatttattttaccgataaaattgtcaatcccaaagaaaatgtacagatttacttcctagccaaaagtatttagatttgaatttgaaaatgatgttattatttgaatttttatggaatattagaatgtttgaatcatatactcttctttcacccaatatcttttatttttaaaagaagaaactctatctaatgttatcaaaagagaaaccacttctttctttctgtttttgcccctgacggaggtgatggtggaagcccacctgccctggagggcagctgttgttgttgacacaggatttcgccatgttgcccaggctggtctcaaactcctggcctcaagcagtcctcctgcttcagcctcccagagtgcttagattataggcatgagctaccacacctggcc

SEQ ID NO: 8982 - DNA, 1174 bp, Homo sapiens
gatcttctggggagagggggttagaagataaaggaaggggccaaagagggaattttctttatgacgtagtaagacagcacaaaatataatcataagtagaggaaatcagtgaagaaaaaaatgaggatgaagtgtaggcattaaagttgatgaacacaaaaattttgattccgtatctgtactcaagaattagctgtgctttgagatgagactaacatgagttagaggtgttgtgttaatagaagagagaaaaaaaaaatctcacataaatagttcaacatagattctttttatagaaatttcctccaaaacctacagtctctgcttctggagaggtggtctcattctgctgtttcagaaaagcattcaagaacttgaagggagtagtaattgtaaatttaaatacttcttccagttttcctttgaggtaataatttgtgtcttccttctagctgattcagaaaggcaccaagttagttttggaacaagttgtgacatccattgcatcagttgccgatactgcagaagaaaaatttgtcccctactatgatttatttatgccatcactgaagcacatcgttgagaatgcggttcaaaaagaactgagacttctgagaggaaaaactattgaatgcattagcctcattggtctggctgttgggaaggaaaaagtaagtaattttttttttttttttttttttttttttttttttttgagacagagtctcgctctgtcacccaggctggagtgcagtggcacgatctcggctcactgcaaactctgcctcccaggttcatgccattctcctgcctcagcctcccgagtagctgggactacagacgcccgccaccacgcccggctaattttttgtatttttagtagagacaaggtttcactgtgttagccaggatggtctcaatctcctgacctcgtgatccgcccgcctcggcctcccagagtgctgggattacaggcgtgagccactgtgcccggcctgtaatttctattatgttaaatttactgtacctaacttggctgtggaggcattgagagtactagagggattttttccttctgaaaaatggttttctggatgcttgtttttttccttactcctttcacattgctcctgttttatatacaaattcttgccttcatcttttcattgtttgt

SEQ ID NO: 8983 - DNA, 1132 bp, Homo sapiens
tagtttcatttagatgattcagatgctaagaaagaaaaccattatcacttactgaaagtagaaagaaatacccaaggttctggtctttgtgttttgcctcacctgctgtccatatcccagtgtagtgagttcacagggatttcattattgattctgaaccttttaagtacataacctttagaaatgctcttactgcttaaagtactgtgaacatatcaataaaacattgtttctatgaaataaggaaatggctttctttatcacgtttacccattgttttttaatctattttaattttaaaatttttccccagatctcttacatgatctcagcatgggccagaatgtgcaaaatccttggaaaagaatttcagcaataccttccagtggttatggggcctttaatgaagacggcttcaattaagcccgaagtagcccttttagatagtaggtgtctttagaaggagctatcggttataatagttctctctttgttattatttttcatatgcatttgttttcttctccgttaatagcccaagacatggagaatatgagtgatgatgatggttgggaatttgtgaaccttggagatcagcaaagctttggtattaaaactgcaggactagaagaaaaatcaactgcttgccagatgttggtaagagagcactgtttttactaaacttttattttacatcttatatacatttcatatgagtgcttttaatagctgctaaagaaattactttggagagccagtaatatgttccttaaaaagtaaagttttctttccattttaaagaaatcgtatggataaacctttcattatcagtgctgttttaaatagcaaaaaacaacaaatagcccaaattcctgttagtgggaagatgaattactgtgccttggagtaatatacagccattacaaaaagtttataagctacatgagggaaggatttttgttggttttgttcttagtctatagtaggtggccatggaatgttttttaaacaaatgaacagaagtgtgttcatgctatttaatgtgaaacaaaacttgtatgatttcaattgtgtaaaaaaacagatatggcaggaaaatcaaaatgttcggttattatcccttatggtgttt

SEQ ID NO: 8984 - DNA, 1215 bp, Homo sapiens
gctggtctcgaactcctgacctcgtgatctaccagcctcagcctcccaaagtgctgggattacaagcatgagccaccgtgcccagccatgattttttaaaaatacaaaataacagaagcgttttctacagatttacaaagtaaatgcttcaattaactgatggtttcagggttttttgtatcttttagaatgatttttcctcaattaagtgatacattttgtttgatgtattgctgaaacttgctgaatggaatacgaatgattccagcctttgaagggacaatatatacgacaataatttcctttttttttttctttttgtcactcaccaatactacaatcatttcatgacccttcttttaagactctttttagttggaagactaatttgacagttctacatgcaactttaaatgtagttctagtcaaaatacaacctcctgtggtccttatgattttgctgtttgttaatattaatgcttgaagactaacatgaatctttatttcctcccaatactttggttacaggtttgctatgctaaggagttaaaggaaggctttgtggagtacaccgaacaggttgtcaaactgatggtccctttactgaaattttatttccacgatgatatcctacaacttctgaatacaaaacatgtctagatttagtaaacttgtagtttcttggagtattagacagtgttgactgaagtagacttcaccatgattgtttgtatttgcactaagtgtactcttaggtgataaactcggttctctgcatgtgcctttgtttccacttgtgccaaaacatgaaaaagaaaacgtgacctatcctatgtttgtcagctttctgtggcccacttaaggatttaaggataattagcaaatgattacaattatatatagttgctactttccccaaatatcttttggtaaacgttaagaaaataagacttttattttaagagatggtgtctcactctgtcacctaggctggagtgcagtggcgtgatcaggacgcactgaaaccacaacttcccaagtagctgggacccaggtgcacaacaccaagcccagctagatttgattttttttttttttttttttttttttaagagataaggtctgcctatgttgcccaggctggtctcaaactcctgggctcaagcagtcctcctgccttggccccacaaagttatgggattacacacctgagca

SEQ ID NO: 8985 - DNA, 1148 bp, Homo sapiens
cctcgtgatcggcccacctcagcctcccaaagtgctgagattacaggcgtgagccaccacacctggcagaataggacttttaaaacttactggggaatatagttaggcagcttttaaagtttaaggaccctcgggtgatgtgatgagtactgtaaatctggaggccactaatctctctgggtctctaagttagtagagggctagtgctcctgtccatgctggggcagtcccccctctgttgccattctgtaatgacatagccaagaagacaacacttcccatacactttaacatttctttaccataatcaatatctgaaccaaatacaaaaatacatatattcatttgcatgaaaatgtgaggttttagctgaacttctttcaaatgcttattttagaagcacttcccctgctggtaagagttattcagtctgcggattctaagaccaaagaaaatgtcaatgctacagagaactgcatctcagcagtagggaaaatcatgaagttcaagcctgactgtgtaaacgttgaagaggtccttccacactggttgtcttggcttccactacatgaagataaagaagaagctgttcagactttcaattatctgtgtgacctgattgaaaggtaggaaagcagactgtgaccttatttccttctcctccacagtgcttcctggtttttcttgcctaacatcagtcttttaaggtttaaccacatgatctctgcacagtcctcagttgtataggtttataatagtgctgtctttataaatcatattaagaaaccatatcacagttaacattgcccttataataaggtctaattttgagttattctttatgaaattagattcaacagatgaggcactttaattatttatttctttgtttttaaatttttttggtagcgacaaggtcttaactgttttgcacaggcaggtcgcaaactcttggcctcaagagatcctcccacctcagcctcccaaagtgctgggattacaggcatgagccaccaaacccagcctaagggaatgttgtttagtgtctgttttctaagtccaagttccccccaaatatcagtcagatctaagctctgtcgctattattatttttaggttatgaataaattcaagggctacaaccactg

SEQ ID NO: 8986 - DNA, 1895 bp, Homo sapiens
acttcctatattcatgtggtatatgggttactttaagatgttacctgcttagtgtagctttttcagtgcaaaaatgaagaaaacttactggaaatgaaatgaactttaaaaaaatgaacagatttcttgcttttacaatgatactcatcaaaataatgtacctagggagaaggtattttgccatgattacagtttacctatgatgatgattaaaatccttccaaatgagcatttcgtcctaagtctgtgaaaatgtttctttccctagacttctggaggactgtggactgagtgcatagcacagctcagtcctgagcagcaggccgccattcaggagctcctgaactctgcgtgaagggccttaatgtcacccaccagaaaactaactccaaataaacgcttaccctttcctttaggtttctttgttttgtttttgagcaaaagagatcggtagtgttgtgtgtaggccattcttctggagagccacaagcaggaagagcagcgctgtgttgcagaatggagtttccatggatttctaccagaccactgaaggagttcctggaagccctgcggtagctagcactgaagactatttttctattggtataacccgcccacctgaaggggaaagggaaatcaaattaatttttctcgttagacataaggaaatttaaggaaaaacagctttaagaacagttactcagcgtagatgtgtgttcacacaaattgctctgcattcagtgttcattgtgaattgggagtgtgagtctttctgtagggtagaaagaagcctcctacccagcaaaccagtagacccaaaagttgaaaaaaactgatgacagacaacaagcatgaagatggcatatttgatgtcactttggttctttttcccagaaggcttatacagtgactcagtcgggaagctttccagcttccagcccttgaatgtgaagtgtcattggcatgtctggcagtagtctctcattcactcctcaataaacaacattgaatacaaaagaggcttgtgtaaaaactcagtactgtctggcttggattcatttcatgtttttaatataagaatgatctaatatttttttaaagtaatagctatcagtaatagctgagtgttttttcccctaatattttccttgtgcaattcagacttaagcatcgagtttttaccatcttccactttaagctaagttatgatacctattccattcacaattggtgttctttttaaggtttgcaaatttcagccaattttgtagctaagattgttctgatcagctcaaaaagatttggcttagtgttttcattgcaaattataattgctgtagagccacacacaacttttgaacttttaattataagtgttatggctaaagttatttactgaaaatttcagtaaaatgtgtgaatgtttctttatgtattaacctcatagcagtaaatgacttgctgttgtttaatttttctaaggcatcttaatagacttctgttgaaaacttcagtgttaacatttttatagtttgtactaaatttaaccgtgatataaaaatgaattttatgcatagatcagaattttaaattaaaggttttttctttaaatgatttgtattactttattaaaactaaatctgaaatggaatagaaaatagaatggattacatacagatggtttccttgttagcagatgcccttcaaatatattttacgtttgcagcacaacaccattgcccggaggcttccgaatctagcaaagcagcatattaaatgactccacctgcgcagtccttgtgttcagtggatgaatacctgtgggctcttgtaatgtgtggtaatatttggagctttatagcctgtattccttgggagaaaaaaatgggaattgg

SEQ ID NO: 8987 - DNA, 1205 bp, Homo sapiens
acaggaatcgtcaaatgtaagcatccccgagcaaaacacgcttcaatcattattttgttttgctttttcctacagcagtgatttttatctaagtattttaagagcagttgatcaatggcagtatactcagttgtgtattgatgagatttttcactttaagagttgctcatagagtttttccctcactggctttgtaccaggcaagcaacttaatttctgcttcttggccagtattcacaaaagcagcaatcctggtgtaattaatggtgcttacagtttgtttaaaggctgtttatcatacatcctgatgtgctgcgaatagtcactacttgcctcaagaggagcttgtcctatgctaataaagattctataacattggccaaagggtccgtttatacattctttgagcctggtggagcacgtttgctgaggtgatgtggtctcctcagtgtcactgtgaagagctcagtcaggaaaagccagcagcatctaccctgccaccctccaaaccttctgactttggggagactccagtcccccaggtctttacccagcctgcagatctcattctagcttaacaagggcatgcgtgtgcatgaagttgaactaagagtggaggaaggccagaggtagggttgggtgtgatactaggtagcagatattacagacttctgaatgcattcagatttccaaagggtttcctgagacctctcaaccaatctttctaggacaatagctagtgtaggggtctcctgactcaataggggacccaggccttcagataccagccactcactggctgctctgtgacgtgctatcttaagaccgtgaatggaagacaagccctatgtaaacacaaatcttaaagccactgttggctactcgagggcctccttgtgctaatatcttttgttggatattatttcaaaatatgtgaattttagacccttttgtggttgcctttgctgccgcttgttaagggcaaaataaaaacgcaagaaattcttttagcatgaagaaatacatttaatgagctccagaactcaaaataaatggcttcagctccttgaacagtcatctgtatgccattgacaatattttattagataggcgtttaattagaggaagtctgtgggccagattcttccctgcatgtgtgattcatatttggaaatttctgatttatctccccccaattgtgccat

SEQ ID NO: 8988 - DNA, 1164 bp, Homo sapiens
cacaaagagtctcttgtgtattgatggccggacacactcgtttccgcagtggctgctttcctggaagacgtttcctttcttctgtattaatgaagcctggtaaaattaacacctgtctgaaaatcaaaaacatggcttcccagcagctctcctgtctccacagccgcgttttttaaccccgacctctcagcgtctgaatgaacagcgctcccacctccagtcctggcatccgctgggggcgctgttctttagctagtgccagtattaaaacattgtcattacgagagtgccaaatgacatcttccctccaccctgcccctgaaaaacagtacacacacatccgttcaacacaagacagggcaagtgtttttcttcctaaaaaaagttctttcttttattattttcacctattggctgctgcattttacgaagtggacttcccggtgtttgtttgtttgtttgcaatacactcagtgcagccttaagcaaatgagatcattttcagatttcattttttttttcagtctttctacttttgtaataataggaagttagtaggactcacttctctgattaataagcaatttgcagcacacagcgttccactgcggggtttcacgctcacctgaaaacacctgttcccaacctacttcttggtgcaagttgaccaaatcgttttaagtggtaactctttccaaccgtagcagggttgttttctgttaagcaaagccgagatccagtgcaatacctggactgtcaccgtcctgtgagtggtgtacacaatgggaagataataagccgtggtgttttgctgtctgtctgtgtcacaagcatgaaaacccgtgtgtcattgatcagcaccatttgtggtatgttccgtgatgagcgtttagtgagcctgctggctgcagagcactatgaaatcatggtacgtagtccccggcacctgtcgttattcctatatcctcctgcaactgtggtttgaaactgcgcattctctagtagtatatatcgtgcctgtcttcaaaaacatttccctttttatactcattccccccaggcatggggtagtgtcagtcggactgcacagggaacacggtttccagtggctttggcccctactcgggaaacgtctgcctgttctcgatggtgatggggtggctg

SEQ ID NO: 8989 - DNA, 1098 bp, Homo sapiens
attgaggtattttattagaagtggatttgggttgaactcttaatttgtataagggatatattttggttggggaaatagaactgagttgctaattcttattgtactcattactccatacaagaatgttatgttgaataataaaattggagaagatttcattttgtgtttccagggagtattctgtgtggggaactgtttccttacgtgaggccggcggcataagtcaaagatgagttttgtccttgcgaatcacacagattgagtctgtgttccccagggtgtgccgttacctgatttttaagtgagccagggcggacagcagcttttctgatttacagagttcttcagatttacaaatggacaatgacatcacagtttttagcactgaagccagtctcatgctagtaacagtgggtgagccgctcgagggactgggttctaatgaatactggtatgaacggggagtctctgcagtcgccagacaaatcatactcagccccttcccccgtagagcaacaagtggttcttttagagttgactggcagcatttcctgtcgggggaggtggggtttgatggagttagaaagctcgcctctgtgtacattctctcctgggctgttactttctgtagacgcacaaaatcagccccaatgtttttaagggcatcttagccaaggaagctggcttttgtgtcgccacttccaggcctgcattaagagagagcccaggcaccagggctaccactggaacctgcctcagcgtcaactgctgctggtctgtagccaggcccagcctttgagacgggtttactgtcaccagtagcctctcagtgccagccctgagctgctcctggctcagctgcccagagcctgcagcctggggaggtactcagcctctgggagacgagggccgtggactgggtggctggtagctcctgcgtttttgagctgtgtcctggctggctgctgccaatgaggtggacaccagtgtggtttggggtgcactggccacttcttgctgggttctgattttcttggaagtgcatctgccttccttatccaatagttttatccctgcattgctcttgtgaagtggctg

SEQ ID NO: 8990 - DNA, 1081 bp, Homo sapiens
tcctgctttaagttgataactccctctgggagctggagaatcgctctggtggatgggtgtacagatttgtatataatgtcatttttacggaaaccctttcggcgtgcataaggaatcactgtgtacaaactggccaagtgcttctgtagataacgtcagtggagtaaatattcgacaggccataacttgagtctattgccttgcctttattacatgtacattttgaattctgtgaccagtgatttgggttttattttgtatttgcagggtttgtcattaataattaatgcccctctcttacagaacactcctatttgtacctcaacaaatgcaaattttccccgtttgccctacgccccttttggtacacctagaggttgatttcctttttcatcgatggtactatttcttagtgttttaaattggaacatatcttgcctcatgaagctttaaattataattttcagtttctccccatgaagcgctctcgtctgacatttgtttggaatcgtgccactgctggtctgcgccagatgtaccgtcctttccaatacgattttctgttgcaccttgtagtggattctgcatatcatctttcccacctaaaaatgtctgaatgcttacacaaataaattttataacacgcttattttgcatactccttgaaatgtgactcttcagaggacagggcacctgctgtgtatgtgtggccgtgcgtgtgtactcgtggctgtgtgtgtgtgatgagacactttggaagactccagggagaagtccccaggcctggagctgccgagtgcccaggtcagcgccctggactgcttgcgcacttgctcaccgagatgatgcagttggaggttgctgatctgtgcgattgctgtagcggttgccggggaccttaagagttattttgcttctctggaaggggcctatgcttgctaggcaggcagccagtgtgtctgtttttcttggtttgctgtgggaccttgcttggcgagggggaaaatctctgggtttctggagtgggagggttcgtgcagcagctgttgactggtacatgaagcattcttttatgtttgtt

SEQ ID NO: 8991 - DNA, 1106 bp, Homo sapiens
agggagtctcactctgttgcccagactggagtgtagtggtgtgatcttggctcactgcaacttctgcctcctgggttcatgtggttctcctgcctcagcctcccgagtagctgggactgcaggcgcccgccaccacgtccggctaatttttttgtatttttagtagagacggggtttcaccgcgctagccaggatggtctggatctcttgacctcgtgatctgcccaccttggcctcccaaagtgctgggactacaggcgtgagccactgcacccagcctggaacccttttaaagtgataaacacctcagtactttttacatggcctgttgcatagatgatttcttaatattagctatagcaatcaaatgagagtgtttttgaaattccccgaaaataattcttcttgagtttgtcattttatgtcagagtagtagtaattccgttcctttctgctggaggacttgtgatagtaagggcctttggaaaccagcagaacagccagttgcttatcggctgtggtgtgcgagtcccgtttcctaccctggccccgttatgcgtacatggtctataaaagaatcatgtgaagtggggggttgaggattgtacagaaatgggaaccttcacccagaaaaatatcttcactccatctccgttaaagtatttttaaagcaaaagcatctagaatcccagtacttgagtatgtagttcttcctattttatttgccagttgtctgcgtacacacatttccttaagtaattgcagtcataatgtaggtacacgttgatattgttcctcattcagcattgtgtcataaatatcatcccacatttccatatggttttcatgatgattgttttactgtcttaactgacttctgtgcctcctttaatacaaggcgtgtcacatctttttttttttttttttttttttttgagacggagtctcactctgttgacccaggctggagtgcaatggtgggatctcggctcactgcaacctccacctcccgggttcaagcgattcccatgcctcagcctctggagcagctgggattacaggcacgtgccaccacacctagctaatttttgtatttttagtagaga

SEQ ID NO: 8992 - DNA, 1222 bp, Homo sapiens
tttcactctgtcaccgagactggagtgcagtgacacgatctcatttcactgcagcctccacctcctgggttcaagcaattctcctgcctcagcctcccgagtagctgggattacaggtgcccatcaccacacccagctaatttttgtgtttttagtagagacgggttttcaccatgttggtcaggctggtctcaaactcctgacctcaagtgatccgcccacctcggcctctcaaagtactgggattgcaggcttgagccaccgcgcctggccccatttattgtcttagtagaatagtactttaatgtgttatatgaaagtactgattccttttgtctccctttaaatagagatagaacttgtgcttaaatagctgtgtgagtgtacgtgagctaccttaagctatgggaagtagatgatattaggcttacaggttgcatattagaagacaaacctaacgttactcagaggtttttgtggattgtgagagttaaaagcactttctaaactgtgaggttggaaggtaaacccattccataagtaatcccattatcccaaaacaaagttataattcaaataaaggcgcatctctctaggccacagggcgctcggtcacatgctttgctgacatgtcttcttctgccctatctagttgtgtttgtccttggcagtgggatgtacaagaagttcaagccacagggcaacatcatgggtaaagtggccaagtgcatcggtgtaagtatctcagctgctctttctcaaggctatttaaccacctcagaaccttctactttctttaaattaaaatttaagctttgactttcctttaaatatatttttagtgttcttaactgtttcagtaaattgtagcttcttctaaatgcaaaaagacacaaacagaacttaataagggaagaatagaaatggctcttgagcttataaaataagatcaatggtcaaagaaaagcaaatcaaagtgactcttcatctgtcgaaatggcagaacagtgcttgaggtttgtcagggagcagtgaatcaaaaatggggaggctcaatttggcaatgtgtagcaagagtctcaggtgttcagttgcttcaagtcagtcatgctgctttcaagaattaagagtaagaaaataggctaggcactgtggctcatgcccgtagtcccagcactttgggaggcctaggcgggcggatcacttgatcaggacttcgagg

SEQ ID NO: 8993 - DNA, 1155 bp, Homo sapiens
cttgtaaattttatcatctgttttacccctaagggttcattcacctaacagatctgtacatctggaaccagtgagggtatgatcccggatttccatgtgagatgtcctctcctgaggaaatgctgtggataatcctcctcagactaacaataccactggatgctttatttcattgctgtctctatgtggaaggattagtgtagggaataaaatgattaaatgctagtttcctgctctagacagtcaccggtaagttactgaatctgcgttggctgcctttcatgccactggtgctcctttgtggctatggaccagtggggggtgtatttcaatcctgtgcttgtttcttttttgtcagagtttctttggttatcccctgagcatcttcttcatcgtggtcaatgagttttgcgaaagattttcctactatggaatgcgaggtaactgtattggccgtttctcacccttcagggaagagcgggagtggccataaccagtcctaactttgtttccccctcctcttccacctgccctctgcaaaagcaatcctgattctgtacttcacaaatttcatcagctgggatgataacctgtccaccgccatctaccatacgtttgtggctctgtgctacctgacgccaattctcggagctcttatcgccgactcgtggctgggaaagttcaagtgagtggctggaaatttcttgttcacaaacaagcgaaaaagtaaatgtaggttttgtagttgggaatggtggaatctgggaatgatgaatcaaagaacagaaactcttaggagaggccaggtgtggtatggttcatacctgtaatcccagcactttgagaggctgaggcaggagtttgaaaccagcctgggcaacatagtgagacccatctctaccaaaaataaagaaattagcaaggcatagtggcatacacctgtggccccagctagctgggaggctgaggtgggaggatccgcttgagccccagaggtcaaggctgcagtgagctgtgatcacatcactgcaccccagcctggatgacagaacaagaccctgtctcaaaaacaaattaaaaacagaaacaaacccttaggagagcatttacagcgctgtttctgctcagtatcctgtccctagagcctgaaacagt

SEQ ID NO: 8994 - DNA, 1129 bp, Homo sapiens
aaaccaggagtttgttatttttagtttttctttgccatttagcagcagaaattcaatccccactgataaacagaacctgctggacctcctttgctcagataatttctataacacagaggttaactcactattggttgaaataaatgcttaaactttgaagcactttttaaaaaatcataagtacaccagtgctgcacctccaatgataatcatttaggaaacacagaaaacaaaaattaaatgaatggtccacatgtgaataaataaccttaatccactcggatatgcagcagctcttcccactgcaaatgggttttgtggtggtaacttgaattggaggagagagacagctggcctggtgctgctgctgctgccaaaagccatcttgttaacatggtttatttccattctgtcttcctgctacccacaagagccctgtcctcctgtctccctcctctttcatcagttttcagtggcatactgtcctcagtcacatttctcctgctttgccagtaaacagcatgtagctgattcttctagtcctcgcctgcattcctacaattcctgctcattccgaattggttctgttatctcctaagttgttgcaactcctagaactcagccttcttttacatctccaattctcattatgtgtttgaatggcttcagcttttccctccgctagctctttgagctccaaatcatcaactcagacaaaaaacacagagaagggagtgcatactgtatgtacatgaacatgtttgtgtgtgtgttttatatatatgtacatgtttgttttcatctctacctgggtattttttgggaaatttatggccatatgtctttaaaaaaaatcccatttaacaacaaatacaataccttctgttgggccaaccaatatgacatagatccaatatgtgagaaagttgccagggaaccccaggagtccaaaatgattttatttcagaagagaataaaaataggaagagtccctgtacatctgcattgttcatttccgctatttctgtagagtaggaaaggctttgtcagaactcagcttgaccagcagggagcagcagaggcccatgggaaacggaatcctttgtaggtctgtccccatcaccactgg

SEQ ID NO: 8995 - DNA, 1203 bp, Homo sapiens
tgcttgggtaagaataaaggtgttaaaactcatataatcccttcctttgcatgtttgttctctgtgtcttccaatgcattttttaattaaaaaaaatacatgtcttttgctttttcagaacatatataatccaaaaagattagtgacgttttgacagtcgtcagaacactaaccattagtactgcattggagtgatgctcacttttttcagagtagcatctctaaagtactttctaaaaataaaaaggtccctgctttggcctgatttttgcttctggatcatcaggtgctttgccgtgaagtgtgcaggagctgccgcctgtctgtgtctctggctgctccactgtgttcagtcagtgcatggccatctccctcgtgccatgttctggcttcactaacactccccgtctcgctgcagtgtaacacgtctaacttttgcttctatcccatttcactcatgttgcaggaaccaggaggggttgggacccatagttcatgatcgaaagtctcagacattgcctgtttcccgtaacagaacaggaatgatgcatgccagattgcagcagctgggcagcctggataactctctcacttttaaccacagtaagtcccatgacatgccatcgtaacagccagccatctcatgtgccatctcagaggggagagccctaggccacacctaccacatcaccaactcaatttttcttctagctcaaagcaagtaggatgaagagctcatggcacagttcccttccttggaggagcgtcctcagcatttgggagtgacacaatgtggaacgtgctcaactacagcactaaacctaaaagtgcctgaccctttctgcatccctaaaacaaaactcggctgggtccatagccagccgttctcaagaattctaaacataaaatttggattcatcacctagaaccgacttaatgttggctttcccctgcaactctgagaacattcgggatggatttctttcaccccttctgatcctgtgcatgtaattgatcaagcgtccacattctgacattccagctctgaatggatgttaatccttgcactactgtgaaaacataaagcccatgaatcaatttgtgagggtgtggaaaagcatccaataacaaagtgactttttctgtgttttcagtgtgagaaagatatcaagtgtgcttggaatttctgtagacaatggtaag

SEQ ID NO: 8996 - DNA, 1286 bp, Homo sapiens
agccctttctcatggtcttggccctaaaacatattttcagggcttgtgacccagtgatcagtggtcacccttaaagtattacagatacgtgcctgttttacatgagaggtaactgtttatgtgtataagtcatcttaataaaataacatgaaatttattagctgaattgggtagatactgcttttctaagttgaacctaacttaagctgatgcagaaactgagtcagaaaagttgctataattttaaaatataagaagtaaaagtgaaatcttatgtagcatctttatctcattttggtttgtcagtataagtttctgatttcctttaagctctttacttttagaaacgtgaatttacaatcccttatccaaaactgctggggccagatgattttccaaattcagaactttttggatttctgaaaaatttacatatagactgtatcccattacatcccagcagcatctctctataataaaaaaaaaaaaaagaatttctgcagaactattattgttcataataattgaataaatcataactaaaagtagctttatgtctattattttgggtcatattttggtgccaaatgtatttgcatgaactcaggaggaaagctggttttcagagtttcatgcattttggaactacagatgagagactgtgggcctggccctcagtggacgcttggctcatagtctcctgacctctgctgagttaaaggcgggagttatgtggtgaaacgagattcaacaccagaggagctcactagacattgttttaactacctcattaaatacatgattaaaaaaaaatgttgttagatatatatttttaaaaactacacacttggtgtgtataatccatatatttgagccaaaagagagagctccttatatagatgtaaatgaggatgaataagtaacttggaacagtgtgcatggtcttgaacatgttttctcgggcacactgccgtggagtgaatcactacctctgagtcgatggacgatcctgtcggtcgtgggcctctgcgctgtgttgctttagccagccaccaccacactgacagctacacaggatggggcttccctcacaggttaataaatttctctgggtttgaaggcactttccagaggactcccaaaaaccattctgaatgaatgaggatgtgacttatgctggtactagacataatgtttattgaatttgttattgttaacagataaataacgtcccgaaaataattttatctttgcatttccctaataatttttcatcttgcctgcag

SEQ ID NO: 8997 - DNA, 1148 bp, Homo sapiens
gccactgcactccagtttgggcgacaaagtgagactctctctggatatgattatatgaatgtatcagattatcatatgtactcccaaaatgtgttccctaatatgtatcaattaaaaaatgaaattaaaaatgtatttttatatatgtatgagttttgtgcatgctcaggagctaactggctgatttgatagaaacacacttctctatttctttacacttgggtagccattttctgaaaggtgttctatggaagttctggctgtaaacttggtctcatttaagagccaactggcaatgaagccctgctagggcattctgcttgtttccagtgtcttttgatcacttacatccccaggtcgatgttttgaaagtggatattagaaccaaatttcagagtttctggactttgtcttcattctgatttaaaagaagtgaattctcttgcttttcacgcatgtggttttttaaatcttaggaacaatcattctgaaagtgctttcctttttccctccagacaaggcgcctctgtcgaagagccttctgctggtccccagtgccctctccctcctgctcgccctcctcctgcctcactgccagaagctctttgtgtatgaccttcacgcagtcaagaacgacttccaggtaagctctgcctcattggcccctgagaggagagcggacagttttttttttttctttctagatttgctttttcttcctgctgttagtccctcaaagcccccaatttgtaagaaatatttattattaatatttcattaagtaacttttctagttattgatttttcagcaaaacagataataatgaagcaatggcagtatttccttttattaggcacatttgttttcagtttcactttttactcagagaagtgtaatttataacttcaagggaattaaaaacaatgtttaatctttttttaatgcccagtaggcatacttagctttgccaaaaccttgtctcaatttgaatatttgattagaggagctaggctctgtcagctgtatcagattatgaatttttgataacttttacagtggtggttaaacgaagtaagaaatttctcttgagtttctgctgtgggaaagagcagaagtgcttttcaaggtttctggactgatcttgttg

SEQ ID NO: 8998 - DNA, 1168 bp, Homo sapiens
ccatattgaaatgaaaattggtttttttgtaaacagttttgacctttgccacaaggctcacatgaagaacatttggggcccagggataagcggcaatgtcagcgccctcaggtttctgcgttttctctgcctgcaggtcgcccggctcatggagatgggattttccagaggtgatgctttggaagccctgagagcttcaaacaatgacctcaatgtcgccaccaacttcctgctgcagcactgatagtcccaggccaacactgggaccggaccggcagccgagtgacagtgcgtggtccccaccatcagatcagcccggggaccgagcatctctggtgctgatgttcttgtgggaagagggaggttccaccgcacccctgccctcaaccgcaagactgttgccgttttagtgtggagataagtttgccattacattagcatgtattttctatctatattttttattgggcattttccctaggttggagagtcagcactcgttttgaatgtgtttaaaatgcattaaaatggaagatttctgcaggcagttgaatggcactccagatggggaattgctgtaaccctcttactgtaacatgtcatctcctgcgtcgtgatggggagagggtaatgttacttcacaaaggacatgtcagatccttcttcatggacttttttagttactgttttttctctcaaacttgttttcgaatctcctgggagtgagggagaaacagggagctgaatcctcccccaagctgttccaggccagaggactctgcagtaccttctcctacatctagtaacaaagaatggtgataaccatgcactggttcaaggttctggagttctccatgaaacttgggttaattttgctcagagtatccagagttagccactaggctgcgggtgaaatgggatggagaagaacaacagcaggcttcctggagccacatgggctgactagggcactctgtggctggcctggcatgggctcagcccaggaagaggagaaacgatcccttgcctgcccctccctgtggcagggctaactgcctggccctcctggctcgcagccagccagccccctggcagcaggttctcctcagggcttgggtcttcaacctgtggcgacaggaggcagggcagactgtggaggacaggatgc

SEQ ID NO: 8999 - DNA, 1544 bp, Homo sapiens
tttgaggtggtcgtatatttttcagacgtgctcatagatctgtagtatattcccggtgggtaatagtttatagttttgcgacttttttaaggaaccagtcattgtaagtctgtatttttgtgtaaagtatgaaacttcctttgaaaaggggtttatttttattttttctcttataggaacaattggcttctttgcatgcttttggtttgttaccaaaatatacagtgtggtgaaggttgactgaagaagtccagtgtgtccagttaaaacagaaataaattaaactcttcatcaacaaagacctgtttttgtgactgccttgagttttatcagaattattggcctagtaatccttcagaaacaccgtaattctaaataaacctcttcccatacacctttcccccataagatgtgtcttcaacactataaagcatttgtattgtgatttgattaagtatatatttggttgttctcaatgaagagcaaatttaaatattatgtgcatttgtaaatacagtagctataaaattttccatacttctaatggcagaatagaggaggccatattaaataatactgatgaaaggcaggacactgcattgtaaataggattttctaggctcggtaggcagaaagaattatttttctttgaaggaaataactttttatcatggtaattttgaaggatgattcctatgatgtgttcaccaggggaatgtggcttttaaagaaaatcttctattggttgtaactgttcatatcttcttacttttctgtgttgacttcattattcccatggtattggccttttaaactatgtgcctctgagtctttcaatttataaatttgttatcttaataaatattataaaaatgtcttcattgcatcattacctattatatattcaaggaggttctgtaaatacagatctatttaccaaggtgttttgaaatgatttatactattttatcagattttactggattttgttaatgtaacactttctgagttttgatctgaatggaatttcactgtgtaaggcattgtctaaaatgttcactgtgaggcagtagaggaggttgaagtcatgcatatctagacagatgaattatctgcaagtacttaaggtggagccttactacattgtcattaaggagtttctatttttgacttgtttttcaaaatacagtgttttaagtcaggttttattacctggacattagcaatcactagcaagtcttcatctttatgatttcattgttttaatttagatttcacaaacagttttacttctaagagttaagaaatgcactgtctttcacattcatctgactaattgaaatccatttatgtagaatataggaatggggggtgattctgaagtatcggtctgcttgtatctgtgagcatattcatttgtattttagggtctctctgcttgctgcttaggagagcaaatcagatactgtcattaaacttacaactaaaattactagctgtcacttatatgatattgctgggttcttactgaataattttttttt

SEQ ID NO: 9000 - DNA, 1287 bp, Homo sapiens
tttaccaattgatagataagcctaatatcacaaagagttacttcagaagacacaggaggtcatcaagatggagattttttttttttttttttaaagacagagtcctgctctgtcacccaggctggagtgcagtggcatgatcttggttcactgcaacctccgcctcccgggctcatgccaatctcctgcctcagcttcctgagtagctgggactacaggtgcccgccactgtgcctggctaattttttgtatgtttagtagaaatggggtttcaccatgttagccacgatggtcttgatctcctgaccttgtgatccacccacctcggcctcccaaagtgctgggattacaggtgtgagccatcgcgcccagcaagatggagatttttttaatgtttttttttcttttctttttccctcctggactcaagtgatccccccgcctcagcccccaaaatttctgggattacaggcaggagccaccgtgcctggcctcttaaatattaatagttagagtgaccccttagtgctaccttgaattgtatatcagcaatgcagaaccttctgccgtcatgatgatgttctataaagcactgtccaatatggcaaccacaagaatcctcgcccactgaactcttgaaatgtagctagtgccactgaggcactggattttaaattttatttaacttgaatttaaacggtcacacgtggctagtggctaccatactggacagctcagcttgcagtaggaagtaccaactcactaatgagctacaggctttccaattaatattctctaatttaaacattgttagcactgtttaacaagtttaatttgctgggcacggtggctcacacctgtaatcccagcactttgggaggccgagactggcggatcacgaggtcaggagatcgagaccattctggttaacacggcgaaaccccgtctctactaaaaatacaaaaaactagccaggtgtggtggcaggcgcctgtagtcccagctactcgggaggctaaggcaggagaatggtgtgaacccgggaggcagagcttgcagtgagccgagatcgcgccactgcattccatccagcctgggcgacagagcgagactctgtctcaaaaaaaaaaaaaaaagtttaattcaattaaacttactcaatatttaaattattatattgcctttggctgtatgtaataggcagctgaataaccagggctgtacgggtgaggggtttgtattcctcccctggcaagaagcttagtggcagttagtggagggctgagc

SEQ ID NO: 9001 - DNA, 1164 bp, Homo sapiens
aggtgcggtggagaaggatgaaggaaaggaccctgacctgactccagcacctggtggcaggagccgtgccatgagtaggggcaggagccaatttgggacagaaagttatttatttatgtggaggtgccagttagatgggaggatataaaattctggagaccaggaagaggtgagggctggaggtgtaggtttggaagctttagggcatattggtttttattgatatttaaaaccatgagtatttaaactcacattacctagggatattctgtgagcccacaagagaagaagcccagcagagagtcctggaggcattttagcaggaagtggaaggaccagagaaagatccagaggagctgtctgtgaggcaggagataaactagggaaggatgaggtcatggaagtaaaaaatgtatctggaaggctgagcgcttccttgatgggggccacagagttttccaatgacactgctatgcatggtttgtggacaggtgagggtggaaggctgattgggtgggtgggtgaagtcagggacagtaaaacctggacactgtcccagagggctgggaaggggcagagcccaagtgggagactgtggggaagcagattgcaggagttttttacaggcaagagatgtggggcgtgtttgtatgctggccctggtccgagtggcctccaaggggcagggggaggcagagagagctggagaggttgacagtgctggagcaaaagagaaccacgtaggaatcaagtccttgagcacggtgggatcagagcccaagtcaaggggctagggttaaagatttttttttttttgtggtaaaatatatataacatgaaatttgcattttgactctttttaagtgtacacaatagtggcattaattacattcacaatatagtatgaccatattgtgctagttccaacatcttttcatcaccccaaacccaaatactctgtaaccagtaagcagctgccccctaccccctactcccaccaccttgaaggccggggttttttgttttttgtttttttgagacagggtcttgctctgttccccaagctggagcacagtggcacaatcatagctcactatagctcagactcctaggctcaagtgatccttccacgttggcctcccacagtgttgggattataggtgt

SEQ ID NO: 9002 - DNA, 2345 bp, Homo sapiens
attgtaccaaggaaaatgaatggagagattagttaatggcgatacacactgccgatgcaatatatatatatatatatatatacatatatatatatattattttttttaaaagggggagaaaaagagcattaagtcagaacttaacacagcaccaaggccctctgcatttcccagagtgcctctcaaatgcctttgacaccataccatgggctgcttttgagcctccttgttggaccctaattctgccaaggcctcttgattgtaaaccacacacctgctgcattgccaacagatcctgttccgtacctgtgtccaaaaacatttgtaaaaaccctttgagtttaatatttgtaatttttaatttccactcttttattactgatcttagcttaatacaatatttttatacaggattatttcttcagtatcctactgtgtgattttaaaaaaagatgcagcaaccttaatatatctccatatcttgtgctactgtgattgttcaagcaaaagtggagagaagaaaagctgctgcaaaagacaactgtgaaactgtgatattttataaaatagaagaaattcaagtgctttctttttcctatatgtttttttttttttatctgaattctcagatactgcctcctaactgtgtccaaacttcttgtgtaataaagagattctgttttcgatcctaagttctttgggatgccaacattcacagtcaagtcttgaggaggtgtgatgatggcatcatgcctatttttttggaaagctgttgtttttaaaacaggccaacacctcttttatactgttgtatcagccttttaaaaagtctatttttcaatgcctgaaactgcattttaatgcattttcttccacctgagcactgagcacaccaaactggaatccatttgaaaatgacagtgtgtgaagtgtatgatttacattaaaagaggggagggagttgccatacatattaaaaatttttaaaaggtttatagttaccaccaaacactgatgaatgtgtgacctttgccagagctgtcaagctaggataaaaaaggtcaaggacctaggacaataactcttagtcgatttattttcggttggtacaacacatctcctgtgcaaaatgtagtccatcagaaacatcctacagatacactaaagagcactaatttatccttagagaccccgaagacaccccctccccagggtttgtagaaatttgttttgtgtgctgtgagtggttgatgtagtcttgtcattgttaataacttgtatgtgaacactattatttgtacagttgaattaatttattttcagacatcatcctttttttttttctttcctggaagagttcaaagcacaccaaagaattatattatacattttggtgaaagattgtcatttatgatccatggtttatttaaaaaaaaaaggaaagaaaatggaaaaatatatttttaagcttacttgaatgaacaacgtaatgtgaaaaccaagactcttcctgcatgtcttttttgcattgtgttgataagattatatatagtttatagatatattatattactagtacagtgcatggtgctgtcacttggaaagcctttcaatgttgtcttcagattgttgtgatgaatatgaaacatgcagaccctcctttataaagaaaaagaccttaaaacttgaatatgagataattttacattttaaaagtttatttgattttcatattattcactttcaaagccctttcaaatagaaaaggtatgaacttttggggggataatttatgtatcgtaaacttattagaacaaaatattcctgatgtataatgagttgttttatttatacaactttttcaatggtagtttgcactattctttattatgctacaggtttatttattatgaaacaaaggaatatgtattttatgtattttaccatgcataggttaactctttgccacagatttattggttcttgatacacctaaaataaaaaaaaatgtgtacctccaatagagagcaagcaagaatgattatgaagtaacaaatttaataaaggtattcttgttattattgcttatgttttacataatggcatatctctcatacaaatagaacaggttgctaatggagtgaatgtcttcccttggtctcttgatttctcagcctctccccaagcaatacaatatttttgcagcctggtttaacttaacaacttacaagcttatctaggaaacacagatatttatgaagactaagccttgcaggttatacttacagtagcataaatcttttgggttactgcatttatttgttaaaataagtaatatcctgatt

SEQ ID NO: 9003 - DNA, 1298 bp, Homo sapiens
agcgagggcaccttgtgatcatgttgttaaaattatgaatctgatttttatgatgatgaaaattttaccagcagaaggattttttaaagttttttttttttttttaataataatctaggcatgaagagcaaaaatatcccttccggagtctttgaagctgaaaatataaaacaaataaaaaataaaaaaataaaaacccacaaaaatgttgaaccaaacctccctgctaatctccatgcccacgttctttcccaccctgttcccagtcttctgacaaactgtgtacatagcggactcctcctttctcctccgaggtggttttaaaggctttttggtgtatagaagtttgtccatttgtaaaactccggattgcgttcctccccgccttccgccccttcccttccctaaagtgatgggctttctcttttctctttttagtttacccggtttctttttaagtaatgtggaagaaaatggtttattttgtattgtggtattgaatattgtgttcctttttatgaggcaacctgattgtaaacttcatgtaactatagactggaaaaaatgagccgtgccaaagtctcccttctgtttcttcagcacattgacccatagcacacacatacacaccaccaccaacaacgcttgtgaatgtatttttctgttagctgggtttacatgtgatgttttagtgcttttgcaagttcaatttgttagttcctgtatgaaagattgtgggggaaaaataaacgtcgtgccgttagctttttccgtaataacacccttccttctgtaaatacccgttaccatatttatccatttgtaattaaattatggtattaacttgctacagaggaaacaatatttataaagaatgtttcttaactataaatatgtacaattgtgggcataaactgtttcagattttttatttgaaggttttaagtggtttgatcatttcttgtgatgttttgagagtaatgcatacagaaatataataaaatgtgttgaaactgcatgaacatactattttttctagcaaagttattaaagaaaatgggggaagaggcagctgaggattgacctgggtacgcctcagcgagcctgagtgggcgggaggcacacgcgttctggggaggaaggtgtgtgtctgcatagaaaccaagccaaagtgcccgtttggcagaaggtctcaaaattattttcttcggcctttgtttaatagctgagagtgaattaaatttttggaaagcccctgtgaggaatggcggcaggaaccttcagagcttctaatggct

SEQ ID NO: 9004 - DNA, 2116 bp, Homo sapiens
atacaggactgtataaagacagtagaagattttagtaagcctacattaaataggagcagatcttgtggtataaaaaataaccttgtagttctccagatactaagcttgtatatgattatggtgggtgatttcagatatataagcagataagcacagattattgtcctttcaagttaagagtatataatctggacagaaaatttcacaaaattcaataaaattacaactgttgtctaaataagtgaaacacaaattcacttaatagcatcaagatttgaaatacttaagcatgaagtgacttttataatgactcgatccctagacatttgttacagatagttttatgcctaagaccaagatgtaaagtaccatctgcccttaaaaaaaattggggctgtcaatttctagttttcactcatggttaacacgcatttaaaattatttcatgagtctagtagttctttgatttatagcaggatcttgcttgcctcatttgtttcctggttatgttcttaggattctgactaagaggcaaaagagaaaagactcaagaaactgatcctggagatcgagaccatcctggctaacatggtgaaaccccgtctctactaaacatacaaaaaattagccgggtgtagtggtgggcacctgtagtcctagctactcgagaggctgaggcaggagaatggcgtgaacccgggaggtggagcttgcagtgagcggagatcgcgccactgcactccagcctgggcgacagggcaagactctgtctcaaaaaaaaaaaaaaaaaaaaagacggatccttttttttggtgcaaatgggtgacttagtgcattgattcagatttttaaaatttcttgatgtggtttgtaataatcaaatattgacaagaaccttaggtctcgaaagacttttataagtctagatgacgtttgccttaggggtaaagtaaaagaacaattggcaccttaagtttctatacccaaggttatctgtgaaatgagatctcctgatatttgattgctttctcagtatggagtcatatgttgataacagtactgaagatgcataagaaatgcccaagtcactcagaggacaactacccatattccagactctgagctgtttcctttttaaaaatcatatagacaattagctgtttgaagtgagtattaaatatttcagaagtgtgaatttcatgtatttgagctcctctagttgctgttggtttttcttctgctgccaacctgtgactcacaaatgactaggatctcttgttctttaattttagggtcttgttccaggactcaaatcagtaacttggtgattacaaggtgctgaatgtgttggtaaccatatcgcaatacacctcaaggaaaaggttcagatttttatttttaaaatattttcatttttttcttgaattttatatccgtttgttcactcgtacatgcctagcctacagaaggggatatatattatgaaatggtcatttttctgaagagaatattttgcttgaaatgcaaaggactgaaagagatttgtaggttgttgattttgttacttcatactggaacttttaaaaagatttcatcaaataaagttttgttttctacttttaattatatgaatgtttttaaacctttgttttaggtagaaggtaccattgtgtctttgaagtacatgataatttgtcaattctgctcaactggtacattgtaagaaaccatcttgagccttttataattaatgaaacaatatgcattatgatgactgtaattttagatttctaatttaataggaaatagaaaatttgattcttttattagcttgaaccaaatgaagttgtcatctttgtaggtcaaaaatggttgaatattagcaatttcatacagttcaactgaatatttcagagaagacgtaggtaggaagaaccaagaggaaaggagaaaaatgcaaaataaaataagaaattaaaggatagggagacacctagaaaaacaggatgagttattcagactattgaccataatcaatttttataaaagtcttgatctgttctaagtttggcttccaagtttggctttccagttattaagagcacaatgaggtttg

SEQ ID NO: 9005 - DNA, 1171 bp, Homo sapiens
tgaagggggctttctgaaggaggtagagtcaaggagagtggtctctgaagacacttcacattacatcttgataaaaggtatcaggcaccatcatttatatatttacattaaaaaatcaaagatatatcatgactctgaattctataaactagcacccctggataatattaatgaaattctatttatgtaataactgtatactgctattaatggattaactactatagtgccaaaccactttaaaattagctaatgaattaactcctagttgccgattaaatgaaaatgtatatacttatttatgagaaccagtgttctcttatccatcttactagaagcgtattgtcacactgtaaaactgaatggtgagaagtgttttaattcttcttaaggtattcaagctaagacagttgcagaagtggattcagagtctcttccttcttccagcaaaatgcacggcatgtcttttgacgtgaagtcatctccatgtgaaaaactgaagacagagaaagagcctgatgctacccctccttctccaagaactttactagctatgcaagctgccctgctgggaagtagctcagaagaggagctggagagtgaaaatcgaaggcaggcccgtgggaggaacgcacctgctgctgtagacgaaggctccatatcaccccggactctttcagccattaagagagctcttgacgatgacgaagatgtaaaagtgtgtgctggggatgatgtgcagacgggagggccaggagcagaagaaatgcgtataaacagctccaccgagaacagtgatgaaggacttaaagtgagagatggaaaaggaataccgtttactgcaacacttgcgtcatctagtgtgaactctgcagaggagcacgtagccagcactaatgaggggagagagcccacagactcagttccaaaagaacaaatgtcacttgttcacgtggggactgaagcctttccgataagtgatgagtctatgattaaggacagaaaagatcggctgcctctggagagtgcagtggttagacatagtgacgcacctgggctcccgaatggaagggaactgacaccggcatctccaacttgtacaaattctgtgtcaaagaatgaaacacatgctgaagtgcttgagcagcagaacgaactttgcccatatgag

SEQ ID NO: 9006 - DNA, 1171 bp, Homo sapiens; identical to SEQ ID NO: 9005

SEQ ID NO: 9007 - DNA, 1527 bp, Homo sapiens
ctatgtgaccttcgtcagattttatgacacatgccattgtgtgtaagttgtcacctcataactaaaatattttgaaggcatgtaattcataggaagtccttgtttttacccccttttttgcatttgcattaaaaatttttttgtagatacataatagataacacctgttgcaggggtacatatgataatttttaatacatttctataattaatttttacttttaactttcaggccgaagaacagttgagaattgttgaagaacaaagaaagattcatgaggaaaggatgaaactagaacaagaacgacaacgtcaacaaaaagaagaacaaaaaattatcctgggcaaggggaagtccaggccaaaactgtccttctcattaaaaacccaggattaaattgcaaactctgaactttttacaaagaaaaatggaaaaactttgtatggtagcttcatgttgaagtggttttttgtttttgtttttgtttttttaatttgtaaaatctggaaagttagcttgttctaataggggctatgctctgcaattccctttttttttttttttttccttccactaagtcaaatccttatcagatcattgttgtattctaaggagtgacgtatttttcacctgtttggattctatattagtggtctgaggaagagcagatcacattgtaaaactatggatggtctgataaggcttttactgaccccactgacttcagagttatactctgtttgctacatcataatgctggttttgctgactttttgtttttttatatatttataaaaaaagaaaaagttggtgattgcattgggaaattcccagggtattactggacctatgtggtgtattgttaaaccagtgtccttgtgatactgttgctcttgatgttcctgatacaggtaaggaaacagttggtcaactctgatacaaagtatatatacagttcagtattgtctctgttcattttgtttttatttcattgacaaaatcaaaccagcattccccattgtgtaaataaatgattttgctgaataaagtaaagtcttaaattcatatgttgaagcaattttttttaatgttatgttaagtcttaaagagggtggttcactttttgatggtcaaccatttagaagtcttagaactatatttcctcttgtttatacttttaacatagggtttatatgtacattaaatatacttgtgaattagtatttaatggctatttttacaaatatcaactttatgctgatagagcaaatggcatcagtgttacctttaagaaagactaacaacatccagaagatttaaattctcaaacctgtgcctctgttttaggatataagtattatcacaaagtatacttaataaaggctagaaaaatgcttttaaattatggaatctgagatcgttttcagagtgggccatcagaaagaacttagctttatactgtcaaaaaaaggctaagatggtcgagtcattttcattgtgtagtgtacttgcacgtttatttttag

SEQ ID NO: 9008 - DNA, 1362 bp, Homo sapiens
atattaacaattttttttttacacggacacaaccctctgacagtctttccaaatattaaaatcatttgaatatgtatgctgtgatctgaacactgctcaagccatcaagcagtcttcatacagtttgcattataaaatctcattaaattctccaagaaaaaataagttgaagaattttatttcctgaccatgcatcccctggatttctgagtttcagttcagattgtagatgacaatataagctgccttccgaaattgtcaacatctgaatgttaagtccattttccccatggaagaagcccgtagttccatgaagtatggattaccatttgtatttttcactaacagtaaatgtatttttcttattaattgtttgccttaggaatgatgaattacattttttgttccttcttaccataaacatctgcattcctcagctcagccttccttgtatgttgtttctttataaatggttgagctgctgatgcaggtattgccaagctaacagtacaaatcattttaaagaggaagctggcgcgtatggcagccgaggagcacactctgcaggacactggacaagacagtaaatattcaacttttaatgctgattaaaggagtataggtaaagaatacgtaggtatacataattggtgagacaaatattcactttatttatattttatatattatttttttaatttggtaaatactatccagttttgtagttgtccttgttgatttgtgtgatattaaagtattagtaataattgccaggaaactatcattagggagggtttagttggttgctgtttggactgggagggatgatttaaatttagtgctagaaaccaattttagtgactgcacagtttatcatttgtcagacagaaggtagctataaagctaccctgtaagtcatatcaaaaaagttcagaggaagattagtaaatatttatcaataaaaataaacattttgtttttctaatatcttaacatatcctcccctttaggaggaagaacgtgcaaaacgtgaggagctagagcgaatactggaagagaataaccgaaaaattgcagaagcacaagccaaactggtaagtgtaaagcatacatgaaaagtgttttgtattttgctttatttccttttttcggattttgtggattgatttttgtgccctataatttgacttattttggggggattctcaggactaactttaaaggctttttgaggcaaggataggaacaattgagatttttccttccaatctggacagaactccaaaatttgcagtgattttaaaaaacaagttttctggggaaattattttgttctctatccccagttttttctttcctaac

SEQ ID NO: 9009 - DNA, 1160 bp, Homo sapiens
ttaacaacttgtcctctgattataaagtcaataacagaataggttttctgtccggatttattgttcctaaattagaactaatgaattaggctctttgtatatacctgttctcctgtatttagaatatgataaaggaaaaaaagattttatactcatttgaatttctgtatcagttaacatcttggtatctgtcatttcctcaaatgtgacatggaaatgaattctgaaaaaatcactgaataatatcaggctcaatggcttgatagacttaaaactagttttgtttaaatttatagttttaaaagtaaatacctaacttgtttttttcactttgtttgctagtcgacagcaagaaatagaagaaaaactcatcgaggaagaaacagcacgaagagtagaagaattggtagcaaaaagggtggaggaagaactggagaaaaggaaggatgaaattgaacgagaagttctccgaagggtggaggaagccaaacgcatcatggaaaagcagttgctcgaagaactcgagcgacagagacaagctgagcttgccgcacaaaaagctagagaggtaacgctcggtcgtttggaaagtagagacagtccatggcaaaactttcagtgttgggttctgcctcctgctcagttcagaaagagatggaatacagactatctaattcctttctcgtctaaacttaacattgctgcgaaagttaattttttagcctattcagaagtgctgactgataacttaaaagttggaagcttttataaaacatattcaaggatactttttgatttaatggaactggctatttgagaagtgtttgaaacttttgccatggctgcaggacttacattcttttttgggaggacggtggggagacagggagtggtaaagggaaaaggttaaaaatccacctgtggttgtatattcttctattctgtcactctgttacctagactgtgagaggcttttgccttcagtcagattaaaaagagcagggcctaacattgagtgatagcacctgctttgataaataggttttctcactcttctttttttccttcttttatccctcactccctcccctaaaccctgcttcagcacaatggactaattctagcattctgatcataaggccctccattttcctaatgtg

SEQ ID NO: 9010 - DNA, 1241 bp, Homo sapiens
ataatatccatatagaaatctagaatttttacttagatactaataaaatacatttagaaacttttaaagtcatgaaaaagcattaaccttctaaacagtatattctaaaaagtcaaaacgttaacaatagtttttatctaataaaagcactgcaagaaaatagggtagaattgttacagctggacttgtaaaaatatgtctttttactcagggtttaaaatgtcccatttaaatatgaaatgtaaacaaatttgttttttaaggttaaggccaaatgtaacaataaaaccctgtcgatggttttagctaaattagaggaagttgtatgagacttaatgatctaaaaacttaaaattgaattggtttgattaaaaataaagcttgcaattttaaaagtagctcacatttaatttcttgtgtgaaatagaacatgctttaaaggaagtatttttatgtgaatttgcattccagtataaatagtattcacaaaaaagattttcctagattttatctattgaataggtgtcaatatggcatgcatattgtaactttcattagaaataagttgctttgacttttaaaaatgacatagttagattatttaaagtcaatgtatatagtatatattatgtatggatttatataccaaattttggaatacagcctatctcatgaccatattgaaatgtacggaatttgatccatgcgatactatgtgtgcattatttgaaagttattggaaattttattcaaaccgtggaacaaatgtatgtgattttgttatacttcttaatttaaataaaatatttaatgcactattaaaataatttcttatgttctattctttttaaaacaattcataatagttgtatcacatagatttttttggtgtcagtaaaatttttttttttttttttgagacagagcctccctctgttgcccaggctggagtgcagtggcacaatctcagctcactgcaacttccgcctcccgggttcacaccactctcctggctcagcctcccgaatagctgggactacaggtgcccgccaccatgtccggctaattttttttttttttttttttttttgagacggagtctcgctctgtcgcccaggctggagtgcagtggcgcgatctcggctcactgcaagctccgcctcccgggttcacgccattctcctgcctcagcctccggagtagctgggactacaggcgcccgccaccgtgcccggctaatt

SEQ ID NO: 9011 - DNA, 3384 bp, Homo sapiens
aatgataaagaatgttccttttagaagtgtgttatgtctgtacctgtctgaagagtgacattaaactttgaaaggacttcactgctcctttacgatattccaaatagttttttacattggaaaaactaattcttgggattctttcatacattttcatcaaaactttcagtgtgattatgtattcatatcttcagtttaatatgtcagtataatagatattgttcaaaagtttcttgttgctaaagtggtgtaatctgttacacagatgaatagctagatgtggaaagagatatgtaaacaagaaacctttgggtattgtttcttaagtaaatattgggacaatcatggtaagcaaacttagttctgtaactgcatttttcaccttaaaagttaaatgaaatgcatgatggtattttattccttgaattatgcaatgcaacattttacatgtaaatagcactggtcatatactgatgtatatggttatctgggttatatctatttttatgtaaactctattttgtttttggcaagaagtgaaattgagacttatgtgcaggttgccattgaattttgctctggtgaatgctgagatccagctttttcttacaaataaatgggaccctgttttccaatacaaatgtaccgtgtttttgttaggtacagtctggatcatggcatgtagaaatagaaatttagaattttactgcagctttgatgtgcatatttgaactttttaacatttgtaactttggtggcaaagagaattttagcttctatcgattttgtaagtcttcagctgaaccactaatagcagtcatagtgaagattagcactacttagaattaaattaggaagtcttttatcattgcaggattgtacatactactttataaaaattctcacctttgattttaaatcccagtacctagttatatctaacctatcaaaggcaagatatcatttattggacttcttgaaaataaaagttacaaaatccaacaacaacaacaacaaaacaatgttcttggttttaatgttccagttgctgtgaaatagaactcctacaatcaaaagacagttttaggaagtcttatttattgattttaaaagttttacatgtaggagtgtgggaatgaaggaattctggagctttttgacacaaaacctattaccacatttagcagttaaatggctataggtgggaagtaggatttagatgtatagaaaagtaagaaaatcttacttagaaaaaagccccttgaaacttgcaggatttacttaataaaaatacacgctatgagtcataattgtgccaagttgtttcatgcagtcctcaaaaattagatgtaattgagctttgtgtaatattatgtcagctttaacatataatattttgaatattttagctatatttagtggctttctgcaagcaactagaacagagaagtaatgggtcaataatcttgaccttaatttaaaactttcaatggagatagggctagaaatacttttgccaaatagcattcttattcactttatgccggtatttagaaaaaataaattatagcaagtatgatttctaagaatgtttttctataaattactaattgtaaaaagtcttgctttttaaaacaagttggtaatgcatatcatggaaggcatattttgtatgtataaattcaccacaattaaagattattcttgtcagtccttgctatgtagaatgactattctaaatattaatgtattaaaaagaaaatacaacaaaatgtatatttagacacgagcttacatggcataccttatatttgtatcattctttaaagtttacaaaaaaaaaccttatgtttttatgtaatcagtcattacactagggagaaatttatcagctttagttctaaatatgctcatgaggtataaaagctatttcttcatcagtattttgcttttatgctgctttttctttttgatactccaggtttataaactatcttttaaaattttaagccaggacttcaaaaattgtagagtacttgtttggcgttccctaccttcattctcttagggttaaggagcctttctttctgcagctaagggcagaggctgtgcctagggctataccaccactagcatctgtatttgagactgtttccttagatgggtaagaggtggaaaacaaacttagtatcaggggtccatgaagcccatggcatcatttttgaaaatatttctagttttgtagccaaagcaattggttttagtaaaatgagacttcttcaggagtcactcctttactgtggacccattgcttagtgggaatggaagtatatgtatctatcttgtgtattaacttctgacttatttatacaagagcagctataggagtttacaaaagaactttaagttattaagttactataaatttggggatcctagagtgatcttaaatatggcaagatacagctcatttagaataaaatctcacatccattattttaaagggaatgattggggggaaaaactggtgaaaaagaaatataaaaaggaccctaaaaagaattctgcaaaataagagaagaaataatttgtgacaggtaatagaatactagtaggatagaaacaactagaaaggaaagtgtgacacagtttttaaatttagatgtagaaaataatgaattaatgagattggtgaaaggaaatcatgcaaaacatttgaatgcaaagcatttctaacaaaaagtgactggagcacttgccattgcaacaaccctgtttttgcaattaggtttttgactgttaaaatggatattttcataaaaatggtgttctgaattttgctacagggctgcttaaatttatgattacctgtagacacttgatatttacatagattacagctttggtaatatgtcactggagtaattacgctgtaatacctgttgagaattcataccatctgatgcttatatattaatttcttatgtttgtaagtttggctttgtgggaataggtgtggagaaattaaagagtgaaggccatatttcattttttataaattatctttcaagctcagatagcttaagagcagtttatattaaggagacccttttctccttgaggatagggataggtaaggtaaacttgtaaaaaggatgtcacagaagtcactttttaattaagtcatgattgagatactgaactcttccactcattcttctttcccattttcctattatgtttgataattatatgtatttttaaaaactgtgagaggaaaaattagtcataacccttttgggttatccacttaaatttaggtattttcatattactcaggtaaagatggaaatgacagagcacagacatttattttttaaattg

SEQ ID NO: 9012 - DNA, 1286 bp, Homo sapiens
gcagaatgttctgccgttttctgctccctcgacacttgattggagggctgtcgacctctcctcccgtgggggcttccccagtgcctatcttctctgatagtcatggagaggttacactaattcattggagatgtaagttgttggttttgttttgttttgtttttagaaaaatatatataaatatataatagatatctatcgctatagaataatgcattaataaaatgaggcttttttagaggaagaccaaaaaattcaatgtcttaaaaatatatttaatggcaatgcaaaagtcttcctgcttccgtgctgaactttagaacagaggattgtattgcaagacaaagttgaatgtaaagtgatctccctgaacatttttaaggttttacttttctgaaattatacatcacagcagtgcataggccatataatgttagctggaaggtcaatttcagtgtatgatatactttattaagatgtataaaaatcctgaagtttttatttagttttgggaataggcatcaatgggtggtatttgctttgtaactccccccaggtacgatagggactgaatatggaccctgctgaaagcagtgtattgacgcatatttaactcgccctctatccgtagagtagtcatgacactatacagatggttcgtgttcatactgcagcttaaaacaagcaaaatacacagatgataatatgctaaattttcctctatcctgtacatttcacaaaaaggcatatgcaatatttacatttttaatttagtttacagaatggaaccaaaatgtataaatgttatgtttgctaaaacttcacaatgtatattgggtctttgtacattttgcctgacttaccttaaatttaaaatattttttgctatataaactttaacagttattaaacagtgttttctttttgggtacgtattgtttctggatatcaagatgttaaatatatttcttgctattgtgatatgacaagagacttaacttatcttgctctgtcttccactgtacacgctgtatataggggtcaatgtgatgctgctggagacgagaataaactggactagaatagtgcattgtatttagtctgtattgatcatggatgccctccttaatagccatatgcaataaaataaagtacattatttatgaaatgaatacagtcctgaagattttttctgtacgaattctctgtttaacataaagccaatctacttttagagtttgggagtaagtgaggaaatactaggctcctaaaaatacttggatacc

SEQ ID NO: 9013 - DNA, 1888 bp, Homo sapiens
tgatctagtggaggagaatggaaaaaaagtgaaattgtagtacgaggaggcagggtggcacagaggggaatggccaaggcttcggagccagactgatgtggcgggacttcagctgtgccctatggggctgtgggcactggggcaggtgccagggcctgggtgtgcagctggtaacctgcagtgttctgtgtgcgtgggaccgtgtgtgcactgcacccagcacctgcctgctcactgggtggtaccaggttgaggcctgatgccaggggctgggctgatcccttagagatttccgagcagggcaggagtgccatgtttctgacgtgctgtgagatgatggccaatggtctgtctctgtgtcgtgttttaggaagcctacgccgtccaccttgaaggcaggggagctgcgcacgcacgtcagccgctgccaagtctgtatgagaagaacataatgaagcctgactcagctaatgtcacaacatggtgctacttcttcttctttttgttaacagcaacgaaccctagaaatatatcctgtgtacctcactgtccaatatgaaaaccgtaaagtgccttataggaatttgcgtaactaacacaccctgcttcattgacctctacttgctgaaggagaaaaagacagcgataagctttcaatagtggcataccaaatggcacttttgatgaaataaaatatcaatattttctgcaatccaatgcactgatgtgtgaagtgagaactccatcagaaaaccaaagggtgctaggaggtgtgggtgccttccatactgtttgcccattttcattcttgtattataattaattttctacccccagagataaatgtttgtttatatcactgtctagctgtttcaaaatttaggtcccttggtctgtacaaataatagcaatgtaaaaatggttttttgaacctccaaatggaattacagactcagtagccatatcttccaaccccccagtataaatttctgtctttctgctatgtgtggtactttgcagctgcttttgcagaaatcacaattttcctgtggaataaagatggtccaaaaatagtcaaaaattaaatatatatatatattagtaatttatatagatgtcagcaattaggcagatcaaggtttagtttaacttccactgttaaaataaagcttacatagttttcttcctttgaaagactgtgctgtcctttaacataggtttttaaagactaggatattgaatgtgaaacatccgttttcattgttcacttctaaaccaaaaattatgtgttgccaaaaccaaacccaggttcatgaatatggtgtctattatagtgaaacatgtactttgagcttattgtttttattctgtattaaatattttcagggttttaaacactaatcacaaactgaatgacttgacttcaaaagcaacaaccttaaaggccgtcatttcattagtattcctcattctgcatcctggcttgaaaaacagctctgttgaatcacagtatcagtattttcacacgtaagcacattcgggccatttccgtggtttctcatgagctgtgttcacagacctcagcagggcatcgcatggaccgcaggagggcagattcggaccactaggcctgaaatgacatttcactaaaagtctccaaaacatttctaagactactaaggccttttatgtaatttctttaaatgtgtatttcttaagaattcaaatttgtaataaaactatttgtataaaaattaagcttttattaatttgttgctagtattgccacagacgcattaaaagaaacttactgcacaagctgctaataaatttgtaagctttgcataccttagattatttttattttgcacttcttccaaatgagagt

SEQ ID NO: 9014 - DNA, 1302 bp, Homo sapiens
tccccacacaaacaggtgagcagtggctcacaggtgaatcttaatctagcttttcaccctcagccagcctctgccagcctgcctggagcctccctattatcacacagttacacctaagggaccctggacaaggctggcttctggtgttcactgattgaaaccttatcatgcaagtaaaacttaccagatgacagaaccctttccaatgttaagcaaattgtattttaccacagccttttcactctcttctgagttacgtgtcaatgactaaacaggactatcacttggggactccctctgtaagttgttttgtgatagcgggtctgctggaaccttcccctttcctgtcaccagctgcatgtccacgtggaggtgcaagtggcatggccaggcccactctgccactgccgcccagcagggtcttccagatagtccagggcagaagggcaggacacgcaggcttctgacccaaaacctcctggcaagagttggccttgggttccagcaatgactccatgttccttttgtatgggtgattttttttttctttcagctaacaattttctactagagaactctcatctgagagtttcacgttttttatgttcttcttataattctttacctaatatagtatctgatgcatcagttactactataaaaaaaaaaaactccaaaaagtggaaagtcccaaacccttcagagaaaacagtaccttgaaagcttttacatttctttccagtgatctttttgtcttgagtgaggtaatgaggcagctggagtttatggtgtaaaagtaaacatatataaaatcctctcacgccctgaaaacacgatcctaggtatttgccaatttttcaatggctccaatgtttatctgcaatggggctcataaatcccatgatttgaatatgtgatttctagaaatccaactccatactaagccagaaagtttagcaccaaagctcaagactagatgggctggcgcattcatgccttttactacacgtgagggaggcatgaacaggcgcttggcagaggtcctcagttgacccaataattcattggccagttgtctgggaagggcaggcgggcctcctgggtctatagggtaaagcatcaactcatatcctccatctgctgtttcccaagctatttttaattttgattttaaagccacttgccaaatccctccatataaatcaaaggttgaaatgatttgaatggtttcaaattgatctaacagactccttattctaggtttacgatattcactgtatttagttgtagtgagttattcat

SEQ ID NO: 9015 - DNA, 1107 bp, Homo sapiens
atggatgattaggcagatgttttgttttgttactgaaatgcagtggattatatctaccgctcgtatctgctgtcacggctctagttcttaccgaacggccagcctggctgtgaattagtgtccatgcagctgcctctgcagcacgtcctggtgcctggggctgcctcctgcagggggcccatgtgtatttcaccagccccctcttgctgaaggcgcattcgcgaggatgcctcatgtccgtattgacactcatggtttgctgttcagtaaaaacaaatgcacagaagagggctatgccctgaccccgtgccacctgcaggctgtgattcctaaccctgtcctgcccccctctctgtgcagcacacggcggcgggagacgaaggcggtggccaatcactggtgtcaccgggcagctgtctagaggacttccgcgccacaccattcatcgaatgcaatggaggccgcggcacctgccactactacgccaacaagtacagcttctggctgaccaccattcccgagcagagcttccagggctcgccctccgccgacacgctcaaggccggcctcatccgcacacacatcagccgctgccaggtgtgcatgaagaacctgtgagccggcgcgtgccaggaagggccattttggtgcttattcttaacttattacctcaggtgccaacccaaaaattggttttatttttttcttaaaaaaaaaaaagtctaccaaaggaatttgcatccagcagcagcacttagacctgccagccactgtcaccgagcgggtgcaagcactcggggtccctggagggcaagccctgcccacagaaagccaggagcagccctggcccccatcagccctgctagacgcaccgcctgaaggcacagctaaccacttcgcacacacccatgtaaccactgcactttccaatgccacagacaactcacattgttcaactcccttctcggggtgggacagacgagacaacagcacacaggcagccagccgtggccagaggctcgaggggctcagggcctcaggcacccgtccccacacgagggccccgtgggtgggcctggccctgctttctacgccaatgttatgcca

SEQ ID NO: 9016 - DNA, 1165 bp, Homo sapiens
ggggcatatcagacttgaaattgacaatttggggtcctgagattgaaacaggagtcaaaaccagagcccagggtagctgcggcccccggaccacgacgcccacttccccacacctcctgctgtccccctctccgcaggtccagccctctcctggtggccgcgtttggcgcctgctctctcaccaggcagtgcaaccaccaagccttccagaagcacggtcgctccaccaccacctccgacatgatcgccgaggtgggggccgccttcagcaagctctttgaaacctgagcccgcgcagaccagaagtaaacaggcaccttggacgggggagagcgtgtgtgtgatgggaaaatccggacccacgcgtgtgctgaaggcgtacggtgcttgccagattttcaacttgagcataaattggttgccattgagaatttaagaatctggaatattgcagcttttggttaaacttaatgcatggttggagatgttatggcgacactaaacaaagtattcctgaactttccttagctccttggtagtaactgggaagacagaaatgaagaaaatcacatgagaatgaagaattctttagcagctcaacagagtttctcggcctgctcccagatcggcgaagtttctacttgttactctctctgccggcgcccttcgttcctcctctgcttcccttccctagtctttcctccggcagggagctgggcaggggtccccgggtgtctccctgagtcccgactgcactgactgggtccatcagagggctgcttcgttctccagctcatcttcttttaaagtggtgactagcttggtggtatctggctgctggtgtttggcttattgacatactccagggtaatcaatgatgactttgtttggaaacccttttggaggcaccatgggaacagaaggaaacatgagtgacgctgacccttgagtgtgtgggtggggagctctgagacgcctcctgtcccacgctctccggtgtccgtgtctacacaggggtccccatgatacccaccggccccagcagggcagaccggaccggggacgggcacggtgaagggctgcagcctggggtctgacgtggcccctagtgctgtctcaggagaaggctctggaggacttgaggcatgctgggcctggtgcagtg

SEQ ID NO: 9017 - DNA, 1729 bp, Homo sapiens
ggatggaaagcaggaatggccagtgcttgacaggaactaacggaattagcagtggattagccccaggacagccgtttccgagtagccagggttctctctgcattagtgggactgaggagccagagaagaccctgagagctaaccctgagttgtgcggttctctgcacctgaacgggagtccaagtagctgcatagccagtaggccttcctgggtggaagacattggggataacctgtactatggacactaccacgggtttggggacactgctgaaagcatcccagaactgaacagtgtggtcgagcattccaagtccgtgaaggtgcaggagcggtacgacagtgccgtgctgggcaccatgcacctgcaccacggctcctagagacgctgacctggctctcggaaacgcaggagtccttcctggtagccagctcagaatacccatgtagcagcaacttgaacgaatgtcacaacttgtacgttttttatatacttcaactttctgaaaaagtaaacttcgacaagttcccagcaactgcttgtttgtgcatgagtagggcttactaagtgcatagatgtttctacagtgaggtgtcctttttataaggtgcacttttggagtttttctgatgccaatctcaacattgtctttttaatactgtcaccagatattgccatttttctttttgttaaaagattatatgatcaagataaattggggtggtaaatcaggtgcctggtaatttatctctttgcacatgggcatcattttaaaaagcttgcttccactcttttctgtagaatttgacggaacacagctatttccctatgcaaggtacagccttacaaagatttctgcagtgatttgtgtgaagaagagaacgtttgtctttttcaatgaagctttgcagatcaccatgtggttgaaggttttagttgtggacacagtggtccctccttaatgatgaagatcactgccttgggcttcatggaaaacaggcccagcctggggctgcgtttggatttattgtttttattccacacttcctacttggtctctggaagttttaccacatgtaacagattcctttatatgtagtggaaatcactatttgtagaaactgtcaggtcaaaatatttaactgactgttgacatgtattttcttttttccttgtttttgttttttggggttttctgctttaagatatataccactatgtatatccagttaactgagagaattttgactctcttaataaaactgcattaagtttttgattttgtagaaattagcttttgtctaggcaactagtggttatactctgcaaatattgtaatgaatttttacttttttgatttttgtaataaaaattggtgcagataaaatgtcaaatgaacaaaccagtgttctaagagtgttactaacattttgttctaaaactgtccttcacaaattgaataaaaaactctcacactcagtgtgtccctggggtttctctctgggcttgggggccggcggggtgtggatatctgtggaaggaatgggaagggaagagaagtttactattgtttcattttgcttataagattttacttgactcttctgacactcttcatacggtgttttttctatttttgagtttctactctagttttatgggcaccgttggtactgaacctctgtggaggaaggatgaattgcatgtcagttcagtattgtgcctggg

SEQ ID NO: 9018 - DNA, 1187 bp, Homo sapiens
ggggaagccctctatgggaagagtcccatggtgtgtgacatgttagggtaatcggatgtatttaagctgcgtcctcattctaaaagttattagaactgagctcttctagatttaataacatgctttgctttggtagtgaagaacattgagataaaatctagtattaccgagttagagataattttagatcatcccttatactgttacgtgaattcctgtgaacatgaatattactgattctcaagttccagtatacagaagaataacttgtcattgcctgtcctggtgtacccagatgttccatgatggacgttttatcccataagacgtctccctcctgatagatgtctgtatatgcagattaaactaccaacattttttccagcaaaggtggtttttgaaagtaacctaatgaaaccctggctgccatggtcattttaattgctggactgagaagaagcgactctgcgttgtgctgttggcccaggcctgcatgcctgaggactgttggccgttacagttccttgctgtggtcgccggtctctctgtattctgccactgctctcatgtggcatttggcagaagtactacgtagatttctgtgctactgaaaaaaataaaaacagtggttccttttaatagccctgatttgagacttaggagagggtcaagagtccctacctgatttatgaggagagaagattttttaaaaacctcatgtgatgctgtcatacatagttcaaagagcttccttaattcacttcatttacctttttttccattttcgcttgagaactagagaagtttgtgttctgttggaaccctctgtagaacactttacactcagttctgatggaccttttcaggggcgattttttaaaaaccgctctcgaaagtagtcttaaaatgagagcactttattgatggcttttcaggactgtgttggtatttttcatgcagtgtatttgtcagcttacatttttcagttgagctacctgatgctactgacacacacatgattttcctatcttaccaggcaaatactactgttaacgttttaatagtaagtctacttatgcacattgattttactttgaaaaaagaactggtttaaaaggaaaaaaaagaaactaaaattctttaaaattgtaatggcagtgaagcattttatagtttctcctccctca

SEQ ID NO: 9019 - DNA, 1165 bp, Homo sapiens
gcaaatatgtgatcccttattatttaagtttcctgtattatgaaccattgcccgttttaaatcacacagaagattctgaatctgtaaaaactacacatgtcaatgttttacagctacgtaattcgaattgacttgattttttcaagtaatcctagaaagggggagcattccatatagaaactgctgaaactgccacaggtgcttctccgaaaaccttacagttgtggcattgaatgttcagtatcgcttcctttctgcacacgaggcatactgttgaggtatttgttgcggtgattggttttaacgctaatctaggaattcagatagagatgctttagatttgcatgctttgcttacctaatttatgatatctacctttctatttgtaaactaacaatagctaagttgagatcagaattttaacagaaatattatttatataaaaattgttatcttttattgtcacatggcattaacaataagaaaacatcctgaaggtgatgtgacaactcggattctaaaaattatacttcaggtatttcctgatccgtggtttttcaaaattgaaacaaagtcgttctcatcagaatggcttctcctttgttctggaattgtggcactataagtggaaactggtgggaccctggctggcttcagagtggagcctaatttttaaagttctttaggggagaattcttagatataaattttagtgaaagttctttgggggagaattcttagatataaatttgagtgtttgaagagacagggtcttcctgtgttgcctaggctggtctcaaacttctggcctcaagtgatcctcctgcttctgcctcccaaagcgccaggattatagggttgagccactgtgcttggcttagaggtaataaattttaatattctattcagaataagaaaatatagcatataagcatttgtatctttagtaaagttactgccagtttgattttttttttttgcaagttacttagcagaacatgtaattcacagtaaagatgattctgtgttgtaccacattttaatattcctgttttgaaagaatagtagagagaaaatgggtggcctgctcagtgattgcttttcgtagtcttggtgaatgttacaggagattgaatttatagataaaagcacagtcatcgtagtt

SEQ ID NO: 9020 - DNA, 1154 bp, Homo sapiens
gcgtcctctagcccaagcccaatgcccggctgctccagacgtcgacagccccatgccccgcctcctaatcggctgctgctggcgtcctctggtccaggctccgctccctacccggctgctccaggcatcctctaggctagaccccgccacctaccggccgctccaggcgtccgcagctccaagccccgccctccgcccggctgctccaggcggcctccggctcaagccccgccccctgcccggcggctccagaggtccgcggctccaggccccgacccctgcccggctgcacaaggcgtcctctgggccaggccccgcccccagcccggccgctccaggccccgccccgccccctctgtgcgcgctccgctcggcagcctgtgggacgcgaccgcggcgctagtctcgttcctttgtgctgcggcggcggcttctcgagtcctccccgacgcgtcctctaggccagcgagccccgcgctctccggtgacggaccatgtcggcggcgggagcgggcgcgggcgtagaggcgggcttctccagcgaggagctgctctcgctccgtttcccgctgcaccgcgcctgccgcgacggggacctggccacgctctgctcgctgctgcagcagacaccccacgcccacctggcctctgaggactccttctatggctggacgcccgtgcactgggccgcgcatttcggcaaggtgggtgcgaacgctttaaggcgccattttccccggctgtccagtgggagtcggggaaagcgggtctgaggtgcgggggacgtggggcgtgccgggatcgcggggcggaagcgggatcgacggcgcctgtgccccgaggggcctagggcgcctgtgcggcagcgctcgcggcccggagtcgcggcggggcagccggggggcgcggggcggaagcgaggtcggtggcgcctgcgtccggaggggcctagggcgcatgtgcggcggcgcgcgtagcaagtttctaacaaggcgggctccaagggtcccggcgcctgttggccggatcctgtgcgagcgcgcgcgcgcgcggatggtgcggggccctccaggccgggccggaggcgcgagcgatttcgcagagccgggtattaggccgcgaagtcgcccaggcggcttccggggagccgagct

SEQ ID NO: 9021 - DNA, 1165 bp, Homo sapiens
ccctgacccaagtcggggtgcactcaggaccacagggcagggctgggtggggcgccaccttgctctctgtatatagaaaagctggagcttattctgcgaatggagacgatcaaaccatgactgatgaatccagacaggagggattgactctgaggacctgagctacatcaatccactctgtgaacatctcagttacctcattctgcaataagttcagtgactgactaaaagtcttgtttttccagactttgaattgaatatataaatattatatatacatgtttcttgtaaatatcccattttgaatgcatacctgtggtggttctgtccgggctaatccccatgctagaatgtcctttccagctacgtgaataagaagtcccatgcccgcatccaccggaagcagaagcctggtggatgcctggttcgttccgcagcaccagggcctccaccgtgctgtggcagcaccccccatgtcggtatttctaaataaccttatttatacctgcagagatacacttcagtcccattcagaagtcttctcttaaagcagcattacagtcccagacctgcgggtttctgagggcaacttgctggctgacagactcagtcttgacctcaaggaaggcccatacggcactgccgcatccacctagaggtgtttgctcttgtccgctgtctgagtactgtgattctcagatgagtttgctgcgttttgggaggacacagacggttctgtataggctagttcagtaacaacaaaatacactgttttgtcttccctcaaagagagatcttactagaacctgtaaatagaatgtattatttattataagtcactgcagctgatgaaaacagatggaggccatgctgcaggctgatactgatgggtggagttttgtcatcaggccagcctcatcccgaggtctcctccaccattggccgtagccagcaggcttcagtgctcaccgaaagtaaaatcccctccttcagcaagaataaagcaatatacaccttaggttccactaagtaacataggcataagcagggaacgtttcccccactgtgttccagtgcagaggagacgaagcctgtcctcaccgcggctcgctgggcccaggctggctctggaaagcctgtgcggtcctgggcaggaagcccggcc

SEQ ID NO: 9022 - DNA, 1268 bp, Homo sapiens
cacaagcaaagatcaacactttcttttttggtaagcttgagttttacaagttattttttggtgatgcgtaagacattgcagtgggaaaccattcaacttgagtttattggagtttgctgttgtagcaggttttaactcaggaacaactcttgtctgatctctccgcccctctgccgggaggcgacattaactgtcctctcggagccggtagcgttgctgtccgagtccccaggacggatctcctgcagacctgccttaatgctcagatcgaagtatttcacaagaatacttgtgtttttaacagcccttcccctggacggtgcggccatgagggcctcatgttacggcattgccttttctttctgtggatccagtatcttcctcggctttttagggagcaggaaaaatgcgtctgagagcaactctttttaaaaacctgccctgttgtatataactgtgtctgtttcaccgtgtgacctcccaagggggtgggaacttgatataaacgtttaaaggggccacgatttgcccgagggttactcctttgctctcaccttgtatggatgaggagatgaagccatttcttatcctgtagatgtgaagcactttcagttttcagcgatgttggaatgtagcatcagaagctcgttccttcacactcagtggcgtctgtgcttgtccacatgcgctgggcgtctgggaccttgaatgcctgccctggttgtgtggactccttaatgccaatcatttcttcacttctctgggacacccagggcgcctgttgacaagtgtggagaaactcctaatttaaatgtcacagacaatgtcctagtgttgactactacaatgttgatgctacactgttgtaattattaaactgattatttttcttatgtcacagaatgtgtcgcttcgtcttctttgatgtgttttctgtgtgcttgttagctttacagtttctttgggctgttttagatttgaaaattctgtctgtctttgatactgaagataacatgtttcctttaaagtctagagtttgagaaaatttgaagatttttttttaaaagacaaggaaagaacactggaagtcttaggaacaaaagctgaagtaacaggtcacgctggtaggcacagcccccaggtcctcacccatgcctggaggaatgacctgcattctggaaggcgctcaggacaccgttttgtgggatcaagtaagcgaaactttcttgaagatatctgtggggtcccttttaggagctgtcataaga

SEQ ID NO: 9023 - DNA, 1218 bp, Homo sapiens
ggctccgtgtgtctctgggtaccagggggcggcgcagctcccacacgtgaagctcgcggtcctcccagggagctgcgggtgatgttcgttgcactgctagacacgaaattcccattgacgtcctgcaggaactgcatgctgcaggtgtcctgcccttccgcccacgagtgcgccatgtttcagcggagcggcgtgtgggagaagccacgtcgtgtttcacatgtcggagtcgaatgcatttgtaaatccctaagtcaagtaggctggctgcactgttcacatttgtctctaaaagtcttcatcgctaaaagataccataatttgctgaggcttcttaagctttctatgttataatttatatttgtcactttaaaaaatccatttcttttagaaaaaattagggtgataggatattcattagttaagatggtaacgtcattgctatttttttaacatcctctttagaggtaatttttgttaacataaccaaaaattaaattgaaacaaaatgtcccaactaagaaaatatatagagcattttatttttttttagtgttgtaaaatattaacctctgtgagatcctttgtatcttaatgcattacctttacacatatttattcttattttctctcctttcagagtttacatttttatatttaatttactatttcagatttttaaaatagtatagaaaaaagtaggagtgatagagaacaaaaatactcttatacagtgcaacccaaataccgcgaatgcatcagctaaagcagcgtgtaaataggagtgacgagaaagttaatggagtattttattttcaaagttcctgataagcattggaaagaaatcgacatggataatgaagatttcctttttccttgcctattttttcattgtaaatatttatatactactgaccaagatgttggggtgggggggattgttttttgtaaaaatgtcattatcaggtcacataaatctgcctttatgttgcataagtgaaaatttagaaaattaaaagcaattatctttcagatgcattcgttatttcttgagtagtttatgaagggacagtttacttgctggatttgggggttgagggttggtagaatttgatttaatatagtacagcatatgaattatttaatcagtgaaaccaggaaagtagactttgtgtgacttttggtatagaagcaaaggcaatgtcaccgctcaggtct

SEQ ID NO: 9024 - DNA, 2833 bp, Homo sapiens
gtccctcggccgcctggtacagctcccactctcagcaggtgacactcgcggcctggaaggagaaggtgtccacggagcccccacccatcctcggcggttcccatcaccactgcagttccatcccaagtcacagctgccctaggtcccgtgtgggaatgctcgtgtgatggatggtcctaagcctgtggagactgtgcacgtgcctcttcctggcccccagcaggcaaggaggggggtcacaggccttgccctcgagcatggcaccctggccgcctggacccagcactgtggttgttgagccacaccagtggcctctgggcattcggctcaacgcaggagggacattctgctggcccaccctgcgcgctgtcatgcagaggccattcccccaggcctgtgtcttcacccacctgccatcattggcctttgctgtcactgggagagaagagccgtccagggacccatggtggcccacatgtggatgccacatgctgctgtttcctgcttgcccggccaccacccatgccctccatagggtgaggtggagccatggtggtgcgtcctttactcaacaaccctccaatccggatgctgtgggaagggccgggtcactcggataccatcatccctgcggatgcaccgccgtaccctgctcatctgggagtggtttccctgcggttacgtccaagcccgcctgccctgtgtgttggggctggctgagtttcggtctccccatcaccggccgcctcgtggagaaggcagtgccacgtgggaggacaaggccacgccggcagcttccagccctgccgcagaagtgccaggatgtccatcagccactcgccagggcacggagccgtcagtccactgttacgggagaatgttgatttcgcgggtgcgagggccgggagacagatacttggctgtgatgagcagacatcctctgtccccgtggaggggtcaacaccaaggtggtgttcgtgcaccagaacctgtctcgggctgacgggggtggcacacaggacacgggtggatcccaacaggcagcaccgcacctctgcccgcctcccgcactgcagctccgcccgccgggctctgcgtccccacgtcccctcgtcccatccccacgtcccctcatcccgtcacctcgtccccacatccccttgccccgtcacctcgtcctcatgtccccttgtcctgtcacctcgtccccacgtcccctcgtctcctcatccccacgtcctctcgtccccttgtcccgtccccacataccctcgtccccatgtccccacgcagggctctccttcgtcttaggatctgtccagcgctgctctgggtgggttagcaaccccagggctgctgtgataggaagtccctgttgttctccgtactggcatttctatttctagaaataatatttgacatagccttaatggtccttaaagaagacatttcagtgtgagattcagacttcagacgctgaaactgctgcctttcaggaaagcaccaccaacgctggaggaggagccggccctcacgcccgccccgcgccacgctgtggaacggggctccggcaagtgaaacccagagggtgtttccgaggtgctcgacagtaggtatttttggaagctcagatttcaccatttgattgtataatcttttacctataaaatatttatttgaagtagagggtaaatcagcggtaagaacagtgaacacagtggttgggataaaataaggtgacaaacatcacaccaaagatgagggtagcgagcaactggcttgagcagacagaacggggaagactccactctgtcccgaggggccagccgcaggcgtccccagggccaccctgccctgaggtccttgtgtggccgccctggcttggcagccctgcccacgctgcccccgcaaacaatggtgtgtgcgtttttacagccctttttaggaacccaatatgggcataaatgtaacacctgtagcgggggcagattctctgtatgttcagttaacaaattatttgtaatgtatttttttagaaatcttaaaattgcctttgcactgaagtattttcatagctgtttatatctcttttattcatttatttaacatactgtctaattttaaaaataggtttttaaagctttcatttttaagtttatgaaattttggccactttacatttagattctggtgagagttttgactgaatgttccaatctctgatgaatgcgaattttcagatttgattttattctctacacacacctcttcttttcttggtatttctggtggcagtgattagttgaacagcacatttaaggcacgataatttgctacactttttctttacaatttgttgcaatttcatctgctttctatgtttcattgttaattgccatccttcagccttaaaaatagaagattctcacgtgaaggtttagtaagttgggtcccagctctgcctgtgtggagatagtcaccatgtacctctgacaacaagttttagtgtgaaagtcactaaacttttacacactcccaaacgtctttttaaaaattgcttgggaaattattaaatgaatgtgcctgatgatttgaaatagacaaggggcacgagataaaaaagaaaaggatgagaagatcctcagtgaatgacgttgcagggtcttcatgcaattttccacctcgcagtagttagtatttacttgccttaaactaactttgaagcaagtaatgtcaactttgagcactttgttgagttttgaaaaatcttatttgttgctgcacaggttaataaattatcaatttgtaattcagcatgttggtcagagacacg

SEQ ID NO: 9025 - DNA, 1350 bp, Homo sapiens
ctccctgggatgaagagtccccctcctggcagaatgtctgggctttgcagagcaggccccgggggtgaagtcgcagcttcacttacaccagctgctctgtgagcaaggcttggtgccctggacaaggcccttcccctttagggaggtccagcctcgcaagctgaaacctcccctcggctcagccctataccaggcggccacagcaggactggccacacccacgccgcacctcatccgtgcacgcgtcggagcacggccagccttccgccacgagccagctgggaagggccgcggccgcctaaagccccagtcaacccagcctgtgtctgagcagacagggcgaacaagcaggccacaccgtctcgagggaggaggccagatgcggccagcgtctccaacagggtgaccatccgctcggcttgctgagcgtttaaacaaatgtttagacaggctgtggggactcccctgagttgagccttggccaggggtccggtgctgtcgcgggaaacctccagccttgttcttcaaaccactcagctcatgtgttttgcactgactagtactgaataatacaaccactcttatttaatgttagtattatttatttgacaactcagtgtctaacagcttgatatgcaggtccttgcatcctacatttctttaggaagttacccatttgtaactttaaaaacaggaaaaatatcagttggcaaatgcaatcttttttttttttaagctaaaggtgggtgaactggaatgaaaatctttctgatgttgtgtctataagcagccttgatgggatatgttagaagtgtcatgaaagtgtgattctacttttgcagaaaaatctaaagatcaatttatatagctttattttttactttatcaaagtatacagaattttaatatgcatatattgtgtctgacttaaaattataatgtctgcgtcaccatttaaaatgtctgttcattatgtaatgtaataaaagaaggtcttcaaaaatgtatttaacatgaatggtatccatagttgtcatcatcataaatactggagtttatttttaaattattaaacatagtaggtgcattaacataaatcagtctccacacagtaacatttaactgataattcattaatcagctttgaaaaattaaattgttaattaaaccaatctaacatttcagtaaagtttattttgtatgcttctgtttttaacttttatttctgtagataaactgactggataatattatattggacttttctctagattatctaagcaggagacctgaatctgcttgcaataaagaataaaagtctgcttcagtttctttataaagaaactcaca

SEQ ID NO: 9026 - DNA, 1136 bp, Homo sapiens
ccaccaccaaaagcagttagaagccaaggagattcctttatctacctagggttcattttcaaaagaaaatttaaactataatttaaacaattaacgttcttttctacaaaaaaaatgcagggacttgatttttttaaagagcttcactgaattaggatatttttattgcttttaaagaaaatacaaagatgcagtttctgcagggtgtggcgtggaccagtgctgccgaccatagctcagagagccctgcccctgcctcactgcactgcagcctcctcggaggccgcacctccactccactccccacgcgccccctgcctcccacccaggtccacctgccacctggtgaccaccttgagtacagaagtgaaagtggggagagtattttattcaagtcacagcagaactggaaaaaaactcttctgttttaccaacttcttgtgtttcagaaacatattctgttcaaaacttttgaagccctttcggtgtctagtctgcagatgtttttgtatgtgtgcacctctgaccatgtgtgtacatatgtgtcttgctggaaaggacatattcgctgtccccgtgctgctgggagggccgcctcacagcctcacggttcccagccccagcacagtggaggcaggcgtggctgcattcccctcacgctaccctcccagcggcttgtagccgtcactggccagacctccagggtgcggaatcaaataggaagcatgcagagactcggcagcttttcctctgatgtgtaagttatttggaacgcgtgctgtgtcccgcgatgtccctgatgtactgtgcaggcgcggtgcctccgtctcgtcgcacagctgcgcgcccttgtgtgaccctccccataaaggcactttacagcttcatgtttcatccactgtcacttttttttaactgctgatgtaaatggaattttaaaagcagagttctttattgtatggatgacgtttgaataaatatcagcaactcctgccatctgcctttgtctgtcaagacacagaacgtctcagcagtcggggtttccagggccgcagtgcactgtgcttgcacatggtaagtcattgttgggacggaaaagaagccggcagtgggcagggcccagcgtgcggctcagg

SEQ ID NO: 9027 - DNA, 2196 bp, Homo sapiens
ttatacgtgcccttgctgatggcagatgtcgggtctgcctcgcttatacgtgcccttgctgatggcagatgtcgggtctgcctcgcttatacgtgcccttgctgatggcagatgtcgggtctgcctcacttatacgtgcccttgctgatggcagatgtcggatctgcctcgcttatacgtgcccttactgatggcagatgatgtatgtacatttcacaagtttcacgtttccctcaggaaaccacactctgaccataaactcacatggacgctttttttatcaagagataacgttaactttgtctttaaaatagaaagttttgttcatttcataaatatgtgtataattataaatgattttcatataaatatctatttgtatatatatttctataagtatagttacatacttcatgcatataccccttgtatgtaaatgtttgtaaatttaatgccattgtaattaggggggttttattcttcttttttagcctggagatttgaaaaagagaattgaatctctgatagacagagactatatggagagagacaaagacaatccgaatcagtaccactacgtggcctgacgcatctgcagacggttccccttcatgaaacactagaatgtaccctcagagcaggaagcacacctgtgccatttctgggactctgattgatccagctgtggacattggaaggcgaaggaagggaggtggctcctgggtcatctttcacaaggctcaagacttcaacctgcagatgtatctttttccctccagtttttcctctagttcttttaggcatttaaattgtttctgttactctgtgcaaaataactttgagattggacaagaagatgttactaaagagaagttcctttaaaaggtcttgttcttgtgtcaaaaagctgcaagtttggtttgttctcgtgtgtgatcatgagtgcacaatgaagaagaccctagatgctgcattttttagctctgaagattccttaggtatccctgaagacagctcgctcagatgatcagcatttagagtgaaaacaagggcccttcatgggtgaacattagaaagagccagggttcaaagctggcgaatggatgacgcaccctagccactggcccctctctgtttcatgtatttccaaaagttgtaaactttgatggctgatttttcgtaagtcaggtttctaagtgagctccctgaggtgccaaggccatggtgtccgccctgctgcgtctgttcgtcagctgagttccttgtgaatctctgttttagggtttggggctagtgtgtttgtgtttccattctaagattgagtctggcagtccctgtttttttgcattggggtaactgctctttgattttttttaattgcagtatttgtgtgattgcaataataaagtttggtttggtttttacagtcatgcgcagggacgatccttgttctctgctgtaaactgtaaaaagtttatggagacttaaagtcttgatgttgtgaagcagaggttattttgtggaaagattaaaaggattttgttggtacctggttttgtgttgtgtatatatacatgaggttgaacagtgaaaggaaagttcagtagtgatgttagaagggtaactatgacaaagatacttttgagataacatttaaaagtactttatattttacataatagcatgtttcattttgattaaaagctaccaaaggaattttgatcatggcataagtgtttaaagcaatattttctggaatataccaagtttatataatttgattttgtgctaaattattaagagtctctttttgaaacatgcgggtttgaaatatgacaccttgtgggtttccatattaaaatcctcactctttaattgtcatttctatctttgaaaattttcatttatgagttccatgatatgtggtctaagaaagaccaaacagatttctattttttttttcttataagttcgttgtgtctagagattgttaatattgtaatttaatgtagacttactttgaataaaattagtttaattggccttaaaattacattaataaaactttgtgatatgcaaatgacacattcttcataactctttagcagctttgactactagtgcactagacagaagtcagagcagggagcacctgtcccctctcaagtgattattctttcctggccacctctacca

SEQ ID NO: 9028 - DNA, 1187 bp, Homo sapiens
caaacctaggctcaagcaatcctcctgcctcagcctcctgagtagctgggacgacaggcagacaccaccatgtctgattagtttattttgtttttgtagagatggggtcttgctatgttgcccaggctggtcttgaactcctgggctcaagcaatccccccacctcagcctcccagagtgttagcattacaggtgtgagccaccatgcccagctgcaaatttttgattatatgaattattaagccaactttctcttacacctgaaatacttttcagtcttttactgacatgtaatactaacctttttttggtttatattaaaaatgagtacctcagtagtgatatcttagttggaaatgaagtataagtttatatcagacttacagaaaatctctttctttgaacttttaataacctgcatcccaattgggttacatttaattgtgtttattctagaacatgacctttgacctgccatcagatgccacagtggtgctcaaccgcagctcctgtggaaaagagaacacttctgaccccagtctcgtgattgcttttggaagaggacatacactcactctcaatttcacgagaaatgcaacacgttacagcgtccagctcatgagttttgtttataacttgtcagacacacaccttttccccaatgcgagctccaaaggtaagaaccaaaatgggccgattatgaagtgatagaaaattgggttggaggattgtctaaagttacttttacctaagaagtacaggctgggtgtggtggctcacacctgtaatcctagcactttgggaggctaaggcagacagatcacttgaggtcaggagtttgagaccagcctggccaacattgcgaaacactgtctctactaaaaatactaaaattagccaggtgtggtggcgggcacctgtaatcccagctactcgggaggctgaggcaggagaatcgcttgaacccaggaggcagaggttgcagtgagccgagatggtgccactgcactccagcctaggcgaccaagtgagactgtctctaaaaaataaaaaacacacagccaggcgcggtggctcacgcctgtaatcccagcactttgggaggccgaggcgggcagatcatgaggtcaggagttcgagaccagcctgatcaacatggtgaaaccccctctctactaaaaatacaa

SEQ ID NO: 9029 - DNA, 1209 bp, Homo sapiens
gcggcacccccaccccctcagagagagcacccccaccctcaaaatcctactttggtaaatattaatgtttaaccagttagcaaaatatttaacccagttagcaaaattaacaccgtcatttcgatagttactctgttgtgcatagtaaatgctgcaagatgaacttcacattggatgaagcagatttgagaaacgtttgccagaaagtgtgcctccccttcgacaggaccctaagcccagagaaaggaacagaggcccctgcagctgctgtgcctgcgtgcaccaggctagatagtctggtagcctgcgtgactcctcttcctgccgacgaggtaggcgatgaggacgatgaggaccagccccgccagggcaccacccacagcgatggggatcagcatgctgttctcgtccagcagacactcctccactgccaagacagacggatggtgtcagggctctgctcacacaggggcctgcaaacaggcctctctccccaccactcccccacatcagccaaaaggcaaagaggaaccctggcggaaggttccagctctagctggaattgtcacttggggaagccgctgcagagactggtgctctctgcacggcgaggaaaccacacacgtctctcccccgtctggaatcaggggctgtggccggacagctgtgctgcgtccagggcctctgtgcacatcagatgacagtgttgtattcaacgttcatgggagaagcgccaccactgtttcttaaaatgattcccttactctcaaatggtaccaggggctcccagctgagagacacgctgggcctctctaaagcagggggagttacctctagaatctcagaccggcaagaagaaacagctccttgcagaggaacaggggcgtcgccccagcccacacggaagcgactaaacgtccacaggcggagtctgaagcacgtcctccacaccccgcgacagctgccctcggtgacactcaccagagccaaactggccaccttccaccttgaaagcctggacccacactttgaatatattgactgaaaacgccttcgtgacacggacgtgctcctccgcgttgcacttgtaggaattgccgactgtggcctgcagcgctcgcagggagccgttggcagctttaaaggcagggtctgcaacacacacagaggtctagtggctccagaataccctgggcgcgcgggcggggg

SEQ ID NO: 9030 - DNA, 2052 bp, Homo sapiens
aaggagctgtttcttcttgccggtctgagattctagaggtaactccccctgctttagagaggcccagcgtgtctctcagctgggagcccctggtaccatttgagagtaagggaatcattttaagaaacagtggtggcgcttctcccatgaacgttgaatacaacactgtcatctgatgtgcacagaggccctggacgcagcacagctgtccggccacagcccctgattccagacgggggagagacgtgtgtggtttcctcgccgtgcagagagcaccagtctctgcagcggcttccccaagtgacaattccagctagagctggaaccttccgccagggttcctctttgccttttggctgatgtgggggagtggtggggagagaggcctgtttgcaggcccctgtgtgagcagagccctgacaccatccgtctgtcttggcagtggaggagtgtctgctggacgagaacagcatgctgatccccatcgctgtgggtggtgccctggcggggctggtcctcatcgtcctcatcgcctacctcgtcggcaggaagaggagtcacgcaggctaccagactatctagcctggtgcacgcaggcacagcagctgcaggggcctctgttcctttctctgggcttagggtcctgtcgaaggggaggcacactttctggcaaacgtttctcaaatctgcttcatccaatgtgaagttcatcttgcagcatttactatgcacaacagagtaactatcgaaatgacggtgttaattttgctaactgggttaaatattttgctaactggttaaacattaatatttaccaaagtaggattttgagggtgggggtgctctctctgagggggtgggggtgccgctgtctctgaggggtgggggtgccgctgtctctgaggggtgggggtgccgctctctctgagggggtgggggtgccgctttctctgagggggtgggggtgccgctctctctgagggggtgggggtgctgctctctccgaggggtggaatgccgctgtctctgaggggtgggggtgccgctctaaattggctccatatcatttgagtttagggttctggtgtttggtttcttcattctttactgcactcagatttaagccttacaaagggaaagcctctggccgtcacacgtaggacgcatgaaggtcactcgtggtgaggctgacatgctcacacattacaacagtagagagggaacatcctaagacagaggaactccagagatgagtgtctggagcgcttcagttcagctttaaaggccaggacgggccacacgtggctggcggcctcgttccagtggcggcacgtccttgggcgtctctaatgtctgcagctcaagggctggcacttttttaaatataaaaatgggtgttatttttatttttatttgtaaagtgatttttggtcttctgttgacattcggggtgatcctgttctgcgctgtgtacaatgtgagatcggtgcgttctcctgatgttttgccgtggcttggggattgtacacgggaccagctcacgtaatgcattgcctgtaacaatgtaataaaaagcctctttctttttggggtgggccttgtccttctgtcagctaaaatgggagctcatgagagaaggacgtcagggaaacggggttgagggtggtctcggtgcagagagaagggtgtcagggaaacggggggtgagggtggtcttggtgccagacgtagggaatggtgttgggagtggcccgagtgcctggcacagttgtctggttcattcatgtaacatgataatttttaaatcattaaaaaaattacctttcatacagataccatggaatactatgcagccataaagaggtatgagatcttgtcccctgcagggacacggatagagctggaagccattattctcagcaaactaacacaggagcagaaaaccagacaccacttgttctcacttgtaagtgggagcttctgatgagaacacatggacacaaggaggggaacatcacacactggggcccgttgggtcgggggcagggagag

SEQ ID NO: 9031 - DNA, 1172 bp, Homo sapiens
tgtgggaggggactgactgtctgaattgtctttttcgactgtaggtaattggtacgcctcagagaccggcagcgtcaaacaccctggtggtaggaagcccacacacccccagcactcactttgcctctcagaaccagccttccgactcctcaccttggtctgccgggtgagcacttccctctggacccttagagttgtaggactgcttgcggttcgcacctccacgttctcctgggccacgtgtgtcacacagtcgtgcgatggggctcccacgcgcgttgacgccagcctccgaatcacactcacccatcatcgtggcctgcacaggtgtgcagccgaggcgcactgcctcggtcatggagaagtcgggctgggcaccgcccaccccgctttgtgtctggtgtagtgggtgctctctgaagggctggcagctcttggccaagacggggagaagctggcctcgtactcgccacaggacctcggagactttccctcgtctgtgctgggagcatgtgggatggatttcacccactgcccctgaattcagcctctactgcccctggggttacggcccccgcgggtggtcccgccagagctgctccttccactaaagcaagatctgatgagctgtgtctttccttaaaaacacacacacgcaaagctgcaaaagcctgcctgtgttggtgcccaaagcttcaccagctaggaacctcaggtggcctttcccgccatgtggggactgaccagagtgtacagagttgggctttccctcgacctgaagcacacttagtgctttgcacctgttgtcaagcggctgtcacagcccaagctgtatgaaattacagcctgctgaaattagtcctaagaattcccaaatttacactgaaacgtcccatagttcctgattctggctgccctctttagaaaagtggtgcttggggctcacgcctgtaatcctagaggccgaggccagcagatcacgagttcaagagattgagaccatcctggccaacgtggtgcaaccccgtctctattaaaaatacaaaaaaattagccagatgtggtggcacgtgcctgtaatcccagctactcgggaggctgaggcaggagaatcgcttgaacccaggaggtggaggttgcagtgagccgagatggcgccaccgcactccagc

SEQ ID NO: 9032 - DNA, 1919 bp, Homo sapiens
accacaagccctgaggcggggggaggctgggtgggccgcctgcactgacggcgccatccgcctcctgccttgcagtgacctgaccaacggtgcagatgggatgctggccacaagctccaatgggtctcagtacagcggctccagggtggagactccggtgtcctacgtcggggaggacgacgaggaggacgatgacttcaacgagaatgacgaggacgactgacgtcctccccacttcagattcggcttcaggaaaacgtttagcgaaaagaaactttttttttaatgtgggttttctgtttccttttggcctactcccaagaagatattggtaagctattgaatttagatatgcacctctgataagcaaggattgtttcccgtaggattaggacgtgctgtggatgtgtgttttgataccagtgtgctgatgcagagcgtttatttacttgttaggattttgtgttttcatttgctatttttctttaagtgcagagttcatttttgcccctgaaaagtttttgctgagtttgctgaagaaattgtatttcaaccacatccatgaaaataaaacacctcctgttgtggatggtgagcccctgatgccgcttatttgccgtgagtttggacggcacccctgctggcggatagcaagactctgtggagtttgttcagtggtacggtgtccaagcaaacagcagaatgcaactttctaaacagccccaagcaaacagcagaattcaactttttaaacaataaacaccatcaaccttattgactttattgtcccttaaattatattgactgttgtgattccatcaagtttgtacactcttttctctccctgttttgcagcaacaaattgcgaagtgcttttgtttgtttgttttcgtttggttaaagcttattgccatgctggtgcggctatggagactgtctggaaggcttggaatggtttattgcttatggtaaaatttgcctgatttcttacaggcagcgtttggaaaccttttattatatagttgtttacatacttataagtctatcatttaaagacatgtactgaaacaaatgtatttgtttcataagcatcttcctgtaatctattataaaattgaaattaaatatagagaatgttttaacaattttttaactcaaaatttgtcaatcatttttaatagttctttttttataaaaagaaaaaggaatttaaggacaggcagtagtctcttttaaaatttattcacaaaacccattaactgcacagttgctattagctgcctgttctaaaacgatagtctttttattgaaacacaaataaacttttctgtaatattttatggtatataaagagactttaattgtttgacttgtttaacttggcactgttagtttttattaataaaacgcgcatgggcattttaaacaagctgtgtttctctaattcaggattattatctagaaatttgtctgtcttgttggttttactttatacttgagtgagaaagtaggttgttaggcccagacgcggtgggcccgggtggtccctgtgggtgcaaaccccaccaccacatgttgtctgaggcacatcctccgggagcccaccctgaaaaggtggaaggtggccaagggtggaggtcttggtggacacagggcaaagaggcaccttccttttcggtgcctgtggtgcagagaaagataagccaagttccttggccttttttcacaatgaaaattgagacaaaatttaaaagtttgactttgagaacaagaataagattgagaggattctgggaagatggtggaatagggagcaccaggaatctggctgcccaggtagatgtctacctcgcgggcaggatctgcctgatgcagctgttctgtaactacggaatctactgaaggcttaaagctttcaa

SEQ ID NO: 9033 - DNA, 1113 bp, Homo sapiens
atgcacctccggccgtgtgtgcgtcagtctcgtgcacgtctgtcttgcgtgcacggtgcgtgtgacgctgggctctgtggctctgtgcccgggaggcctgctggccccgcctcggctttcggcttcatcacattgggaggttcagagcattactctcccactgtgcctgccatccaggcagccatgggaggcggcctccctgttccactttcgaggttcgtttgattcctggctgaggggtcagttttatggctgggaggtgcagaattacacagaagtcccagtctgaggatgtccttggtgcttgggggatacgggttctgtccacagagtcccttggagggaaaggtgtgggctccagcttctccaggcgtctgcggagcccacagttgaagcccacatcgttttgctgttgaatggggtttaaaatcagaattaacatttgccaccccccgtggaagtttgaagattttaaaaatagaaatgtacatttttcaagctgtttttctttatgtttttgaaggaccatttttaattagctctttgatacaaagtaactcagaacgtcaaaacctatacccactaaagggaaggctgccgggaaggcaaatggaacaggaatggagcctgtctcaggaaggccagctgcaggtcctccagaaaatcaaagaagggaagaaactctgagtttgaggtacaggggcttcggggtgcagacgtccctccagggcccatggtcagtattgcacctgtgttatgaacccccagatgctgtgcagggcaggggcgggggctgctgttttattggggaggggagcatcctaaaaatggggtccaggcagacccctccagacctcacactgccgaggaggcctttcccaaagggcgtcctcccgggatgcagacggcaggtgtgtgggaagcgccgtttaaatacacagcacgacgtatccttgtaccgacttctcccggttcttgtttgaaaatactgtagttcaggctcttgatctagatggcagataggaactttcttgtcacaaaaatactggaggaaaatgttgtaaaaatagacttttggacacacagctgttggggctgcactgagctgcaatt

SEQ ID NO: 9034 - DNA, 1166 bp, Homo sapiens
tgagaacaaattgaaaaaagtaagtaaaaccaaagagttagcacttgctttatgtaaatatcttattccataaaatttggcatctagtcttatattaagttttcaaaattaaaactttttaaatttagcacatttttaagaatagagcgtttaagatacataagattccaaaaaaaaaaagctttcaaaaatacctttttcctctgaaagactccttatactaaaagattgaattaccaagtaaatgtaaatggaatggtgttgcatggaaatgaagatttttttgttatgcttcctgaatgtttactttgagaaatacgtcccgctgtggaattctgttctaaaattgagaagggaattaaacttactgagaggagtacttataaaacctaaagttataagttttcagaggctctcacatttgttcttgtaaatgttttaaccacttgggccaaacacaaattgaatccacattttattttgtttttgctcattgagtttatgtttacatttctatgtgtttcagtataataagcctagtgaaacggtcatccctgaatctgtagatggcttgcaagagaatctggatgtggtagtgtctttagctgagagacattattataactgtgattttaaaatgtgctacaagcttacttctgtgtaagtatatccatccatttttctgtaggaacatggagttcactccatcttacctaggtgattcacggacgtgctctctgaataatcttgaactagatgataatttaagttatctttaccaattgtagagcactgaacagggtgctgtcttaaaagagcaatttacagacatgaatttgtgcatatttgtagatttattacattaacttgggagggatatacatgttgctcttactgatcttgataatttgcaagtttgaaaattccattttggcacattgttttgtaaaatttattctcaattatgagactcacactgtagatactaggtgtttaatatgctgcacgcagtagctaagccatctcccacatgtatcagttttccagtgtacctaatttaaactttagctaaatgacatatgctattttttgtagatcttggttcggtttaaaatccttgaaattacaaaaattttaattggcaaatacacataacctatttatta

SEQ ID NO: 9035 - DNA, 1104 bp, Homo sapiens
ccaaacatgcatccccagacaaatggaatgataaaccaaaaaatcagttgaacaaagaaacagatcctgtgaaaagccctcctcttcctgaacaccagaaaataccctgcaattcagcagaaccaaaatccatacctgccctttcaatggaaacacagaaacttggttcagttttgtctccagaatcgccaaaacctactcctcttactcccctggagcctcagaaacctggctctgttgtttctcctgagctacagacacctcttccttctcctgagccttcaaaacctgcctctgtttcttctcctgaacctccaaaatcagtccctgtttgtgagtctcagaaacttgcccctgttccttctccagaaccacagaaacctgcccctgtatctcctgagtcagtaaaggctactcttagtaatcccaaaccccagaagcagtctcatttcccggaaacattggggccaccttcagcctcatctccagagtcaccagttctagctgcttccccagaaccttggggaccatccccagctgcatctccagaatctcggaagtcagcccggactacctcccctgagccaaggaagccatccccttcagagtctcctgaaccttggaagccgttccctgctgtctccccagagcctaggagaccagcccccgctgtgtcaccaggctcttggaaaccagggccacctgggtcccctaggccttggaaatccaatccttcagcatcatcaggaccttggaagccagctaaacctgctccatctgtgtctcctggaccttggaaaccaattccttctgtatctcctggaccttggaaaccaactccatctgtgtcttctgcatcctggaaatcttcatcagtctcacccagctcctggaagtctccccctgcatctcctgagtcatggaagtctggcccaccagaactccgaaagacagctcccacgttgtctcctgaacattggaaggcagttcccccagtgtctccagagcttcgcaaacccggcccaccactatccccagagatccgtagtccagcaggatctccagagctcagaaaaccctcagggtcaccagatctttggaagc

SEQ ID NO: 9036 - DNA, 1132 bp, Homo sapiens
ggactgacactgaagatgaacattctcaccatgtcatggacagtgtccgacaggctaagttggctgttcagatggatgtccatgatggccgctcctggtgtgagtgctctcaaaagatctccaacaggtttctagagcagatgttttcaatcagagcaacatttgcagtccctcttttgagtgtgattctgaggtttaagccagagagggcatctttgttttgaagacacacgaaagacattttggggaactacttttctaggaactcttcgatcttttgatcctagttttcacgtaagcaaggaagggcttttgtacagtctgttcaaacttcagtttggtgtccttggtgctctatcctagtggagttttgggtatactaagtatcgtgtcattcctggtttggatttcttgtgggacctttcaaatatactttcaagaatgatcaaaataagtcatatcttgaacttggactctgagatgatttgtcactgtgtttctctttcagatattcttgggaattcatatctttccctttacttctctactggccagaaccctaagatctcccagcaagccctcagtgcctatgcccaagcagtaagtacttatggtcaccaggccagatgaataggcaacaacagaagcaagagcattgttcagtcttctttgtggccctttagcaagcatcatgggcagtggcagtgtttgctggcatctcatttttgtgattttgcaaagatgtgtctgcagagatgactgacttcttataacttgagtgttaggaaccacttgcatcgtgtcgcattggtgctggatagctccttgacctgtctgggtttcttacacacatatataaccaaatcacagagctgcctcaacatgttcatcttttttaatgggaaaaaagtctattaaaataatacttattaatatttttgtacattcattttaaagaataatgaaaacttatacttcagtgtaaattaagtgctatccccaaattaaccgttaggtaatattatggctctggatttcccatgggctaaaagagaaaacaatgtgtagcttgttctgtgtcatttcctaggaattaagtgaattaggttatttaggttttcaagaaatttat

SEQ ID NO: 9037 - DNA, 1169 bp, Homo sapiens
gtactggcacattagttgttacagctccgcaaggctttatgcacaattatgtaatccccaaagctctgaaaaccgaaatttacaaaatttagcaccccaactggtttggtagccaagtgcaggttatagggagctggaaggggaagggggtcacagtaggtggcatcgttcctttctgactgcccgccccccgcatgccgtcccgcgatattgagctccgaacctctcgccctgccgccgccggtgctccgtcgccgccgcgccgccatggaattcgaacgctgacgtcatcaacccgctccaaggaatcgcgggcccagtgtcactaggcgggaacacccagcgcgcgtgcgccctggcaggaagatggctgtgagggacaggggagtggcgccctgcaatatttgcatgtcgctatgtgttctgggaaatcaccataaacgtgaaatgtctttggatttgggaatcttataagttctgtatgagaccactttttcccatagggcggagggaagctcatcagtggggccacgagctgagtgcgtcctgtcactccactcccatgtcccttgggaaggtctgagactagggccagaggcggccctaacagggctctccctgagcttcggggaggtgagttcccagagaacggggctccgcgcgaggtcagactgggcaggagatgccgtggaccccgcccttcggggaggggcccggcggatgcctcctttgccggagcttggaacagactcacggccagcgaagtgagttcaatggctgaggtgaggtaccccgcaggggacctcataacccaattcagactactctcctccgcccatttttggaaaaaaaaaaaaaaaaaaaaaacaaaacgaaaccgggccgggcgcggtggttcacgcctataatcccagcactttgggaggccgaggcgggcggatcacaaggtcaggaggtcgagaccatccaggctaacacggtgaaacccccccccatctctactaaaaaaaaaaaatacaaaaaattagccattagccgggcgtggtggcgggcgcctataatcccagctacttgggaggctgaagcagaatggcgtgaacccgggaggcggagcttgcagtgagccgagatcgcgccactgcattccagcctgggcgacagagcgagtc

SEQ ID NO: 9038 - DNA, 1536 bp, Homo sapiens
aaactgagatacagtgtgggatgggatgagtatgttacgcctaagggaaggaagctgatcagctctgcctttaagaaggtccctgagggtggctacatgtggataaggaacaaggactgaagcgtgagttattactgttcttagaactaataggaggtagtggagaccaacattaaccccatctttcttttcttctccctccttatcttcatcagtttggcacatggaagcatgcacggcgatatggaggcatctatgcagcctgggcatttgtcatcctgttggctgtgctgtgtttgggccgggctctttattgggcctgtatgaaggtcagccaccctgtccagaacttctcctgagcctgatgacccacagactgtgcctggcccctccctggtggggacagtgacactacgaagggagctggggtagttaaaggctcccggggcttctagaaggaagccaagcagctgccttccttttccctggggagaggtaggaaggaaccaggccctcacttaggtttggaggggcagataagagcactgctgaccatctgctttcctccaagggttgctgtgtctagggtgaagtaggcaaaacgttgcccttaaaactgggccctgaagacggttccagccttgtccttcctgtgtgctccctgagagccattcctgtcccttacacattccagggcagggtgggggtgggtagccctgggggttcccctccctcttgtgcaccattaggactttgctgctgctattgcacttcaccagaggttggctctggcctcagtaccctcagtctcctctccccacattgtgtcctgtgggggtggggtcagccgctgctctgtacagaaccacaggaactgatgtgtatataactatttaatgtgggatatgttcccctattcctgtatttcccttaattcctcctcccgaccttttttacccccccagttgcagtatttaactgggctgggtagggttgctcagtctttgggggaggttagggacttatcctgtgcttgtaaataaataaggtcatgactctacgctttttcagttgttaacttgtgtgcatgaaaatatgaggaagagaatgtgtagccccacgaaggggtaagacacgaagacagcaaggctgaaactatggctctttattttcatgtggataattcaaacaaagtcattagtagtctttgttcaatttttttttaaaaaacaaaaaaccctcaaataaaaaatcttgggcttaaaagaactctatcacaggagcctggttggaggattcctagttttatacatgagaaatagaatgcagatttctctgaagagtgtttaaagaaggaatggtagttgagggggcttatttcccaggctcaaagtgatttaggggtggtgtcacagtgctaggtatagggtgataggacagtgatcactgccgagggccttggaacggatcttgctgtcacacaatgcaggtaacagagagtgggacaacaaaaagtaatcaaggcgccaaccaaca

SEQ ID NO: 9039 - DNA, 1179 bp, Homo sapiens
aaccttgacctttaacccgtgattccccccagctcctggaagagatgtcctaatatctcttagggacccagacccctaaattctcctcctcccccattttgatgttaaggtggagagggcatatgcatcctctgtcctgatctaggtgtctatagctgaggggtaagaggttgttgtagttgtcctggtgcctccatcagactctccctacttgtcccatatttgcaaggggaggggatttggggctggggctccattcaccaaagctgaggtggcttctcattaaccctttaggactctgaagggtatggacctacgtgaatgtgtgtcagggggagacttgctggtgggttagtggtcctcaggatgtgatagaaacatccagtgtaaaaaggaagttggaatgggagttggcgggcagtgaacgagtgtggggaaggattggtgctggggcaacaggaaggggcctggggccgtttggctgcactaactttggtagctcagtgtgcatctagagtgggactggggagggagctaagcttgggctgggctgcttggggcttggcatagggtggaaagggctaccctggggctctgaccacactgtagtatgtgtggagggtgccctcccgtctcccacaacttctgctataacaataaactgtagaggaatctgagtaccgttattattctttgtctaggtgtgcctgcatcatgctcctcttcctatcttctccctgtccacgtctcatattctcttctcaaagtgatataaaccctgggagagggcctttgtggcataggcacttcacaaaatatgaccacatagaaactggctcttttccaatacaacggtgttgccttgatattgtagtatttttaagcctgggagagaggaaccatttagatcttaggagacttccttatcaactatgggtaactgagaaaggccacaggatttcagagataccaccaacatcaccacctttaagaaagaattgaagaggctgggcaaggtggctcgcatctgtgatcccaacacacttgagaagctgaggtgggcagaccacttgagctcagaagtttgtgaccagcctggggaacatggtgaaaccccgtctctgcaaaaaatacaaaaattagctgggcttgatggtgcacacctgtagtcccagctac

SEQ ID NO: 9040 - DNA, 1243 bp, Homo sapiens
gtatcacctacagcgccaccaccgggagcagaggagcggggccggccccgggccacccccggagccaccgcctccttcccagcggggttcggccccgcaatctggagccaagccgtctccgcagcctgcgacctgggtggagggcgcctcaagtccccggcctccttctagcggtgctgggccggggtcccgtcggaagcccgccagccctgggaggaccctgcgcaacgggcgaggcggtgaggccgaacccctggacctgtccttgcgggcagggccgggaggcgaggccgggcctgggggtgccctccaccgctgcctcttctgcccgttcgccactggagccccagagctcatggccttgcaccttcaagtgcaccacagccgccgggctaggggccgccggccaccccaggctgacgcgtccccgccctatgcccgagtaccatcaggagagacccctcccagtccttcgcaggaaggggaggagggctccgggctgtccagacccggagaggcagggctgggggggcaagaacggtagtgggccctcaggggcgattagcttagtgagcttaccccgccggagcgggggagcgctagaggtagttgggtagagaagccagcagggggcagcgtgggacccatatcccagccccaggcggaccagaggtggaaggcgcggcgggcgtaggagggtgggctggcggtacccacccagcccaagggagtcacagtgccttagaagtggcagaggtgagggtcaaagaacggggtccctgggctggcagagaaggtttgtgtccctgttgaggagccactctgccagtctttgctggtccataggcgtgagagtttatttttgtacaaggggtgagggtggggggcactgtacccttctagccccatcaggggccctgtagacgtcgctatttttggtacgattcctgtcatccctattgcagagtcgtgtccccaataaacaggtgtcttgaggcacagggccctgtgtctgtctgcctacctatgtcctgcttccctctttgggtccttctgtcaggaaatagtcacctcttcagacacttagttatcacccaaagagtttgataagaaatgcagaatattgggttttacccccaggtttcgatgcagtagctctgatggggcccaagaattagcatttaacaaacagccaagcaagttctcacgcactgtggcctgaggacctcattttgagaactgc

SEQ ID NO: 9041 - DNA, 1176 bp, Homo sapiens
ctcctcccccaactctctcttcattccctctccctctggctccctcccccttcatgcccctccccctctgtctgtcttcagactctgctgctgggaggtgtttctctcccatgcatgaatgagtctctgtaatgaatggaaatgaatggatcaggaatccaggcggagggagggagaatgaggggggaaagacagaaagacagggtaagggcagaaggaagcactgtggaacctggaaggatgtttggctggctgctcagttagggatctcagagcaactggtcccacttggataaatggggagcatggcaagcccacctcatttgctcaccacactgcatagcccaacctacatgggagaggggcatattgtgatggtcttccccaccgccagggggtggggtggtagctgtggttgttctggaccatgcatttaaaatatagaatttggggaagaaatctggattatctgggaggcttgtaggcttggcaagtcaagaggtacagtttttgagtatagcagccccttcgtgcctcaagaagcaagtagggagaatggattggttttgggaatacagaatgctgagagtctgggggtagggagtgactttactgctgaaaactagggctcatcttttcctccaaatctgtctcttgctttagctccacagcacctgttgccttcattagcagcttttcctcctcttccctgcacttcccagaaccaaagaatgtgaagggggtccatggaggtgagtgaagctctggcttcaacctacaagtacctacaactgtatactccctctcctgcctacctctctctctctttgacctcccattattagaagttaactccttggccctgacatctcgattcccatacacctccccccaccccatcttcccgaggtgagtagcaccctgtgttcctagttcaggccccagcccaccttccctcgtgttgtccttctggccctcgaggcgacgcccttgcttcctttacagctctaccttcaccctttgctctacgcagatctttctccacagggctcacgtccccgcgccccgagcggccacttagcgccgtcgccgccggctttcgacggcgagctggatctgcagcgatactccaacgggccagccgtgagcgcagggtcgctcgggatgggagcggtg

SEQ ID NO: 9042 - DNA, 1797 bp, Homo sapiens
ttgctaactcatatcttcggtacatttgattttaatctagtattttgtttatattaaagtgaaaggagatgaccttcaggccattaagaaggagctgacccagataaaacaaaaagtggattctctcctggaaaacctggaaaaaattgaaaaggaacagagcaaacaagcaggtaaatgggttttctgcttgcccttggtatacagttgggttagttacataaggcacttgaaagtacatgttggaatagtggaatataaagcaatgtaatatgaaacttggggagtgtgaattgggaagggtatttgtgtgggaggatttagatttgtgctgcagttctgtgatccttagtggggattgtctacgtcctgtggacattactgcccctagacagacttgtccttctcatccgcagtagagatgaagaatgataagtcagaagaggagcagagcagcagctccgtgaagaaagatgagactaatgtgaagatggagtctgaggggggtgcagatgactctgctgaggagggggacctactggatgatgatgataatgaagatcggggggatgaccaggtgaaaaccacgggaaaggaaagaaaaaggtggtggaggggggctcagggacacatggagtgcctctaactccatcctgtttgtgtctgtttctcacagctggagttgatcaaggatgatgaaaaagaggctgaggaaggagaggatgacagagacagcgccaatggcgaggatgactcttaagcacatagtggggtttagaaatcttatcccattatttctttacctaggcgcttgtctaagatcaaatttttcaccagatcctctcccctagtatcttcagcacatgctcactgttctccccatccttgtccttcccatgttcattaattcatattgccccgcgcctagtcccattttcacttcctttgacgctcctagtagttttgttaagtcttaccctgtaatttttgcttttaattttgatacctctttatgacttaacaataaaaaggatgtatggtttttatcaactgtctccaaaataatctcttgttatgcagggagtacagttcttttcattcatacataagttcagtagttgcttccctaactgcaaaggcaatctcatttagttgagtagctcttgaaagcagctttgagttagaagtatgtgtgttacaccctcacattagtgtgctgtgtggggcagttcaacacaaatgtaacaatgtatttttgtgaatgagagttggcatgtcaaatgcatcctctagaaaaataattagtgttatagtcttaagatttgttttctaaagttgatactgtgggttatttttgtgaacagcctgatgtttgggaccttttttcctcaaaataaacaagtccttattaaaccaggaatttggagaaaaaaaaaaccctggttttttatttttgtattttattattgtttacttcaaactttgttttacagcgtcctccacaaaacctctagaatgcactagatatatttttcttggagtcataatcatgatgcataccaacacaacactactcaaattatatttcattgagatgcatgttgcattgaggagtcaacttgacatagagtggagactttttcaaaatggcttttacatcctaatgaaagtttgggaagtatatcctctctgccttttcatcagtgctttgtggtccagctggcaccctttctgaggtttgtgttttgtgctaaatggttttgtccttaaataggagaggctcaaaaacatcaagat

SEQ ID NO: 9043 - DNA, 22210 bp, Homo sapiens
acttaatgggtaagtgtaagctatccatattaatctagctaatgaatggcttgggacagaatttgacgtttgctatgctgtgtgtatatatacagaaccggtgaaactcaataaaagcaacgtgaatcaagattattgatggcagggaatagttagcatgacctgtaatgtgaaaaacagcagaaactggtgtcagagaatttaggcaaatctaatttgcttgagtacttagaggagggccacttggaattatgtccaaggaaattatattgccaatgatctgccagggagaatttttttttcctgagaatttagagtttagtgctgctgaaatagaatggaagaggaagaagttgactttctagagtatattcagaggctggagtctctgaaattattagcaaatacatacttaatgctgtgagtccctttaagttgcctaatactctgggcagttaacagtgattcagagtgagagtggagaatgttttatcaaggaatattgtttttagcatctgttcacctgtatacttttttttgctttacagttttcggctttgtgagaaaccttaccatcaaacacgatggccagcaacgttaccaacaagacagatcctcgctccatgaactcccgtgtattcattgggaatctcaacactcttgtggtcaagaaatctgatgtggaggcaatcttttcgaagtatggcaaaattgtgggctgctctgttcataagggctttgccttcgttcagtatgttaatgagagaaatgcccgggctgctgtagcaggagaggatggcagaatgattgctggccaggttttaggtaagtgaattttttcattgatgatgtaattcaggcctgagtttttctattcacgttttttttttgtctttatgtctgtaaaactgacagcatgagatattctggatattgcgactgtttagcctaataaaaatacattaggcttatagttataattggctaagtaaaggatattcttcattgtaccattttgtgtagtagagctaggacaactctactacaatcgtgagtagggggagctgggaatgacacttcacaatgtaaaaacgttgcctaaatggttgtgtcctgcccacagcagactggaggagccctctagtgttgattgcttgtctccccattgggatttcactccatccgttgggccgactgcagtttggctcagtgttagattttcttgtattttaaaatgtaatgacacctcagagtacttactacctatgatttggtttattcaagccagaatccagtgtccacatgtttattttattagttgtactagatgtctgttttaacttctcattttatgtgtaccttgtgcctcagtttcaaaattatcatacctttgtttttacaaagttaagatgattatttttaaatttatatttgtgatttagtttattctttgtatacattctactatgtatattgactcaaagcatggtaggttagagttatgtgaaacaattctttgataatgttatgtaaccaaccagatacataatttgggtctatttcattgtttttacatcttactggattgctttttcagaaatttaattctctttagttttgaaacactttatatggtttcaaagtcagaattgtaaatgaggttaatgtaccaaaacctgaaggttattcatgtaatggtgttcagcaaatagacaatatattcagtcctttttttttttttgagacagagtctagctctgttgtccaggattgtgtgcagtagtgcagtcttggctaattgtaacctcagcctcccgggttcaagcgattgtcctgtttcagcctcccgagtagctggtactacaggcatgtgccaccacacctggctaatttttgtattttttagtagaggtgaggtttcaccatggtggccaggctggtcttcaactcttgacctcaggtgatcctcccgctttggcctcccaaagtgctgggattacaggcgtcagccattggacctggcctgagtcagttttcagttggtcatttgatgagctgcttttgtataaaaagggaagataaataagattaagtttaagatatccacatttggccaggttcggtggctcatgcctgtaattccagcactttgggaggcttgagttgggcaggccatgaggtcaggagatggagaccatcctggctaacaccgtgaaaagccatctctattaaaaaataaaattagcaggctgtggttctgggtaccggtaatcccagccgctcaggaggctgaggcaggagaattgcttgaacccgggaggtggaggttacagtgagccgtgattgcactccagcctgggcaatggggcaagactctgtctaaaaaaatacccacactcatctagttaatggtttgaggtggaatttggaatttatattttggggcatttgtatattaaaatgaagctcattttaataaaagcagtatatatgaaaatggagttactgttgactcgagtgctgtagcatgactgggaaggtaaactgaattttagagagtttttggctttttgacatgggctttttagaacaaggagaagataaattcttgtttggtaggcagtgggtggcagggtaggtagctgggcatacgtgttacaaattgtatttgaaaaccagggttgtttccctttgctcttttattttttttggtgtgtgtaaaggttgtttaagcaattgatcaattattcagaaagcagtcgttaacccaggatattttacgtgtagaacagctaatccttacttataaagaaaatctgaagttgcctttgaggatgatttgaggttgtcacacttcactatgttaatttgtgaattggcatatattttaatatatttcattctaatatatttgtaataattcggaatgagctgaaccattcttggaaaggcaaccagtgatagttttctcttgtaatagtaactgagtgaacagtcagtaccttgaatggggagagttgagttgaagtggtatctgagggtggagagtaccaaagacagacttaatgttagtctcaggaacacttgaatggtaaagaacagactacaaagaaacggaagatgaagccttagccttgtaaaaatttgtgagcctttttaatattaaaaggagagatgaagctgagcttgatagctcacacctgtgattccagcactttgggaggtcaaggcagatcacgtgaccccaagagttcgtccctacgaaaaatagaaaaattaaccaggcgtggtggtccctgctacttgggtgggaggatcacctgagcttcggaggtctaggctgtattgagccattattgcatcactgcactccagcttgtatgacagtgagacagtgtcttaaggaaagatgagttgttttgttccacattttctaatttatgtgtctgtgtgattttctaaacttcgtagtttgtattagctgggcatggtggtgcccgcctgtagtgacagttactctcgaggctgaggcaggagaatcgcttgaaccgggaggtagaggtttcagtgagccaaggtgacaccactgcactccagcctgagcgagaaagcgaaactatgtctcaaaaataaaaaaaataaactttgtagtttgttttacccggatacaaagttgtcattaacatttttacttttgtttttcagatattaacctggctgcagagccaaaagtgaaccgaggaaaagcaggtgtgaaacgatctgcagcggagatgtacgggtcagtaacagaacacccttctccgtcccctctactcaggtccggaactttattatttataactgcattgtgtccatcagtgggcatcttctctttctgttttctgggtgtggggaggtttaagtgtactgtgttttatctgtgtataaataaggttttattatttttgtgttaatatgtctcttttttgccctagagaaaatttctagagaattaaaaatccctgaggtttttgctattgatattaaagagtagtttgatatttatagcataacctgaaatacttatacaggatcgttgagcttctaagacactagagagtaagagagggtagaagtgtggtataagaatgcttagtttaccattctgtttttcagtgtttagtttagctatgtcgtatgtggaaatcttagcgaattttaacctgaatttccaatttgaccgctacatttccagtggtctaaggtgattggaattgagtgatttattgtatgaatgattggggatcattcagtgctaatcttgttgatctatttgttgtggtttatttggcatggttctcccctcacctgacattgtgaattagtagaaacatttccaaattaacccttttcggtatttatttttcagctcctcttttgacttggactatgactttcaacgggactattatgataggtatgttaaaatgttttgtatttctgctaaacagctatttagtgagaaccatttcgttcttctggtttgtggtgatgaacatcaaagatgttttcaaacatactcccctaactccaaaacaaaaaaacacctttttctaaatcattaagtagattattaggtagggtgatactgattttaatgcattatttcataatccctggctaacgtggtgaaacccgtttctactaaaaatacaaaaaaattcgctgagtgtggtgactagggactgggttatgggtggctttgggtaacagatttagaactgttgatagcaaatgcttaacaggaaataggatgatgtgcttaagagtgttaccacattgacattctgataacatcagtctcagttaacatgaaggaaatgttaagacttatttggcttgtcgcgttcaaactcatgcagtatatgtaagtatatggagcaaactattgtatgcaatagactttaaacatgcaatatataaagcatattactttatatactatttgtcttataatgccagtattccagtcattagtattttaatgttattactgtatataacaattcagtctgattttggaataaaaattactgattggggaatgcttaacatttgaactgagttaatcagtcatgcatgggagttgtaaaggaatcaagtcagccgttaaataccataaagtatacactgaaagtgtcagacatgaaagtatagactttctgtttgagaaataacctcacagaatatggtacgtagtcattagaaggccagaagagtaaggcccgaaaaggaattcaaatccagattgtaaagggccttgaatgccataataaaatggtgtggttgagcatcattaatgcatcatcaaaatgtttttttcatttgacattagcggtttcctcagatttttttttttttttttttgagacagtctcgctctgtcgcccatcctggagtgcagtggcgcaatcttggctcactgcaagctgcgcctcctggcacagcctcctgagtagctgggactacaggcgcccgccaccacacccggctaattttttgtatttttagtagagacggggcttcatcgtgttagccaggatgatctcgatctcctgacctcatgatccgtccgtcttggcctcccaaagtgctgggattacaggcgtgagccaccacgcctggcctgattttttttttttttttttttaaatacggaattttcctctcgtcaccaggctggagtgaagtggcgtgattttggctcactgcaacatacgcctctttggttgaagcaattctcctgcctcagcctcccaagtagctggggttacaggcatgcaccaccactcccggctaatttttgtatttttagtagaggctgggtttcaccatgttggccaggctggtctcgaactcctgaactgaggtgatctactcgccttgacctcccaaagtgctgggattacaggtgtgagccactgtgtccagccctttcctcagatttttacagttatgtgtgaacattttgaaaactaaggagttctgtaattcttcatttttatttttgttgaaatttttgaaattcttaaaaaataaaaatcagctgggcacggtggctcacacctgtaatctcagcactttgtgaggccaaggcaggtggatcatgaggtcaggagttcaagaccagcctgggcaatatggtggaaccccgtctctactaaaaaaatacaaaaattagctgggcgtggtggcacgcgcctgtagtcccagctactcaggaggatgatgtaggagaattgcttgatcccgggaggtggaggtttcagtgagttgagatcgcgccactgcactccagcctgggtgacagagtgagactccttctcaaaaaataaaacaaaataaaaatcaatggagaacttccagttgaaaataaatcaggacattactagtgaactcagcccatttattcctgaaattgcaattttttgaatttttgcaatcagaccttggtaatgacctaatgcagtaggatataaataactccgacaagcttagcattccagtaatggaacattaggcatagatgggttaattattggtcaggtgtcttgaaggcactgaaacccagtgagtttgtctgaagcatctgccctttaaccctttctgcacatggtaattgcttgaccacatttaaaatatactcatgccagcttctcctatagggattcttacacaactggtcttatgcagactttcttaagtactagtatatttttcagtgctttctatgtgttcttttgtccagtcagagttgagaatcattaataaaagattaaggacgtggttgtgtttctgtgtattattatcctatttctttgtcatggctcaattcagaccagtttaataaactcacacttttgttggtataatttcagggatgtcatggactcttagttgatgttttttatgagtgtatcaagttttagcagtatacagtgacagtcttcttgaaaatagttctcattaaaaagtcttttcttggcaaggcacattgtgaatggggaaatttgaaaatttgagcagggaatttggaaaacattagttgagacaatgagatatatactgcagagaaatctaaagaaatcacgtttgcagaaatatcttcacagaaattggtggcctcttcagattttcaatagacaacaatatattaggtttgagcaaaagtaattccgtttttgacatttctttgaacggtaaaaagcaaaaccgcaattatttttgcaccagccgatactagtagttactgtcggatatattgctgcatgttattgtcagtgaaaagtaatgtcttctattgttctaacgtcagccagtagataatgattactgataactagtggagcaactaggtaatagctggcaaagagctgacttttagagtactgagatctttgttgggaaaatgaattttaggaggtgtccacatgatgggaacttactcaagttgggttggagaattgaggaattgagtgtgtgtcttacatgatagatgttaatgaaggtgaaaggaggaggagtgtttgtttagtggggagaggggcagatacaggagttttttgctggtttggaaaatgttaggtcaatttggacctgggaaataggttgggtatgacctggtggaataacaacttagaaaaatggtattaatatcttctaagaagtcattctgaagattcattatcataaggtttagatttttattttaaatggtaacagcgatacttcattgactatgttaaattgtttaatcaaagaagatgggaaattggctctgagtgaaagctctgggtcttcatatgtaaatcggagtaaaaatcactgtcccccccccccctttttttttttttttttgagatggagtcttttctggcactcaggctggagtgcagtgggttggtcttggcttactgcaacctctgcctcctgggttcaggcgactctcctgcttcagtctcccaggtagctgggattacaggtgtgcaccaccacacacaactaatttttgtattttcagtagagacagtgtttgtccacgttggccaggccggttttgacctcttgacctcaggtggtccacccgcctgggctcaagggatctccctgccttggccacgcaaagtgctgagatgacatgtgtgaaccactacgcctggccctctttttaatattcatttgaaggcgctggttttgttttgcgaaaggtgttgtaataaaagtgaatttttatcacaatgttgggaatgcacaagtattcaaagctgtagttgttgaattaagcgagattgggaagtactctaaaaatagatctttaagtccttaggtaggctggcatatacatgaaattgatgttcgtcaacagctaccctggtactattctttctttcttttttttttttttttttcttttggaaacgagtctcgtgctgtctcccgggctggagtgcagtggtgcagatctcggttcactgcaacctccgcctcccaggttctcgagattctcctgcctcagcctcctgagtagctaggattacaggtgcacaccaccacacccagctgattttttgtatttttagtagacatggggtttcagtatgttggccagactggtctcaaactcctcacctgacttcatgatccatccaccttggcctcccaaagtgctgggattacaggtatgagccactgcacctggcccaacctggcactattcttataattctttaaaaaattctcataaaagtcttgatctatatgtgttttctgatttgtgccacaaatactgcagtgttttcatactaaaactatatctagatataaactagatatattttcttcagattgtaataaattggaaccccactttcccttataattgatcacccatgaaattgttctcaaattagataatggtgatattgcagaactaataaaaaccacggagtggcacccttttaaatggtgaattttatggtatgtgaatgacgttttgattgaaaatggatgcgacattacaattgaaaaaggatacatcactgtcttatggacagtcattcttttttgtcatatctcgtggaccctacctacatcaggatacttgccagttagagacatagatgaaacccgtctggtgctaccagcctcaaaaggtaactcttacgcctgaggatggacaccttttagaattaaaagaactctcagtcattgtgggacatcttgctagccttcatagagactgatttactgtcagctcttttcttgagtcgtctcatctctctctgtttttttttttcctttttttgagacagagtcttgctctattgcccaggctggagtgcagtggctcgatctcggctcactgcaacctccacctcccaggttcaagtaattcttgtgcatcatcggcctcccaattagctggggttacaggtgcctgccaccatgcgtggctaatttttttttttttgtattgttagtagagacggggtttcaccatgttggccagactggtctcaaactcctgacctcaggtgatctgcccacctcgccctcccaaagtgctgggattacagatgtgagccatcgttcctggcctctttaattcttatttggagaactttgggcaacacgaaatagaaactgccaataaatggcaggtttgataacaggctttattatgacagcggagacttggtgagcaagaaacctggttcaaaaagactggtttagttcaatggtctttctgaggactttttaaacttagcacattttgtatgtggtgcatgactagtaatacagtatataagtaacgagtatgaaattcttagaggttttcagagtgctgttattactccatggctaaatatattaatatgtcagtgcattagaaatagacaaatcttcaagaactcacaggtcaaagatgacacatgtaacaaagattgagttgtgaggggccttgatgtgtttgaggagcagccagctgtaaagtaaattgtaaagaatgttagttgtaaagggctttgtattacatgttctgggattgtgtcctatagatggtattttagaaacaggcctgtggctagaggaaaaaagatgtgttaaatggtaaacattgtaaatgttggaatggagaggaggttgggagaatttctgaagtagattggtcttgatgtgattggttggactaaaggtatgaaagtaggtgcttgtaggaaaataatagtcaaaagctgagattttgtcttcgtgactagatgatagattatgccattaatggttacatgaaggggggtttcacagagtttgtgctgtcagaatttcaaggagacaagcaattttgctgctggttttattctacctgacttttctaggaatgtatcttggtagagagagaaaattagttgaaatgaaaccattgaaattcaagacagaactgtcaaaccatcatttcttcaactattaatagttaatatccctaattttgttctgggcacacaaagcctgaggctttggattaacaatatgggttgaaggagaaccttcaccttactgagtttagattagcagacactttgacctccttttctatttttcagatgtttttgagtaacactgtacctgagagatgggtttgtttatatatatgtatgaagggagagagtgccaaaatacttaggttatttgaagtttgaaaactggggacattctgcattgaaaggcatgtgtttcacagagcaggagacttctaggctactttgaaaagctaacagatgactctcagaggtgtcattttaggtggagagggtactctgggcttggaagttttggatttgctcacagctccactgttaattatatctttcttttgggaacctgtgtatcatacatataggtgccagaaggattttagatggtgacatagattagtatacacttttggaacaaatcagttattagtcttttttgtttgttttttgttttttgagacctgatgtggctctcttgcccaggctcgagtgcagtggcgcatcactgctcacggcaacctctgtctcctgggttcaagcaattctcctgcctcagcctcctgagtagctgggactacaggcacatgccaccatgtctggctaatttttgtgtttttagtagagattaggttttgtcatgttgcccaggctcatcttgaactcctgagctcaagtgatgtgtccaccttggcctccaaaagtgctgggattataggcatgagctatagcatctggctggacttaaattttgctaaatatttatttcttagtattccttttagattagtttcttattgtgtcctagactcgtttagtaggtgggagatatttctttgtaggagaggcatttgggtctgaatcaatctgctgtatgactgagttgagcggtcttgattccatttttacccaacactaaggtatcctggtgttttatgaatcttcttgagggcattcttcaggtagattttgttagcctccttggtgttgcttttctttttgagatggagtctcaccctgtttcccaggctggattgcaatggcgagatcttggctcagtgcaacctctgcctcctggtttcaagtgattcttctggctcagcttccggagtagctgggattacaggcatgcatcaccacgccgggctctttttttgtgtgtgtatctttagtagagatggggcttcaccgtgttgggcaggctagtctcgaacacctgacctcgagatctggccgcctcagcctcccaaagtgctaggattacaggcgtgagccatcacgcccagctggtgtttttgttttggtttttttttgagacggagtctccctctgtcgcccaggctggagtgcagtggcgtgatctcggctcactgcaagctctgcctccctggttcacgccattctcctgcctcagcctccccagtagctgggactacaggcgcctgccacaaggcccggctaatttttttgttatttttagtagagacgcagtttcaccgtatttgccaggatggtcttgatctcctgacctcatgatctgcctgcctcggcctcccaaagtgctgggattacaggcgggagccactaggcccggccatagcagcatttttaaagatgtaccagaaaaactcaaatgtccatcaactgactaaagaataaacaaaatgtagtaaccataaaatgaaagaagtactgatacatggtacaacacggatgaaccatgaaaatattctaagcagacaaagccagtcacaagacacacattgtacgattccatttatatgaatgcctaaaataggcaaatccgtacaggaaaaaaaaacaaaaacaaattctgccatggagattggtatgcaaatttttgtgtggtcatgtgttttcatttcttttgagtatatatacctaggagaagtgctgggttgtatggtgattatatggtcaacctgaccaacagctaaaagtggctgtacccttttatattcccatcagtcatgtggaaggttccagttgctccacttacattcatatctgtcttttgcttttatccattctagtctagtgagagtgtggtggtatctcagtcaggatttaattgcattttgtttaaaaatattgaatgtcttttcatgtgtttttcagcttttttttttttttttttttttttttgagacggagtcttgctctgtcactcaatctggagtgcagtggtgtgatctcaagagccccgtctcctgagttcacaccattctcctgcctcagcctaccgagtagctgagactacaggtgcccgccaccacgcccggctaatatttttgtattttttagtagagacgtggtttcaccatgtttgccaggatggtcttgatctcctgacctcgtgatctgcctgcctcggcctcaaagtgctgagattacaggcatgagccaccgtgcccagcccagccatttgtttactcttccacacatgtattcagattattacccatttttgtattaggttgtagaattagttgtaggattcgttatatattctggaaacaagactctgagtacaacatctgatactgttagaaaattttaactgtttcttataattccaccatcctgctctgtagttataggagatatgtaactatccatttgtgctaagtcgttttgtagagtttttaaggattatgggttttgtaatagacagtaaattatagattactggactctggtaattacatataagcggtagatggaagtttgtggaggcaacaaactagaacattgcttgctgttcagtagaacatttaagttcagtggccacatgtgactagtgactatagaattggatagtgcaggtctagaatgctgcaaaaatcagttttactgggtagaataagtctagagttgtgtaagttataagaaatgtaatgactaaagcctactcttcaggaaggaaataacccagactgcagttgtagagcgaatgttgaaagagtaaataggagaaagtcatctgtagaaataaactggtatttgtgatgtccttacagcaggcatatgatttcacctccaaattcacgttcatcacaggcacaatagctgtgttttttgcatgttttttgtttttttgagacaggatcttgctctattgctgaggcaggagtgcagtggcacgatctcagctcactgcaccttttgcctcccggtttcaagggatcctcctgccttagcctcttgtgagttcctgggaataccggcgcgccaccatacctgactttttttgtgtattttagtagagacggggtttcaccatgttgcccaggctggtgtcaaactgctggtattagccactgggcctggccaatagctgatttttttttttttaaataaataccttgaaaacagatagaattttttggtaaagtatgatattcaacttttattcgattttcattgggaagtcccctgctttgatctttattaagccagaaaatcaaaacaccaatcctggcttttcagctattacatagatagggttcggtttgttacacgttgttgattgtgtgatttatggattattatttcctagaagtcagttgggaacttcatttatttactcaacaaatatttgttatgatcctgctgtgaggcattgtatatagcaggaatactataataagaaatagaggccgagagtggtggctgacgcctgtaatcccagcactttgggaggccgaggcgagcggatcacctggggtcaggagttcaagaccagcctggctaacatggtgaaatcccatttctaccaaaaatacaaaaaattagctgggcgtggtggtgggcgcctgtagtacaaggctgaggcaggagaatcacttgaatgcaggaggtggaggttacagtgagctgagattgtgcccattgcactgcagcttggacaacaagagcaaaactctgtctccaaaaaaaaaaaaaaaccagaaatagatggcctcagagaaaaggggttgggttaaagacatcacgtgacgcataaggcataatgtctttagcttttactttgaatgagatgggaagctattagagggctttgtgaagagaatgggagggtcttactcatattttaacaagatcactcttactgagaaagataatgggtggctgttcagagaagcagtgatttttggtgggaccagagaaatggcaatgggagtgatgaaaagcagatggatcttaaaggtgttgctgagaaatttgcttatgttgtgaggcttgagagaggaatcagatgtggccagcgtttttgtctggacaactggaattatggaatttacagtgacagtgattgggaggagctaaggtgaggagcagatatcataaatcagttgtggacatgttaaagttgatccgtttggagagatattaagtaagcagttgtttatatggttctaagggagtcatctgcttagagtttataaaaccgcaatactggatgattggaaacagaagagagattctgggggtactgtgacctttaaagaatgtggcggtaaggaagaaatgagcaaaggagattgaaaatgccaaaatgaaaaaaatggagaagcatgaagtatcttggaaactgtatgaatatatgtcaaaagagtagaaaggcaaacaaggtctttcatgtcactaatagttgaagtagtatgagaatttagaaaacgtctttttgaattagcggtgtcattggtgacctttgacaaaggtaggtactgttaaaggcagaaatcttacacagatttcaagtgaatggaaagatagaaattggagtcagcatagaaaacacacaataaaattcacccttttggtgtataattcctacatcagatttgatttacaaaatgcatagtcatataaccataactataaccaagatagaaatagttcccagttctctgaaatgcaccttcactctgttgcctagcaatcatatctgttccttaaaaggaattttattgtaagtgaaagaacttcttactcttctatgttgataaaatgagaattttaaaaatatgtaattttttttcccctttctttttcttcttttttttttttttttgagaaagagtctcgctctgttcccagtctggagtgcagtggtgcggtcttggcttactgcaacctctgcttcctgggttcaagcgattctcctgccttagcctcccaagtagctgggactacaagcatgtgccaccatgcccagctaatatttgtatttttagtagagatggggtttcatcatattagccaggctattcttgaactcctgatctcatgatctgccctcctcggcctcccatagtgctgggattacaggcatgagccactgctcccagcaatttttttttctttgtctcacaggctggtcttgaactcttgggctcaagcgatctgcctgccttggccttccaaagtgctgggattacacatgagagccactgcatgtgactcaatttcagtttttttttttttttttttttttttttgagagagagtttcgctttgtctcccaggctggaatgcagtggtgcgatcttggcttactgtaacctctgcttcccaggttcaagcagtgcctcagcctcctgagtagctgggactacaggtgcatgccaccacaccctgctgatttttttgtattttagtagaaaccgggtttcaccatgttggccaggctagtctcttaactcatgatctcaggcaatccacctgcctcggcctccggaagtgctgggattacaggcatgggctaccatgcccagcctcaattttagttttttaaaaaataaaattgcaccacattgtcagtttaaaattttatctttggtaaagatcaacactgacatatgggagtatgtgtattgttgaataccatgacaaatgagtaatgttaaagttatttgtggctgcacacggtggctcatgcctgtaattgcagcactttgggagggtgaggctggtggatcacttgaggtccaggagctcatgaccagcctggctaacatggtgaaatcccatctctactaaaattacaaaaactagcttggcttggtatcgtgtacctgtaatccacgctacttgggagactgaggcatataaacaagaaaagccagggattttttttttccctttcttaaaacagtcttgaatccagtcaagtttcagaattgatgattgatctaggactcaagcaacctgcctgttacagactagattctttttgactgagaaagttttcaggtgcattttcaaattgtcttcccatgaaatgtctggttttgtgttaagatagtttcctaatgaaaccatcaagacacaccactttttcccttaatatgcaacatttcattaagatgtcaaattttattcctcttaaaataagtatgtacatttaatgtattttttcttcgtggagccattttcaatcaaatggcttagaatttacaaaaatatccctaaatactaatatttgtaattctttctgatagaatattacagaaccaattattgattgatgccattggctcagtataggagctattgctacctattctttggtagtaggtatgtttatggtgttccccaacccatatcagtgatctttggacaaggctaacccaacaatgtggtaataatctatttccattttttcccccttaattaccagaattatattttctttaaaaattatgttagagtttccccatgtggtgaataccttgtatagctccagtggtgagcaaatgagcatactggtttaccatttagtcgttttatattttaaatgagtggtgcttgcagttgatagtatccgggtaaactgatgctagactaagacagcatgtttgtggtgaagtacttgcaaataacattagaaatcattgatttcagtttagaaataaaacacaagctacaaaaattttgctggttgatttatttttaagcacaaaatcaagaattccaactatgttacgaacattttgaggcaaggactacttcctcagatgtgaatgagagtccatttctgcctgagcagcattctttgtaactaaaagccccaccggctgaaatattttgaaatatttttcttcagaaaagtagagaatttgactcctaattgtgttcatgggactgttaacatagattcaaaacagaactattacttgcttcattttggctatggtcagatgaaatagtaggttttaaaaggaaattccagtgatagtacggaactagctagctagctagtttaacggatttattgttttcggtcacaatttgacatattgttatttaaattttaatgtaaacctgtgttaaacttttttatatcagtttttttatctacatagttaagtttgaggcagatgtctgtcatcagttggtagttcatttaactagtatttactggagatagaatggaaaaaactgctcctttggttctcttaatttttgttttgtgacggagtcttactctgtgatccatgccggagtgcagtggtgggatcttgactcattatgaactccgcctgttaggttcaagcgattgttgtccctcagcccccggagtacctgagattataggaatgtgccaccacacctggataattttttctatttttagtagacactgggtttcaccatgttggtcaggcccgtctccatgtcctggcctcaaatgagccgctcgccttagcctcccaaagtgctgggattacaggtgtgagccaccctgtccggcaaaacagattatttcaatctgttcacatttttaagatgagaatcagctgtggtccattaaatggtccatgtaccaaatgatagctttattattaatagattaacgtctactctggtgtagtgttgacatgtattactaggttttttgagacccaggaaatgtcactgtttgcagctaatgtcttatggtcagaatttccatttaagaagcttccctttgaaaacctcttcttagtacatgtcttgtaatgcttttactttggaattggggtagacattctttgtctttttttttttttttttttttggtggtggaggagacaaaagtttttactctgtcgcccaggctggagtgcaatggctgtctgcaacccccacttccttcctgggttcaagcaactctcgtgcctcagcctcctgcgtagctgggattacaggtgtgccactgcatccagctggtgtgttttgttgttttttttttctttttcttttccttttctttctttcttcctttcttttttttttttttaagacggagtcttgctctgtcactgaggctggagtacagtggaatgatctcagctcactgcaacctctgccttccagattcaagcaattcttctgcctcagccctcctgagtagctggaattacaggcgtgtgccaccatgcccggctaatttttgtatttttagtatacacggggtttccccatgttggtcaggctggtctcaactcgtaacctcatgatccacctgcctccgcctcccaaaatgttgggattacaggcatgagcctccacacctggctggtgtattttgtcttaatctgttcaggtgattaatgtctctagagtgttttaatttcttaatctgactagattttataccaacaccatcaagtttgattatgggtgcagttacaattctcctagggtttagtccttgttcccctggtaaaagattttaaacagcctagccttaatcagtaagtaatcagctattgttgcctcatctattgtatagctttctcatagtgagaatttccgcttaatttttagctggtgcttgaagtagtcatactgagcttcttaatatatatcccttttaacttaaaggttgtcacactatgtatgttttttttctattttcacacttaccgtcctcaacatttttcgaggcaaggactacttcctcagatgtgaatgagagtccatttctgcctgagcagcattctgtgtaactaaaagccttaactggctgaaatattttgaaatatttttcttcagaaaagtagagaatttgactcctaattgtgttcatgagactgttacatagattcaaaacaaaactgtattacttgctttattttggctgtggtcagacgaaatagtaggttttaaaaagaaattccagtgatagtacagaactagctagctagctcattggtttagatacgggtgccggtgaaggtttgtggcttaggaggtagattagatatttatttccattggactgaggcttaagctcagtttaatgctcatggatatggataacttattttgattcacctccagaaattgtcgttaagcaatttgtgtttgtgcaagtgttaccatctctcacaaaggatatgagtttctgaacactgatattttatagtttctgtatcattatactttgcaagattttggtcaaaaagaccaaaagctttatgtcaaaatgggaaagtagtgataataaaaagttactcagtatctttttctttgcattaattcccatgaatggattaaactaagagattaaccatacttaggggaaatgcaaacttttttctgttttctttttttttgagacagtgttgctctgttccgcatgagtgcagtggtgcagtcatggttctctcacctcctgggctcaacctgtctttccatctcagctttccttgctcttttaatttaggaaaatgttcctgtccatagccactcctgggacaagattaaacattgctttgttgaaatagtgtggaaacacttttaagttaacagaggagagaattagcaatgagatcttgtaaatgttttcactacaggaagattggagatattacaactcagaataacttgccactattgtatatatataagagggagaatcatgacaaaggtgattaataatatttttaaagttcttgactatcacatttgttttttaagaaatatttggagttagaacagttggtaggtgtatttttatagagtacctgggcctttgcattaagttagttgcatttttaaaaagcttgcagaattgaagaccttttcatacgttgccataggttcttatatggaaatgacaatgtggaatgtagaaagtttagaactgatgtccatgtaagaagtattttgttctgttttgaattttctctttacaaatgtaagtgtaccaagccactgctttggtgtatctttatcaatcactgggatactaagtttaagacatttgaaattaagatttctaatagaaacagcaattagttgagcaaccagtgtttattgagtgctaagtgtgtactggccagtgaatttagacataggtgagtagtgaacaagatagacagtggtctctgccctgttggaattaagcgtaaatttagttagaaatgatactacctgtttttatatgaggtattttttatcagtagtatttatacccagccaacacattttgctatgattccctcagttacatgaaattgccctgattttatagatctgaaattttatatggttcaaccttatatcactagttgtaataattcgtgtgcttctgtgggtgaaaagaatcagagatttcgctaatgccatataccactgtttatatacccttttaattggaacattttaaagagtatttgaccgtatgtgaattgtttattgtaatgtatatttgaaaataataagatccaaaggctattcattataataaatgccctgttaatactgacactagtacagaggaatcatttatatccagtgccaaaggccagccaaccatataatttgatatatgttttattttcctgaggaaaagttgctacagtattacaactattttatgtgcctaggtaaagaaataatgggataagatttctaaaccccactgtggaggtttttgctggccttcttaatgaaatttaataaaaggaaacgactagagacaatattcacttactatttatcataaggtctgttgaattgtgctgagttaatgttaggtttgaatgaattccattttcctcttatccaataggatgtacagttacccagcacgtgtacctcctcctcctcctattgctcgggctgtagtgccctcgaaacgtcagcgtgtatcaggaaacacttcacgaaggggcaaaagtggcttcaattctaagagtggacagcggggatcttccaagtctggaaagtgtatgtattatttcattttgtgattttggtatctcttgtgttttgagatagggaagctaatgcagttacaatatttttgtgccacatgactttgtgtattcaaaataatggaagaggctgggtgtgtggtggctcatgcctgtaatcccagcactttgggaggcccagcgggtggatcagctgaggtcaggagttcaagaccagcctgtccaacatggaggaaccccatctctaccgaaaatacaaaaaatttgccggggatggtggtgcgtgcatgtaatcccagctaattgggaggctgaggcaggagaatcgcttttacccaggaggcggaggttgcagtgagccgagatcatgccattgcactccagcctgggtgacgagcaaaactc

SEQ ID NO: 9044 - DNA, 1259 bp, Homo sapiens
tgtatttccaagacagtggtacaaggtgacccttaattacccgtatcatggttcttgaccagcacattcaatcctccaacctaccctactgccatgaccttccgcacatctctaagttttatctttgcaatactcaaggttctcggaaatttgctaatggttgtgataaaccatacagcttgagccagtgaggcagattgggctggtgccttcgtctgagttttcctgctttcctgcctcgtgcagattctgaggtatatctgctgccttggaagacataagaagcagtgatactccctggctcggttattttctccatacaatgcacacatggtacaatgatagaaggcaaaattgccactgtcttcttttttttctcatatatctaaggaagatatatcaggttgtgcctcatgtaccgcttctagtgaaatgtagaggaaggctcaaaggagtcaacatttatatctggaagggacaagtcatgccttgggcctagaataccctgatgagaaaagagaagaggaagggaggccatatctacaacacagcctctcggcactgctgctccttattttaactttgtcttgcattgtcctgtatttatcacagtttctgttgaacagcttttcaagtatttggggagtttatcttgccatcctccccttctggttctctgcacccacctgtcccactgcagttccttccgtgctctgtgactttaagagaagaaggggggaggggtcccggattttatgtttgtttgttttttctccttagcagtaggacttgatattttcaattttggaagaactaaaagatgaataaactgggttttttttgttgtttgtttttgtaaattcacctgtgaccgttcattttcagttcttgaaagcaagcctgcttcctgcctggtaaagtgctaaggtactggagaaaaatgcctttagctagctagttttacaaatgaaactttcatcattctaaactttcatcattagattgagagacactagacatcacagtaaaccaaattcatgttatagcaagctaactttataagagactttttactatggttccctcagagacttttagattggaatagcacttgttccttcatgaaaacaaatcttcagtcatctccttgtaaatagcatggaggacagcagctgcttgaagggaaaccttcagccttcctattggggtagccagatcttcagggctaacaactgttgggaaagggaaaaaaacagcat

SEQ ID NO: 9045 - DNA, 1223 bp, Homo sapiens
cgcagtggctcacgcgtgtaatcctagcactttcggaggccaaggcaggtggatcacctgaggtcaggagtttgagaccagcctgaccaacatggtgaatccccggccctactaaaaatacaaaaattagccaggtgtggtggtgcgcgtctgtaattccagctactcgggaggctgaggcaggagaatcacttgaatccgggaggcggaggttgcagtgagctgaggtcacgccattgcactccagcctcgttgacaagagtgaaactctgtctcaaaaaaaagaaaaagaaaaaaaattgtagctcctgacgagaggttagaggttagaaggataaaaactatatttattcattgtcaaacattttagtgtccaaaagattcaaagcattgcccagccgtttactaggttagaaaatgaaattgcctcttttaaataatgtgtcttcattctccttttaattctaggatggcccagctactgttctcacttctgtgaagaagaaagtgaagaatgtggggattttcctaaaggtaggaagaagatagataagtagtataggaagtttaggatataaagaagttaaataatattggctaaaataattaaaatttcattttttgattatgactttttccatagaatgaagatgaggaagaagaggaggaggagaaagatgaggcagaggaccttttgggaagaggttctcgggcagcattacttacagaaagaacaagagtaagtttactattttaaattacattgatctcggctgtcatatggctcacgtgttgtgataaattggattttccattcaccagaatgaaatgactgcagaagagaagcgaagagcacatcagaaagaactagcggctcaactcaatgaagaagcaaagaggcgattgactgaacaaaagggagaacagcagattcagaagtaagagttttcactgagcagtgagatcatctgagggttctgtgggactgcagaaatttctcagttgtttttttatcccactccagagctcgcaagtctaatgtgtcctataaaaacccatctctgatgcctaaggaaccacatattcgggaaatgaagatctacatcgataagaaatatgagactgtaataatgcccgtgtttggcattgcaacaccgtttcacattgccacaatcaaggtactgacattcagtgcatcaggtttcatccaaactgttgcttaa

SEQ ID NO: 9046 - DNA, 1258 bp, Homo sapiens
gggcaagataacaaaaccccatctctactaaaaatataaaaaattagccgggcatgttgtcacacacctgtaatcccagctgctcgggaggctgaggcatgagaatcacttgaacccgggaggctgaggttgcagtgagtgtagattgcgccgctgcactccagcctggcaacagagcaagtctgtctcaaaaaaaaaaaaaaatttatccaggcatggtggtatgaacctgtagtcccagctacttgggaggccgaggcaggaggattgcttgaacttgggagttcgaggttgcagtaagctgtgatcacaccactgtgctctaccctgggggtagtagaacaagaccctgtctctttaaaagtaaaaagtaggtggggatgggaggagaattaattttttccgtagtttagaatattattctacctgttactggtaaaacgtgtctaatgaactggtaaaacatatgtgtcttttcttccctatgacactgacagaatgaaagtaataagagtagctttgacaaaatgattgaagccattaaagaaagcaagaatggcaagaagattggagtgttcagcaaagacaaattccctggagagttcatgaagagctggaatgactgcctcaacaaagaaggctttgacaaagtaagaatactactggaaatagcaaatcaagagttgagaagacagaaatgtgatgggcttccataacagatagtgcaggacgtttgttttgggaaaactgtatgtttgtttacattttatcccctttggctgagcagtgtgccagttttattttttttccctgcctttcttctatctgcctttacaaaaaacgtctagagggcagtttacattttaagtggtacattagcttaacacctcttgtagtacacacaatgacctggcaaagagctatttcaaatgtttattcagttcaagaagagaatgtttgaatattctgcaaaccagtgatagtttgctaaataacagaaatatcactggtaatattcaaattggagagatgcatttattttgtaattctgtacttgcatgttagaaactcttgtcactttgactgcagatagatatcagtgcagttgtggcatataccatcgctgtaaaggaggatggggagctcaacctaatgaagaaagcagccagcatcacttctgaagtcttcaacaaattcttcaaggaaagagtcatggaaatagttgatgcagatgaggtaaatggagatgagagggtct

SEQ ID NO: 9047 - DNA, 1223 bp, Homo sapiens
aaatctttctaaggaaaaagtgtgtatgttttcttgtatttctaattttaccctttagtcagatggccttccttctcaccatcattgggcaagaggatgacctatagcccacatccctcaaagcttaatctttactttgaaaaacatgtaccatatgatgtcttgggtgggtgggttgtcttcctaggaggaaggattgaagttaacattccagaagcacaagttgatggcgaatggagtaatgggagatggacatccactgtttcataagaagaaggggaacagaaagaagctagtagaggtgagtggtagagaaagtctttaacctgacgattagattgtctttttattcccaataattgatgaaggcagtgggactgggggaatggaaaatactagagtcatttcatgactaccattggccctgctccccctccctccctcccccaaagaagagtatgtgctcatgggggtggattctgggtttgcagctggaggtggagtgcatggaagagcctaatcaccttgatgtggacctggagacccggatccctgtcatcaataaggtggatggtactttgctggtgggtgaggatgcccctcgccgggctgaactggagatgtggttacagggtcatccagagtttgctgttgatccccgatttctagcggtgagtggcagtcccatccagcaagatttaaagtcattcctttggtatttaagctgcatgagaaagagaaagcatgacatactgtatcatcgtttctgtatctgcaagataagggtaataattaataatacccagtcttccaacctcacaattgttgtgatgcccaaaataaaataatgttgaagtactttaagtgctaggcaaatatttactattgaactattatataaaccacctaatattttttggagagatcccacttaatggcagttttccactaggatgaatcctttatctatgtaataagtgtttattatcaaacaaaagacactagtactttaataattactccagagaagatttctattcctctaggataactgattttttctattgcagtatatggaggatcgcagaaaacagaagtggcaaagatgtaaaaaaaataataaggcagaattgaactgtttgggaatggaaccagtacagacagctaactctagaaatgggaaaaaggtgagagaaattgcagcattaccactctattcccac

SEQ ID NO: 9048 - DNA, 1225 bp, Homo sapiens
ccatctacaaaaggaaaagtagggcaacaataatcagaagaacacatcagaagaacacaagaaaactggttattttttaatgtgttttagaatatctgaaaacacaaaaattgaaagtagacgcaaaaaaaaaaaaaaaaaaaggcccagaagaggtagtgagaggtactctgtaatgagtaagaattacagagccaagggggaaaagacacagacaaatatcaatgaaaatgtctacacaggagacctacctgagagttaatgattactgcatgcaagtgaggttttaatttctacaggtttaactacccaaggcagaaaagatggtccctctgtagagaattccaaataaatccttcctgagatggctttcagtatagggaccataactgaaaacacagatcagcacaagttcccagctatattttaccgttgttgtttctcccgccgtgcaatttctttcagcttgaaggctgcttcacaacgccgccttcgccggtccccacgttctgcagcctctatcttcatttgttctctcttgtagctgcgctgatacgctgttactagacgccgaagcctagctgttagggcagagcccggaggccagaataaatggcctggctgttgggtcacctgggctgtggaaaacaaagtagaatgaataggaagtatagcaagggtagtagaggcaatactagtattttaacccacccaaaggcaaagctcttagaaatcccaggataggacagaattcagtgaataattccccaacccaccaccccacacagaattatactagttgacctagaagtttaccttcatctccatcaatcactgagatctcctcatccatcatcatcaagggatcaccctagagaaggagatccacccaataggatggagcggggagggaaagggggggaagttggcactctgaaatcactttcttgtgtgtgtccttctatggcaccaagggatcaagaaaaacttctaaagaaatatatccccacaaaaacttggaaacaatcaactaaaagaacaagaaagtagaacctgaaaggtcagttcctattaacgactcaaagataatagaagtcaggaatttattagtcaaataatatctttcagtgtccagctcctccataaagttatccctgatctccccctactggcattacagtcctttccattaatattttctattctcaaatggtataattcattt

SEQ ID NO: 9049 - DNA, 1213 bp, Homo sapiens
tgggcatggtggcatgcacctatagtaccagctactcaggaggctgaagcgggaggatcacttgagcctaggagttctgggctgtggtgtgctatgccaatcaggtgtctgcactaagtttgacatcaatatggtgacctcccaggagcaagggaccaccaggttgcctaaggagggatgaattggcccaggttggaaacggagcagggcagcactcccttgctgatcagcagtagtgttgtgcctgtgaatagccactgcactctagcctgggcaatacagcgagaccctgtctaaaaataacaaaaaagattgcatcaagacagataggatgatgaacaaagtgagttgtactgtgtcttctgacctgtagtttttatgattctagcatgaagaaaactggtgtaaatatttcagagtataccattctttaatgttgtactcttgcaatttcctttcttcactttagggtgaatcgaaacgcatcaccctggtcctccagcagccacagtctggaggtccccaaggacatcggcatgttgtgctagggagtctaccaggcaagatagtgttacagggcaaccagctggcagccctgactcaagccaagaatgcccaagggcagcctgccaaggtagtaactatccagctgcaggtgcagcagccacagcaaaaaatccagattgtaccacaaccaccatcatcgcagccacagccccagcagccaccctccacccagccagtgactctgtcctctgtacagcaggctcagataatgggaccaggacaaagcccaggacaaagactttcagtaccagtcaaggtggtactgcagccacaggtgagagacttacatagtaaggaaaagaaagaaaacaaaaatacttagtccattgctgttgccctcagcaaccacttattcttgaatgtggggccattctagatttatatctctgaactgaggtgcagacttaattctttcattcatggaaaccttattttaattatattattaaaagattagagagggattgttgggtttgggatatgagattatttagtatttatctttgaattgttttatttataatcttttcctaatattattgtgaaataaaaatgatttgtgatatcctttaaatgatagttcagaaatgacttgaagaaataagtgatcagtcctcccctctccccgcccaggcagataaaaggt

SEQ ID NO: 9050 - DNA, 1198 bp, Homo sapiens
ctgcggcaggataatcacttgaacccgggaggtggaggttgctgtgagccgagatcgcgccattgcactccagccagggcgacagagtgaaactccgtctcaaaaaaaaaaaaaagaaaaaaacccccaaaactgtactatatggtgttgctctctacgagtgctactttaacacaagtcaactctcaggactcctctccgaatattcaacatggccgcatgcgcgtctataagcaacatggccgctctgccagtcaccaacatggcaaccacagcctcactgtgtccggaagcatgagagagcgggtatgaggactataccggccgctctgccaacacctaacgtggctctttatagcttccaagaaagcgcgacaccggaaatgacttttctgtcttgctcagctccaggggtcattttccggttagccttcggggtgtccgcgtgagaattggctatatcctggagcgagtgctgggaggtgctagtccgccgcgccttattcgagaggtgtcagggctgggagactaggatgtcggacacgtggagctctatccaggcccacaagaagcagctggactctctgcgggagaggctgcagcggaggcggaagcaggactcggggcacttgggtgaggcactgggctgttggggccgaggctcaaccggggaggacgggcgggatccctagagaaaaagctccagagtcactgccctttaccaaacggccatttctataaagcctcgtacattggtactccctctccaccttcagcagcagacgttcgcccttctgcaagtagttcgcggttcctcctcacgctgggcctcggttcttccagctcacttttaccggacggacgcttgagccccaccctcgtccgccttgcccactcctcttcagactgcgaggacgtcgcctttgtgaggctgctcagccccctatcccgcgaagcagcaagaacccctttttgttgctgctttggcgctttgttccctcagttataacgactcttttgtagtggtcatttcttggcagctgtgggtacagtaagcgaggaatgaacctttatatccgcagtgcccaatttagtggcccgtacagagtggcactgggtgtttctgaatgagtacccctaccggcattgacttagccatttacatacctagcaggaatctgaaaacatttgtgtttgg

SEQ ID NO: 9051 - DNA, 1344 bp, Homo sapiens
gcggttactctttcttcacctttttcttgccaaaaataaacttatctttaaatgaaaactaaattatttcttatattttggtcctttgttatagctgagattgggaatttttctttctttcttgaatccttacttccctaccctgcctccccaccaatggaaatctgtgcttcataagcattttagattccagaaagctctttaggttaaactacaaccctctcacctcaaagaatttgtgggccagggaagtcagtgacttatgtgaagtcttgcggctaattaatggtagagctggagttaggacacatgtctcacagttcctagttcgttttgctttgatgtgcttgaaattcagttttgacattaatttttctggatactactcccataaaatgttctttgaaaaatacttgcttctttctagtttttctcgcctggtttaaatattgtcctgagtgtgggaaccccataactgtcttgtgggttagaatttagatggaaggatttggggccctgtctctagtatcataagacatttaaccttgctgcttttttcttctaggttcactctttgaatttcctggataagagttctggagatggcagcttattggacacatggattttcttcagatttgcacttactgctagctctgctttttatgcaggagaaaagcccagagttcactgtgtgtcagaacaactttctaacaaacatttattaatccagcctctgcctttcattaaatgtaaccttttgccttccaaattaaagaactccatgccactcctccatatgcctctggctctgtttttattctttgctggtatcagaatcctttttttctcttcagtcctctgtgctgaactctttatgagttggtaacttacagctgtgaacctgcctccttgttttcattaagtatatttgaagttaatggcaaaaggcagtgctgacaaccctgggaaatggcagtcctttgtcttcttcctggagcaggtaatcctttactaatccttcgattgttacaggtgcttccactcttatgacagtgcattcctggaactgcatcattatgcactctgctagaaattgaactaagtatgtgctaccacatttacatctgtttcaacatgttttagtggtaaaagtgaaatatatttctcttaggcagtgtagacagagtgaaaaatgggggttatgtatgtgttgacttataagatacaatattttccaaagcaccttcacaaatattctctcattttattcttgcaattatcttaggggttcctgtcctcattagttaggtgaagaaattgaaactcagatttgtgacttgc

SEQ ID NO: 9052 - DNA, 1366 bp, Homo sapiens
tctctctgtggcctttcttcctctgggcaaagaagggcttccagtggcctttcctcactctgtagtgtttgtggggataggttccatgcaagaacaccttcctcctccatcccccacttcaccccatcccataccagttccatccagggtctgcttaactgccaagagcaggtcctggagttcccttcacctgcagagtccttttcatgacctaggaggtcttattcaaagccctcattgacagaggaggaaacaggccaaggcaggacatggctggaccatggtgatacagctctgtgtgattcaagttctggcagagcttgtaaggctagagcccaggtctgccgacaccctgtgcttgttgcacacttgatttgctaaggctggagacaggcaccattgccatggggctggtcctagtcactggccgaggataagcccgtccctgtcccacattctagccccactatgcgggggtgctgttgtcctgcctgtgtctcatccccagctgcctaagctagggacactcaagtgcttccttccttgccccatcttcctcccaactggaggcctctgagcctcccctgtgccttgggccctgaagccccatatgtagtatagagcaaaggtggctcctggtgaagagagggtggaaaggcccttcagccccagggccatgtctgggttctccatgcccatcagtctctgcagtttctctacctgcccccagagctgaggccatctgcaagcccctgcccatggcccaatggggagcctccagccacaagttccctgtccttatcagccactgggtggttcccactgcatgaccctctatccctgccatctgtccccatggtttccagctcaatccacccctgacccatctgtcagctttttcccagggagccgtttcaggggttctgggcagtaggctgggcctggcctcagaacctggtggctcctgcctgctccttcacttttgtaaaaccatccccttcaccagaatggtattaactcctggtgctttgtactactggtccagctgccttgggctccttttctatattaataaagaaacgagtaaaaattaccggtggggatgatgtttaaaattgctctgatcactggtggtgctgaattcgcaacagcctgtgtgatgcctgagagaagggagtcctgagggttgcctgcctacccacgactccttctccttttagtgtggcgtttgcccgctagacccagcccagagtccaggtcagcacaggccctctcagccaaccactcatgacaaatgaggagtcgagatccacagtgtggatggggcaagccccagttcacagtagagaggtggagcttagtactt

SEQ ID NO: 9053 - DNA, 1166 bp, Homo sapiens
gaggctatttttaaacttacaaatcagaggacaatcgcgacattagaggaaaattacccaggtttacgccatcactaacgatgatagcttacgatgatagctaacccagctcttcaacttcctttcaatctccagaaaaggctctctgcgtgctaatggtaacgtggctttacagatttttacccacttcaaatatggccgccaagctccgttctcttttaccgcctgatctgcggctacaattctggcttcatgcccgcctccaaaagtgcttcctctcgaggggttgtggttcttactgcgcaggcgcaaaagcaagtcctcttccgggcaaaatggcgatgggactaatgtgcggacgccgggagcttctgcgcttgctacagtccgggcgtcgggtaaggatgccccggggcagagcaccgggatgctgccctgacccagtgaaccaggccccaggacagctcgtgctaggggtatcagcagacgctgacctgctcaccgggacctgaatgtcatgacctcgggtcatgtgaggacgcgctagggttagtccccgacactatgggcccagcagcccggtgtcagcttctggaattggcttggctcctggcgagagcacctcggcctcgttctcagggccctccgatgtgggtctgcgataactgagatgcggggaacccaggttcgagcttcgctctgcaggcaccacccgctgcatgccttcgggctagcggtctgcgcgcggtgatagcaatgtcctcccctgtagtggccgagctgcctgcttcttggggagttagcataatgaatcccgtttgcacccacgcgaggacttctgctcccggtaaaggggctccatcatccttttacacgctcaggtccacagcgtcgcagggccctcgcaatggcttgggaaaccgctgaccacacggctcctattcccagcagccccgtgctgctgtcgcccacactacctcttccttgcggcttccggcccccgcagcctcagtacctctgctatctcttttgcagaagtccaggtaagaggcctttcgttcctgcaatattaggagtggtgtttcctggttggtttcatattttgttttgtttgggagcagggggaatatggagcagagttcttgtccacgctccacacagctctc

SEQ ID NO: 9054 - DNA, 1337 bp, Homo sapiens
ctgttaagaatcctgagttgtccactccagttatgtttcctgtgcccttagctcagcgttttcttcccgattgtcttctgcctctgcaccatcttcctggtggctgttccactttacagtgatactatcaactccctcatcggcattgccattgccctctcaggcctgcccttttacttcctcatcatcagagtgccagaacataagcgaccgctttacctccgaaggatcgtgggtaagccgtgcatccttaagtccgctcagctattgcagagcttggtttttgcctttttctgtaaatccagcctccaaagacatctttgccttagccccttcttatgaacccttcggcttagtggaatcactcccctcacactgagttccattcagtgacacttgaactcagcccagctgacctcttctcaattccaactcaaagttctctttgtagggtctgccacaaggtacctccaggtcctgtgtatgtcagttgctgcagaaatggatttggaagatggaggagagatgcccaagcaacgggatcccaaatctaactaaacaccatctggaatcctgatgtggaaagcaggggtttctggtctactggctagagctaaggaagttgaaaaggaaagctcacttctttggaggcacctgtccagaagcctggcctaggcagcttcaacctttgaacttactttttgaaatgaaaagtaatttatttgttttgctacatactgttccagacttttaaaggggacaatgaaggtgactgtggggaggagcatgtcaggtttgggcttggttgttttagaagcacctgggtgtgcctacctactcctcttttcttttaaaagggcccacaatgctccaatttcctgtctcctttagagagacatgaaactatcacaggtgctggatgacaataaaagtttatgttcctaaagtctgagtggcttcattttatatagtatctatctctaggacagctcccattagcctagaaacacaaagactaaaatcaatcttatgcttgaaagtatatccatcttttctctctcaagctagctgctgaaggctgataaaccaggctctacacaaaggcagacaacagaacacttaaactgctctagtcaaatgttggattgttacataaaaatgacatgaacttcctttttgagacaggatcttgctctgtagccaaggctggagtatagcagcatgatcttggatcactgcagcctcaacctcctgggcttaagctatcctcccacctcagcctcccaggtagctgggactatggacaagcaccaccatgctcagctaactttttagca

SEQ ID NO: 9055 - DNA, 1135 bp, Homo sapiens
tcaacctactcccgggttcaagcgattctccagcctcagcctcctgagtagctgggattacacacgtgtgccaccacacccagctaactttgtatttttagtagagacagggtttttctatgttggtcagactggtcttgaactccccacctcaggtgatccgcctgcctcagcctcccaaagtgctgggattacaggtgtgggccaccatgcctggccccagccaaaggttttaatagcactgtgagaagggaggaagagagtggggcactcccaggacaggaaccagtagtagacatcctgctgcacattttgctgtctccctctgcttcccaagccagaactcgctcccactggggagtcagcagcgtcattttccagatgaaacctctgaatttgtaagtggaaggatatatagtatagcgctgaagtcccagatgttatccacactgttttcctgtctgtttcagagacgagttgtactgctgtcacaggaaatggacgctggattacaagcatggcagctcaggcagcagaagttgcaggaagaacaaaggaagcaggaaaatgctcttaaacccaaaggggcttcactgaagagcccacttccaagtcaataaaaagcaactcctgcctcccttcctcaccctgtctctggatttcttttctatcacctagatgcttcatccagccagaagatagccttcacgttccccatctgtcttcagagaaaaagagctgggacaccaagaacaagctgttagatcactgcctgggaggcttggcttagtactctcatctctggttccattccagttcagctaagtcttgctttaaaatttttacctcctagctgggtgcggtggctcacgcctgtaatcccagcactttgggaggctgaggcgggcagatcacaagatcaggagttcgagaccagcctggccaacccagcctggtcaacatggtgaaaccctgtccctactaaagatacaaacaattagccgggcgtggtggggtgcgcttgtaatcccagctactcaggaggctgaggcaggagaatcgcttaaactcgggaggtagaggttgcagtgagccaaggtcacaccattgcactccaacctgggcgacagggcga

SEQ ID NO: 9056 - DNA, 1569 bp, Homo sapiens
gcccctcaggggaaccctgtagctttgtgtctgtccagccccatctgaatgtgttgggggctctgcacttgaaggcaggaccctcagacctcgctggtaaaggtcaaatggggtcatctgctccttttccatcccctgacataccttaacctctgaactctgacctcaggaggctctgggcactccagccctgaaagccccaggtgtacccaattggcagcctctcactactctttctggctaaaaggaatctaatcttgttgagggtagagaccctgagacagtgtgagggggtggggactgccaagccaccctaagaccttgggaggaaaactcagagagggtcttcgttgctcagtcagtcaagttcctcggagatctgcctctgcctcacctaccccagggaacttccaaggaaggagcctgagccactggggactaagtgggcagaagaaacccttggcagccctgtgcctctcgaatgttagccttggatggggctttcacagttagaagagctgaaaccaggggtgcagctgtcaggtagggtggggccggtgggagaggcccgggtcagagccctgggggtgagcctgaaggccacagagaaagaaccttgcccaaactcaggcagctggggctgaggcccaaaggcagaacagccagagggggcaggaggggaccaaaaaggaaaatgaggacgtgcagcagcattggaaggctggggccgggcaggccaggccaagccaagcagggggccacagggtgggctgtggagctctcaggaagggccctgaggaaggcacacttgctcctgttggtccctgtccttgctgcccaggcagcgtggaggggaagggtagggcagccagagaaaggagcagagaaggcacacaaacgaggaatgaggggcttcacgagaggccacagggcctggctggccacgctgtcccggcctgctcaccatctcagtgaggggcaggagctggggctcgcttaggctgggtccacgcttccctggtgccagcacccctcaagcctgtctcaccagtggcctgccctctcgctcccccacccagcccacccattgaagtctccttgggccaccaaaggtggtggccatggtaccggggacttgggagagtgagacccagtggagggagcaagaggagagggatgtcgggggggtggggcacggggtaggggaaatggggtgaacggtgctggcagttcggctagatttctgtcttgtttgtttttttgttttgtttaatgtatatttttattataattattatatatgaattccattcaaatcgttcctttttgttaacaaggggcatggggaggggtgggggtgggggggcagaggcgtctgaccccaggaacctgcagggcggggctgggtcggtgccctctaaggacaattttgaccttgttcaacctttccacaaagaataaattgtgtttcacattccttgtgtggctgagctctgtagagggtgacgggctgtgggtgagaggagctggatgaggggcgggcacacatcataagcagcgttttccatg

SEQ ID NO: 9057 - DNA, 1141 bp, Homo sapiens
cttcctgggacacaaggggcctggtggcaccaggggaggagaaagccagcagcagtcaagagtatctcatgtcctgctctcctctactcccataggttccagaagctacacctggcctgtggctcagagcgcttaaccctacgctcccctctccagccactgatctccctgtgtgaggcacctcccagccctctgcagctgcccgggggcaacgtcaccatcacttacagctatgctggggccagagcacccatgggccagggcttcctgctctcctacagccaaggtaggctggacagggatgtctgaggagcaggcagtgaaagccccaggcagaaggggaggatcctgagggttctggtgcttcacagcccctctccatggtgcctctgcagattggctgatgtgcctgcaggaagagtttcagtgcctgaaccaccgctgtgtatctgctgtccagcgctgtgatggggttgatgcctgtggcgatggctctgatgaagcaggttgcagctcagaccccttccctggcctgaccccaagacccgtcccctccctgccttgcaatgtcaccttggaggacttctatggggtcttctcctctcctggatatacacacctagcctcagtctcccacccccagtcctgccattggctgctggacccccatgatggccggcggctggccgtgcgcttcacagccctggacttgggctttggagatgcagtgcatgtgtatgacggccctgggccccctgagagctcccgactactgcgtagtctcacccacttcagcaatggcaaggctgtcactgtggagacactgtctggccaggctgttgtgtcctaccacacagttgcttggagcaatggtcgtggcttcaatgccacctaccatgtgcggggctattgcttgccttgggacagaccctgtggcttaggctctggcctgggagctggcgaaggcctaggtgagcgctgctacagtgaggcacagcgctgtgacggctcatgggactgtgctgacggcacagatgaggaggactgcccaggctgcccacctggacacttcccctgtggggctgctggcacctctggtgccacagcctgctacctgcctgctgaccgctgcaactaccag

SEQ ID NO: 9058 - DNA, 1271 bp, Homo sapiens
aggtgcccgccgtcgtcagcggggccgcttgatgcgacgcctggtacgccgtctccgccgctggggcttgctccctcgaaccaacaccccggctcgggcctctgaggccagatcccaggtcacaccttctgctgctccccttgaggccctagatggtggcacaggtccagcccgtgagggcggggcagtgggtgggcaagatggggagcaggcacccccactgcccatcaaggctcccctcccatctgctagcacgtctccagcccccactactgtccctgaagccccagggccactgccctcactgcccctagagccatcactattgtctggagtggtgcaggccctgcgaggccgcctgttgcccagcctggggcccccaggaccaacccggagcccccctggaccccacacagcagtcctggccctggaagatgaggacgatgtgctactggtgccactggctgagccgggggtgtgggtagctgaggcagaggatgagccactgcttacctgaggggacctgggggctctactgaggcctctcccctgggggctctactcatagtggcacaaccttttagaggtgggtcagcctcccctccaccacttccttccctgtccctggatttcagggacttggtgggcctcccgttgaccctatgtagctgctataaagttaagtgtccctcaggcagggagagggctcacagagtctcctctgtacgtggccatggccagacaccccagtcccttcaccaccacctgctccccacgccaccaccatttgggtggctgtttttaaaaagtaaagttcttagaggatcataggtctggacactccatccttgccaaacctctacccaaaagtggccttaagcaccggaatgccaattaactagagaccctccagcccccaaggggaggatttgggcagaacctgaggttttgccatccacaatccctcctacagggcctggctcacaaaaagagtgcaacaaatgcttctattccatagctacggcattgctcagtaagttgaggtcaaaaataaaggaatcatacatctcaaaattttgcaaattagctgcgagcctgagccccgcctctgcccatctcagtctatgctcacctcatcccactcctccctgtggagccctttgcttggccctctacctcctgccctcttcctgttcatctcccaaccactgcactcttgatttttataccacacagaaggtaagaaaattctaggaaccctaaggatcaat

SEQ ID NO: 9059 - DNA, 1200 bp, Homo sapiens
actctttggaggggaggagcctcggacccagtaacgtgaggaaaataacttgtgggaggcctgtggtcactgagtcccaaagttgggagagttgttgggtaaactctaaagggccctggaggtcgcgattattgtctgggagtgggaggaggtgttagggggcaagggagagaagaggctaattttgacgggggaggcatgggcagaactggggcaaatctggatgtgatggtcttggaaacatactgacacctgaggagaaaaaaattctacttgtggatatccatcattttctccttactcatatgtcccatggctgtgttttagggagaaattgaggcacagtacagcagagttgatatcccccaaggtggtctgaactcagcagcctagtaggctgaactgatggcagctgaaagggctgtgcaaaatcaagatagcctaaatccagttgcttggctctctggcactgctgctgtctttacatgattctgggtctgtcgcggttgtaggtttgatttcctctgcatgcctgtcttccatccgcgtttcaagagggagttcattcaggaacctgctaagaatcggcccggtccccagacacgatcagacctactgctgtcaggaaggggtagggaccatcccatatgccccttaattattagaggcaataacaacttctgctttatcggggccctcattctcctccttttctgacttggatatatttgttagtccctgggatatagataacttgttttctccttgcttctctattctgcatcaggctatcccatgtctatgtagaaaaaacctttgtctctcatttctactcttgattcccaaaactaaaaattgaacaagtaaagtgctgaaccttattcagtatttgtctttcttgggtgggggagtgcagactggaatacgctaattgtgggaaagctttctccatggattcgtccagactcaaaagtggagaagattcgcaggaactccgaggcggtaagactgtttgacttctctgctggatttttctaaccaagctgggtggggagagtggtcccctcccatccccaataacttggtaaattaactgatagaatgaaattaaagctattaggctgggtgctgtggtgcacacctataatcctagcactttgggaggctgaggctgtaggatcactggagctcgggatttcg

SEQ ID NO: 9060 - DNA, 1231 bp, Homo sapiens
gaacatctgattctgtatcttcagtatatatattttgtttgttttagagatgggatctcaccatgttgcccaggctagtcttgaactcctgggctcgaatgatcctcccaccttggcctcccaaagtgctgggattataggcgtaagccactgtgtctggcctagtgtatgattatgcatgagtcacgcaatgttctggtcctggattccaggagtagaggacctagctttaaatcaattagtttcagctaaactgactagaaccaaatcaaagtgtaattctccctccagctcccccaaaccccagagttttggggttgtggttgatgcagtgtgggatgtccctgagaggtagcaagtctagggtggtgagttcctgctaggcaaccaaatttaagctcctcactttttgtgacacatggtgtcagatatggggtcccgcacctatatctggatgaagaggtagaaactctggacctcattaatgagttatttcttggccttcttctaaggactaggagagctccttatctgtctgagaatggggaccagctctgagtggggttgctgcctgtattccctgtttctcaggaacttacatgggtctggggaggctaggtaggtgattgtacgtggttgctcttctccttggctgggggaggtaatgagcagatctctgtgggtgtggagcttgttggggggatgtctaggaagcttcagcttagccacattcccaagtttaggtgcactgagccatatagcccagtgtatgcatgtgtgggtgtgttcatgcacacacacactctctctcttgtctctctgtctctctctcactctttcttactctcttctcaggtcacttgtacacttggtttcctagtagaagctcacttgccacctctcagaggggtcccggattgcatccatcacaatcccaaaactagagttggggggaactggagggagcaaaacactgatttgatactagtcagtttgcttgaaactagttcacctaaagctagatctcttaaaaccaatttactgaaaacttgtttgcttaaagttaatgacttaatgactaatttgccaaaagctcaattcctattttggtgtgtttatatccatttaggtgtcctattcttttttgtcatgctttggatatttcaaggatttatatctattcatccaagagtacttctgagctattatcagcaacataaatttatcaaat

SEQ ID NO: 9061 - DNA, 1207 bp, Homo sapiens
gaagtcctatcatccaggctgtttccgatgcattgtttgcaacaagtgcctggatggcatccccttcacagtggacttctccaaccaagtatactgtgtcaccgactaccacaagtgagtctgccccttgggatgcagtgtggaactgggtccagggattccccagcctcagctcatctcttccctctctctttcagaaattatgctcctaagtgtgcagcctgtggccaacccatcctcccctctgaggtcagtatgtctgggttctccttcagggcagccagtgccactgcctttggggaggggatagggacatgctgcctggcctcctgccagaagtggtagtgccaaggaatgtactctgtgaagattcccgtgtgactctgcctcttggggtcaccaccctgaccctaatatccgggcctggacatgtctgaaagcctaactgggcccaggctccatctcttctatcccagtccagaggaggagactttctttgaggtcgaggtcaccagactgcagatgtaggggctggaaaaaggtgggaagaatcctcagcactggtaggaaggggtcagaaatgatttaagctgagtgtaggggatgtgcctatggagagaaaccaaaagccagtgaggaccagatcttattggatccccttgttcccagcctagcctactttatttaggcctcctgtccccttcccttccctttgcttcctgcacaactgagagacgcaggtaaggccagggctgttgtacagagggagtgtgctccatgggtgcagcccagtgaaggagatgagagttctggtaggatttgcagaagcatcttaaaactacaggtgattgcagagagactctgggggcatttgtatgatcttcccatggggtgggaagggttgtatatgagggaaaggtggaggtgaggcaacatgctgctctcatctccatgggggtctgcatgtttcagggctgtgaggacatcgtgagggtgatatccatggaccgggattatcactttgagtgctaccactgtgaggtgagtgttggggttcagcggtgctggagaagaagtggaaatggggagaggggaggagtcaagtcctgcaacaaccagacatctatgggagaggtgtagggcatgggaaaccagaaagatattgtgacctatcttcagtctcttttttgtcctccagccactctct

SEQ ID NO: 9062 - DNA, 1166 bp, Homo sapiens
cctcagaatggatcattattttacccaattttagaaggtgcccttaaacaagatggcaacctcaggcgcgttaacaaggtgctgaagcagcagcgatgtaacctgttgcttggacaccaggctggagtgggaggactcaccgctaagggttcagaaccgattttcaaccagtcacgcccttctcaaagatggccgacctcacttcccttacgcaacatggacgttttcagtcacttcctgtgattttgaggttattctgatccaggactacttgcatgaccaaagccaagatggcaggtacgtccttttagaatttaaggttagtgaagccatctatttccccgacccccttcagtgaaaatggtctttcgcatctggcccttctttttggaggcgtgcttgccagcagtcaaaatggctccattccggaatagatttaataggaagtgaagctgtgacggcgaggcgttgcccggcctatctttgctaggcgttctcagaattagttctttctgcccacactagacatggcgcttgccagcgtgttggagagaccgctaccggtgaaccagcgcgggtttttcggacttgggggtcgtgcagatctgctggatctaggtccagggagtctcagtgatggtctgagcctggccgcgccaggctggggtgtcccagaagagccaggaatcgaaatgcttcatggaacaaccaccctggccttcaaggtgtggagccagcccccttgccaggctgagtactgaacgcccgcgacttgcctggcctcccagcctgaccggagtttgcggtggccttggccaccaacccaggcggaggctgggtcctctcgttcggaccgcagcagttttgctgtctcattggcccaggaggcccctgtctttgctctggttggaaagggtggcggtggggccgggggtaagtcgggggaggaaggtgaggcctcttgggttgattcctaggcgaccccaggttgctgctgttcaggatcttctagctgggaaaggccgcaacaacaatgaatcttggccgagggaaggctattgtaaacgtttaccaaagttttggaaactgggcggcccctcaaggcaggggtaactgaaactggcatgaaggggaagcgtggtgagggtaagcattgtactaagaat

SEQ ID NO: 9063 - DNA, 1115 bp, Homo sapiens
ggtcaggctagtctcaaactcctgacctcgtgatccacccgccttggcctcccaaagtgctgggattacaggtgtgagccaccacactcagcctccaaatatgatttctttaagttaaccttttaccaaaactccagccagaggtaacctgtaggtattacggtttgaactagcagaggtcctgagaccatctaactgttgggtctatttcttggggacagcagctaccaagggggtgccagctggaaacagtgacacagaggggggccagcctggtcggaaacgacgctggggagccagcacagccaccacacagaagaaaccttccatcagtatcaccactgaatcactaaaggtgaggtgggaggagccagggaagggaggatgagacctgttaaggtgggagtagacatgggcccagtgtaacggggtggggggtatctgtgtcccagagcctcatccccgacatcaaacccctggcggggcaggaggctgttgtggatcttcatgctgatgactctcgcatctctgaggatgagacagagcgtaatggcgatgatgggacccatgacaaggggctgaaaatatgccggacagtcactcaggtaaggcttctgcaccccagtgtcaggggaaaggtgggagcagtagatgcagagcagctagctgaggagctgagataaagtctttggagggaacttccctgtctgtgcagagggttgggttgactgacactttcaggggtcagactaccaaatccagctggctacctgttacaaataaagtttgattggaacacaaccacacgagttcattcacttttgtctgtggctgtttgttcactacaacatcaccagagttgagtagttgcaacaaactatgtggcctgcaaaacctgaagtactgctttgctctacagaaaaaatttactaactcctgtcttagttttcctcaaggcaaagttgaggcactaacaatcccaggatctggtagaagtgagccgataacgaaatacccctagcggaaggaacatgctagattgactgctactcttaccggggaaccagaggctgaaaagaatatgccagtttggtgtttaacagacctgctgtgtt

SEQ ID NO: 9064 - DNA, 1220 bp, Homo sapiens
aaatagagcccatggaaggcccagcccccgctgtcctcattcagttatctcctcctaatacagatgctgacaccagggagctattagtatctcagcatactgtccagttggtaggaggcctgtctcctttgtcaagtccttcagacaccaaagcagaatctccagcagagaaagtgccagaggagagtgtcctgcctctggttcagaaaagcacactggctgactactcagcccagaaggatcttgaacctgagtcagacagatctgctcagcccctccctctaaaaattgaggaattagcactggccaaaggaatcactgaagaatgtctgaaacagccatctttggaacagaaggaaggcagaagagcttctcatacccttctcccaagccacagattgaaacagtcagctgattcatcctctagccggtcctcctcatcttcctcctccagttctagatcaagatctcgctctcctgacagttcaggttctcggtctcattcaccgctcagatccaagcagagagatgtagcccaggcacgtactcatgccaaccctcgtggtagacccaagatgggctccagatcaacatcagagtccagatcaaggtcacgttcacgttctcgttcagcatcaagcaacagcagaaaagtgagtatgagagaatcccgggtgtattaatgttctgtcatattccagtggttttcatttcagcccctggagagcctgtcatgatttctgaaaggaataggaaaagcctcctttactctccttcactgattactttctcctcatttcagaatcgtattttcaattaactgattcccgaaatggggttctttttcattttgagtcccttgatagaatgttgaatttatgtactcatctcctccactagatggaaacttcttgaggatgtgggcatgcccttttacgtgtgtgtcccaggatctagcatctagttaaaacttaataatttgttaaataagtggtcaaggagaccactaaatgggaataaacacagacaaaatgggagtaaacacagacaaaaaggtccagagtataaaatttggtccatggaaactggaaaactcagcaatctactgaatatataccatatacaataattttccttgttatgtgtttcattttgttttagtctctgagccctggagtctccagggacagcagcaccagctatactgaaaccaaagatcc

SEQ ID NO: 9065 - DNA, 1176 bp, Homo sapiens
tcctgatatccctttctccttctttctctcctgcttcccttctctcccacaggcggagttcacagctctatacggggacggggccctggaggaggcgcggcgtctgcgggaggggaactgggcatcagtgaggacagtgctgacgggggccgtggcactgggggccctggtaactgtaggggccttttttgctagcaagtgaaagtccagggccaggtggggctaggtgtggctgggggccaggagagcaggaacagaacagagaaatgcccttggaagaagtggagttggtggatgggtgggcatggaacaggatgggcagagaaagggtagtgtgtgagggagctgagtaggccaggtaggcgattggaagagtgagcaggacacagaggggaggggaatgttttggcaagtttaggggcacaggagatgtagtcgttccagggctgggggaggtgggagggatcacgcctataggtgtgggcacatgaaacgacctggaacttgcttcacagccctgaggaaggtggacttacataagcagctgtattccattagatgagtgggatttagggaacgcagaaggcacatccctttggaatggaagcttaggggttctcaggtgatagggagaggtggctgttaacagtgggctgcttggacacgcgtgtgcatgtgcacgcatgctggtgtgcatgctgggctgcctggcaaatctggtggtgatgggattcctcaaggagaaaacattccctcttgcaatggcaagaactaggggcagttctctgtccctcctcccaacccctcctttcccctgcccttgtcctgatgcctcaaggcttagagagaaacattgtatccagaccgagggctctgctgcttctttccagaaagtgattggcaaggctttggagagaagagcagttctgcagctggccttgttccttcatcatcccccttccttgtgcattatgcacttgctgctgcctcctgggctctgatagaagggcagggctgttgagcctggatgggtggaggcttaggtagccggacctgcctgccaccctcctctcccactcaggcacaatggtgcctaaagtgtttccaatctctgggacctctgtacccaaactgaaactctaaattggggccctaactaattttccttttgaggtt

SEQ ID NO: 9066 - DNA, 1484 bp, Homo sapiens
ctcagtgagactgttgatgccttgagatgaccatttcagatctgaatcccatgggtgtgagggtgatgggtactccaggactggcctatgctgtgttgtgggctttggttcggctttatcaggggccaggcatatgggttctagagtacctaccatgacctagaagcatttatgatttatttgaagccacactgtttgcatgggtgttacttgtctgtacctcagagtctgaggatgttaactttggaactcgcagtcctctagaacagcttcagattatggctttttcttttgaggaagaaattattcactccagatgcatgccctgagccagacctcactgctgcactttccaaggtgctaagattgctgctctccaatgctaactttctgacacagtgctctagaaccctgcctgtggtcctgagcactgatcaccttagctagaccatggttgactcttcttggagattttcacttggtcctagaatgtggcaacgtagttgtgctcgccagaacgtgggaccaaattggcctcaggtgttgagtccagacttctgcttttgagagagggctgcactttttcatggtatttctaggggaggtggtaggctgcatgtgccacttggtcttgttgtgagtatgctgacaccagaaactcagagccagcttgtggcaagcagttggggtggggggtctctgacttgctcaggacaaactaggccagtggttttcaaactgcttggcagagccctgaagtttcctaggggttgcctcaggagtccttggggagatgaagggggtggggagctgagcaggctgggcaatttgccctcaaacagaacagctccccttgtagctgtcttacatattggggttcagggtaagattttatttgcattaaggggtttgctgctgaaaaaaagttggaaaaccactgactagaccatcggctccaaattggagtctgtgcttccttccccaggtatggagcacactcttcaccctaccctctaccacaggacacatatccctgttagcattccccgggacctttagccaagaggagctgcagggaccatggccaggttaccaaaatgccctgctctgaagccttgacacctgggtggaaagagaggctgttttctgaaagggtaaagggcttggtctggattcccagaagcatagcttagatgggaccacagtgggcaattttgacctgtcctgcccttcttagcttgaagggaaaccccagagactcttctgtcagggaaaactagggactctcttctagagccatatagttccttgggattagctcttggccaagaaggctgagtatggttcccaatttttaaatccatttcattttttaaaaaataagggaaataaatgtaattgccatttttcaaagattaagtaggaggagaggggtttcttgctctccagagcccaaagggacaaatagggactttgtttaggcc

SEQ ID NO: 9067 - DNA, 1175 bp, Homo sapiens
tacctaaggactcgataggaggtgggacgcgtgttgattgacaggcagatttcccctaccgggatttgagaatttggcgcagtgccccgccttagaggtggggccttatttgattgccaagtaatattccccaatggagtactagctcatggtgacgggcaggcagcttgactaatgagtcctcggcgtggccggcgcagctctccaatcgccgggcggcgggccccagtctgagcggcgatggcggcggcggcggcggcggcagcagcagcgggggctgcgggcggtcggggctccgggccggggcggcggcgccatcttgtgcccggggccggtggggaggccggggagggggccccggggggcgcaggggactacgggaacggcctggagtctgaggaactggagcctgaggagctgctgctggagcccgagccggagcccgagcccgaagaggagccgccccggccccgcgcccccccgggagctccgggccctgggcctggttcgggagcccccggcagccaagaggaggaggaggagccgggactggtcgagggtgacccgggggacggcgccattgaggacccggtgagggaaggagggcgagcgagcaggccggcggctggccggccgggtcactggaggcccagagctcgggcgagcgggtggcaggcggggggtggggttgggcggggaataacgtggctggggccgggtcgggccggggatgggtcagcgatcactacaaggggcccgactggcttgattcgggcgtcacggttgcctagtgttgttctagagagggtagcttttcttttatcacgaccctcgcatggggcgagggaaatggccgagcatggctgaggccgcgctctggccgagagcagggcacagcccctgcgttggttcctcttaagctgtcctccataccctccccacttatattaggagctggaagctatcaaagctcgagtcagggagatggaggaagaagctgagaagctaaaggagctacagaacgaggtagagaagcagatgaatatgagtccacctccaggcaatggtgagtaactggcggttgcacgcggagcccgggttctcgggttggaagggttgtggggaggatggggaatgtggggttagatactcggcaccctggagctgcttgtctg

SEQ ID NO: 9068 - DNA, 1175 bp, Homo sapiens; identical to SEQ ID NO: 9067

SEQ ID NO: 9069 - DNA, 1484 bp, Homo sapiens
tgtggtgcccaggtttttgccttgcttcacttctgtctctacatttaaatagacgggttaggcatataaaccttggcttttcataagctctacctgcctatccccaggagttagggaggatctatttgtgatggcctagggtttaagagctgtggaggactgaaaactggataaaaagggggtccttttccttgcccctgtctctcactcagatgcgcttctttttcgccactgtttggcagttttctgttaagcccccctccccctgccccagttctccaggtgcgttactatttctgggatcatggggtcagttttaggacacttgaacacttcttttccccccttcccttcacagtaactggggcaggggcctacggggaggggcttgtactgaactatctagtgatcacgttaacacctaactctccttctttcttccaggggccgggctagagcgacatcatggtattccccttactaaaaaaagtgtgtattaggaggagagagaggaaaaaaagaggaaagaaggaaaaaaaaaagaattaaaaaaaaaaaaaagaaaaacagaagatgaccttgatggaaaaaaaatattttttaaaaaaaagatatactgtggaaggggggagaatcccataactaactgctgaggagggacctgctttggggagtaggggaaggcccagggagtggggcagggggctgcttattcactctggggattcgccatggacacgtctcaactgcgcaagctgctgcccatgtttccctgccccacttcacccccttgggggctgctcaagggtaggtgggcgtgggtggtaggaggtttttttttttacccagggctctggaaggacaccaaactgttctgcttgttaccttccctccgtcttctcctcgcctttcacagtcccctcctgcctgctcctgtccagccaggtctaccacccaccccacccctcttctccggctccctgcccctccagattgcctggtgatctattttgtttccttttgtgtttctttttctgttttgagtgtctttctttgcaggtttctgtagccggaagatctccgttccgctcccagcggctccagtgtaaattccccttccccctggggaaatgcactaccttgttttggggggtttaggggtgtttttgtttttcagttgttttgtttttttgttttttttttttttcctttgccttttttcccttttatttggagggaatgggaggaagtgggaacagggaggtgggaggtggattttgtttatttttttagctcatttccaggggtgggaatttttttttaatatgtgtcatgaataaagttgtttttgaaaataaaaattgtttggccttttgggtgtaaggattatttatcttcctattctctcttagatcgcagatggctattaattctgccttgtggtagaagtactggtgttgtggaagggaggttgccacttgtga

SEQ ID NO: 9070 - DNA, 1484 bp, Homo sapiens; identical to SEQ ID NO: 9069

SEQ ID NO: 9071 - DNA, 1180 bp, Homo sapiens
gaatggaacagcaaacctcccaaggtaccaggaaaggggactccatgggccaacaaggtctgaagatgactgaggccaaggtcaactgccttggtattgagtgggtggggtctggcttaaacgaagttccctcctcattgtactttcttctctctcccctagaaggccctaacctgaccccagaagccagtccagatcctcttcctgagcctcccctggcctcagttgaggtcccagacaaaccctcaggaagccctggccaacccccttctccagccccatctccagtccctgaacctgatgcccaagctgaagacgtagctcctccgcccaccatggctgaggaggaagaggggaccactggggagctccgctctgcagagccagctccagctgactctcgccaccctctgacctatcggaaaaccaccaactttgccctggacaagtttctcgaccctgcccggccctataagtgcactgtgtgtaaggagtccttcacccagaagaatattctgttggttcattataattctgtctcccaccttcacaagatgaagaaggctgccattgacccctctgcccctgcacggggagaggccggtgccccacccaccaccactgctgccacagacaagccctttaagtgcacagtctgcagagtctcctacaaccagagctccaccctggagatccacatgcggtcagttctgcatcagactcgctctcggggaaccaagactgattccaagattgaagggccagaacgcagccaagaagagcccaaggaaggcgagacagagggggaggtgggcactgagaagaagggccctgacaccagtggcttcatatctggattgcctttcctgtcccctcccccacctcccttggacctgcaccgattcccagcccctctcttcaccccaccagtcctgccccccttccctctggtgcccgaatcactgcttaagctccagcagcagcagctgctcctgcccttctacctccacgatctcaaggtggggcccaagctgacactagctgggcctgcacctgtgctgtccctgccagctgccacccctcctcctccaccccaacctcccaaggctgagctggctgagcgggagtgggagcggccccccatggccaaagagggtaatgaggcagggccttcctcacc

SEQ ID NO: 9072 - DNA, 1697 bp, Homo sapiens
ggagccccaggaagggcctgactgtggtcacttcccaccaaatgacccaggggtggaaaaggacaaggagcaggaggaggaagaagaagggctccctcccatggacctaagcaaccacttattcttcacagctggaggtgaggcctacctagtggccaagctgtccctgccaggtggcagtgaactcctgttaccaaagggcttcccctggggtgaggcgggcatcaaggaagagcccagtctgcccttccttgcctacccacccccctcacacctcactgcccttcacatccaacatggctttgacccaatccaaggctttagctcttctgaccaaattctgtcccatgatacctcagcaccatctccggctgcctgtgaggaaaggcatggagctttctggagctaccagctggctccaaatccacccggagatcccaaagatggccccatggggaacagcgggggcaaccacgtggcggtcttctggctctgccttctgtgccgcctgggtttcagcaagccccaggcctttatggatcacacacagtctcatggggtgaagctaacccctgcccaatatcagggcctgtcaggtagcccagctgtactccaggagggagatgaaggctgcaaggccctcataagctttctggagccaaaactccctgctcgcccctcttctgacataccccttgacaacagcagcacagtgaacatggaggcgaatgtggcccagacagaggatggcccccctgaggcagaagtccaggcccttatcctcctggatgaagaagttatggccctcagcccaccctctccacccacagccacctgggaccccagcccaacccaagccaaagaatcgccagtagcagcaggcgaggcagggccagattggttccctgaggggcaagaagaggatggagggctctgccccccactcaaccaaagctcacccacctccaaggaggggggcactctccctgccccagtgggctcccccgaagaccccagtgacccaccccagccctatcgcctagctgatgactacaccccagcccctgcagccttccagggcctcagcctgtccagccacatgtccctgctccactcacgcaactcctgcaagacactcaagtgtcccaagtgcaactggcactacaagtaccagcagaccctggatgtgcacatgcgagagaagcaccctgagagcaacagtcactgcagctactgcagtgctgggggcgcccacccccgccttgctcgtggagagagctacaactgtggctacaaaccctaccgctgtgacgtctgcaactactctacaaccaccaaaggcaacctcagcatccatatgcagtctgacaagcacctggccaacctacagggcttccaggcgggccctggtgggcagggaagtccaccagaggcatcactcccaccctccgcgggagacaaagagcctaagaccaaatcatcctggcagtgcaaggtgtgcagctacgagacaaacatctcccgtaacctgcgcatccatatgacctctgagaagcacatgcagaatgtcctaatgctgcaccaggggctgccgctgggcctgccacctggattgatggggccaggccctcctcccccaccaggggctacccccactagcccccctgaactcttccagtactttgggccccaggccc

SEQ ID NO: 9073 - DNA, 1323 bp, Homo sapiens
ccagcatttccctctttttctcctcatcggccagcccctcctccagccccctctggtggcatgccatgccaagagcaacgtgtaaaggaacagagaatatccaatgcagtcaagtccaccctgcccagactttgccactgacttctcccacccttctgtctcccccataatagtttatttggttggtctggactcacttgtggcctttgattaaattcctaaggggcctgaagaagacatttctactgcagagggttagaggcacttgagcaaggcccccacatcccaactctgggagttgtggtgggaggaggcacttctgggggataggaccagacaagataacaggagctcacatggaagcagaagctgtgacaagtttagtagtcccaaaatgggttatatcccttccccctttacatcagaatcttgtgaaatgggaaaacaacagaaggaggggatcaaagatagctgatctcacatgcttcccaggcagggcagaggtgggagtcaaacccgggtgacaggtgggtggagagccctgtttgaggttgtggctgatccctctctggtattagtttttcccctgggagcaggaagccctaggaagaggggactgcagggtccccaggggatctttcctccctcccctgcatgaggcagaggcaagctgcctgccaaccccctccctcaaggaatggccttgcccaggaatgcccaccacacataccctcttctttttttctagtcaaactcttgtttattccttggcttgcctccctccttcctcccctctcaacctttacttctgatttctatttcatggaatttgggattgaagttaaactacaacagtgccgccaacaccaagtcttgcaggaaaaaaatacaaagaaatttaacaaaaaaaatatattaataaaaaagttcaaaaaaggggggggattgtcatctcctttggggtgcgatggcttcaaatccaaactgaggctctccgggtggtaaggatgtgcgaggaggcctcttgaagaactccaggcctatcatgctgtctctccgctaaagcctgaggcccgaggtcagaggattcaggaaggctctgcagtcggcccaggagggcggggtcccgtggtggaggcggggagagggaaggaccgcacggagcaccaacccctgctcggccccgtaccaggaagcgctggggggcagaggagcggagttgaggcagaagccaggtgaggctggagtcctggggtaggcaggctgtcgctgccgctgccgctgcctgagatggaaatcgggggaggaagctcgcggaagaaa

SEQ ID NO: 9074 - DNA, 1323 bp, Homo sapiens; identical to SEQ ID NO: 9073

SEQ ID NO: 9075 - DNA, 1122 bp, Homo sapiens
cagcctcccaaagtgctgggattacaggcatgagccaccgtgcccagccatctccctacttatttctaaacgttgattaaacagttaaacatgggcatgggctacacaggcagtaacatcagcatgcctacatgtatacttccacacagccaggcatgtgccttttttgctcatttggccatatctgtccctcgctgagcaggagacaccctcctcaagcctcataaaggctacaagatacatgtgtcctgaacacatcccacacaccaactgcaacctgctcttcatggtccctgcatgcagacatgttttagcaggctgcagcccaagctttctgtctctccaccacctgccttgtccactctcgatgacagcaactagctcattgcctctgtttctcctataggcttaactggcatgggctgagccccttgggctggccatcatgccgtagcatccagaccctgcgagtgcttagtggagatctgggccagcttcccactggcattcgagattttgtagagcacagtgcccgcctgtgccaaccagagggcatccacatctgtgatggaactgaggctgagaatactgccacactgaccctgctggagcagcagggcctcatccgaaagctccccaagtacaataactggtaagccttgggctccacaacctgcaggataggtgcactgaggccactttgggttcaccaaggcaaaatcaacttaactagaacatcccaatggaatgaacaagaatgagagctttggggtaaacagacccagaaactgggatttgcttacgcctataatcccagcactttgagaggccaaggcgggtggatcaccaggtgtcgggagtttgggaccagcctgaccaacatggagaaaccccgtctctactgaaaaaaaaaaaaaaaaatacaaaaattagcccagcatggcagcgcatgcctgtaatcccagctacttgggagggtgaggcaggagaatcacttaaacccaagaggcggaggttgcagtgagccaagatcgcgtcattgcactccagcctgggcaataagagcgaaactctgtctcaaaaaaaaaaaagaaagaaactgggatttttttttttttttga

SEQ ID NO: 9076 - DNA, 1192 bp, Homo sapiens
ggcacccctttgaagagaagattgtcagcagttcggtgaggttgcaagggttgagggtgctggcacatgtctggggcttggacttgggtgggggcagcacatcctgactgcttgccaccctctgccctgcagtgggacgggaacctgcgtctgtggcagtaccgccaggctgagtacttccaggatgacatgccagaatctgaggaatgtgccagcgcccctgccccagtgccccaatcctctacacccttttcctcaccccagtagatccaacctccagccccatatagggtgaacctcttgataagctctctgcctcctcctccctttctcccttgtggggaatgtttggaggaatcactggcatttgatggggaataacataagcctgggctctgagcctcagctgagccctggaagattctccccatggggcagagtggtctccttacgtgctcacacccagtcagcttgggtccctatctctggccagagtttggcaggactgccattatctggggtgtggcctctgccagcaagagaagtgtcctgggtgtttttaatcatgtttgaatgttaggggttggatcctagagtagatgcctgaggccacatctgaacagacctgtcagccaggcctgccaggtcttcacgttgaggattcaactggccaatcacaggacaggtgtcctggcctttcttcctgaggtctctaggggaggggcatgggtaagggtgtttcctcagcaccctcctggggtggggattatgtctgctgtcatgtctgggtctttagggtaggacaggctgtggtatgagaggcaggagtctccacaaggcttcatgtggccccttatagggcaggccctgccctctgggaaggtcccttcatgctggaggcacacagctttaaggaagtaggttgaagtaggactccttcgtcctctcactggctttggctccctcaataaactgtgtgggaacctggctcagtgtctgtctctctctctcactctctgtttttcctatctgaggtctttcatctcctcacttcaggaaaacacagttcagcaaagtcttcagatgcgatcctgtgtaggagaaaatacccttctggtgccccatgaaaaagggaaataccaaaaccatttgttcactgagccttgcaataggtgctcccttaccaatttca

SEQ ID NO: 9077 - DNA, 1178 bp, Homo sapiens
agacccggcacgcctccacccagtgtggggagggaagcaagggagaatatgaaactgggaattgggtagagggctgatgtggcattatgccattccctcttcccaggtcaccacctggttgcagctgcagatacctcggattgaggatggtaacaattttggagtggctgtccaggtgagagcgctgccccacttccctgctcttttctagtccatgcttccttccactttcccccttgctttttttccctaggagaaggtgtttgagctgatgaccagcctccacaccaagctagaaggcttccacactcaaatctctaagtgagtgaccacccatgtgcacactgtttttgttttgggagacctccttcttctactccatacacacttctccttccacaggtatttctctgagcgtggtgatgcagtgactaaagcagccaagcagccccatgtggtaggtgaggcccaggtcagggtgcatgggggaaggacacatgtaaggtcaggcctgacccgagcttcccacagggtgattatcggcagctggtgcacgagctggatgaggcagagtaccgggacatccggctgatggtcatggagatccgcaatgcttatgtgaggaggcaagggcagggcaggggtgggcagaggcagctttcccaggccacccactccctgaccctgcaggctaggggttaagggtgacaaagctcagcttctccacaaggctagaaatggggcacagagccactggaggcctctgactgacctctactccctggccctgtaggctgtgttatatgacatcatcctgaagaacttcgagaagctcaagaagcccaggggagaaacaaagggaatgatctattgagagccctctctcccattctgtgatgagtacagcagagaccttcctgctttttactggggactccagattttccccaaacttgcttctgttgagatttttccctcaccttgcctctcaggcacaataaatatagttataccactgcccatcagcccaagtctctttattggaaccgggccccgctggccctggctcaggcatttccatttccattagtgggaccaacccactgggtgatttgagtgttgagccgctggttggtccagtcctgccggatgtcatcaaggtggcagtcaaagtccac

SEQ ID NO: 9078 - DNA, 1162 bp, Homo sapiens
cagtggctcacgcctgtaatcccagcactttgggaggctgaagggggtggatcacctgaggtcaggagttcgagaccagcctggccaacatggtgaaaccccatctttactaaaaatacaaaaattagctgggcgtggtggtgggcgcttgtaatcccagctactcaggaggctgaagcaggagaattgcttgaacccaggaggtggaagttgcagtgagctgagatcgtgccactgtactccagcctagatgacagagcgagactctgtcaaaaacaacaacaacaacaacaacaacaacaacaaaaaactcctaagtcttctttttcttttttttctggcttccttttcctgcaggaatgatgagaagacagcagctgattacaagattttaggtggttcagtccttcacctggtgttggctctgagaggaggaggtggtcttaggcagtgatggaccctccattttacctctttaccctgtcgctcataatgaggcatcatatatcctctcactctctgggacaccatagccactgccccctcccctggatgcccagtaatgtatgtctactggtgggagactgtgaggatcccaggattcagtattcctggcccagagggcccttgctggctactgggtgttagtttgcagtcctgtgtgcttccctctcttatgactgtgtccctggttgtcaataaaatatttcctggcctcctggaatctttcttctgttgcacaagttgactgaaataaaaatggacctaatgctcactcagttatagcaggctgaaggaatcggacagtggaaggaatggtgctcttacggggattatcagactctaggaaaacctacttagtggtgtgttggaaccagttcctagtggctaatgagagccaattattggcacctttttccaactctattaagtgacttcatgttggtagcttgaaattggccatggtaggattatttacagaaactagcaaacactacagatcagttcctccccacaaactggttgttatacatctaccagtgtagtgctgacatggatggtgaaaccttcggagagtgaattctctcttgactgtggctgtactggacatttaggcctggttggagaacgccttcaagggtttggctgacactgtactcta

SEQ ID NO: 9079 - DNA, 1193 bp, Homo sapiens
gggccaggaagccaggtaggtagtctgagtcaggattggatcaacagcctcctctcttggggactctcaagagcctgtgttcatctagaagtagtagtttgattctggtttccctcctacagtgtgtcctccgtctctgtgcagctccgtcattaccataggggacttggttttagactctgatgaggaagaaaatggccagggggaaggaaaggtgagtgggaaggagcagaaagctgggaaaggggatgggtagaacaagactgagaaatccacatgcttcagaattcagagggttcagggaatggtttcggatagtaggctctccctgctcccttctctacaggaatctctggaaaactatcagaagacaaagtttgacaccttgatacccactctctgtgaatacctacccccttctggccacggtgccatacctgtttcttcctgtgactgtagagacagttctagacctttgtgatagaactaaaatgctctctgtactctagtctcctgcctcctcagctctgcaagtagtttagtaggaatgaagtggaagtccaggcttggattgcctaactacactgctaaaaatatttgtaatccttaataattaaactttggatttgttaaaatactgccttgatgtgaaggaggggaattaaggtttccataaggtcagcataagtcattccttagaaacagaactggcccttccaaactgaaaggatccctttgcctttttttacttcccttgctaagtgttgttcagctgtgcctaaaagggttagcagggttgaaagcctggaagagaaatgtcctttggtattctggaaatatgtgtcctcaggccagaatatactttgtaaattctcatgctgccagattatctgggtgtggtggcactagaatggagatacttcatgggaataatactcattgttcttgaccccactgggtcagtgctgaccctaccaccacccactctgcagcagcacccagatgctagccttgtacagaaagccccagcatctctttacagtcaatgagctctctctttattgaggtatttcaaatatacaaacacttcagagctttttagatatgtgaaggtccaatttagtgaagcggattaacaaaacatgattctaaaagcctgcctcctctagaccaaggccatgtaaaagatttat

SEQ ID NO: 9080 - DNA, 1386 bp, Homo sapiens
caggggcaacagcgcgcagagatcgcagaaactccagtactcgcggaaaatgttccacgcagcgtccgcgcacaacctgccagctagccgcggcggcgaagcgtagagctgcgggacccgccaccaggggcgtagccatggtcggcgggctccgcccggaggcggtccctccgggttcctcacccggatgggtgaggctttccgatcactcctaggggcggggcttctggcaactccctgtcgctccggtctgtcggctctgggtacctcgcgatctgactcggctcccttccatcggcccccagaattctgggggagggggtcttctggctcgggctggaggagcctgagtggagaagctgaccgtctccagtggcactgggtcgctcagctttaaacgtcgccgctgtctcgagcccgagggtgcctcacttccggctccgctactagcttcccttgccccggaaaagggcggtaagagggagccaatgggcggccacagagggaaccgtgacggtgcgtcagaaggccacgccccagcggagctgtagctgcccgcttcctgcactctctgccggctgacatgagttggcggctgaggctgtcgtggccgctgaggctgttgtggccgttcgtctgggtcctcccagccttgctttcttcgcggagcctgcggagaagccccgtcactcccgtgaggctcgacttcctagtctgtaaaacgaggatcatgccaccgccctttcccactgtcttcacccatcgaaatttagttctttaaattccagacccgagccggcgtctacaaagccttcccctctgcgcgcgtcgcttccagtaggaattcgactgttccttttataaaacagaagagggcgcccgcccttaaaaaataaaatacaggctgggcgtggtggcttgtgtctaatcccagcgctttgagaggccgaggcaggagggtcacttgagcccaggagctccagacaagcctgggcgacatggtgaaaccccttctctgctaaaagtacaaaaattagctgggcgtggtggcaggcgcctgtaatcccagctactcgggaggccgaggcaggagaatcgcttgaacccagtagacgggaggtggcagtgagccgcgatcttgcctctgcattccagcctgggcgacagagggagaatctctctcaaagaaaaaaaaaaaaaaaaaaagaggaagaagaagaaatagaatacaggctgggggcacggtgactcacacctgtaatcccagcactctgagaggccgagaggggaggatcgatccgcttgagcccaggagttccagaccagactggatcacatggcgataacctgtctctactgaaaatcaaaaaaactagccgggcgtag

SEQ ID NO: 9081 - DNA, 1183 bp, Homo sapiens
cacccaccccactggttaccccactcgcagcactgtctgtcccacgtcatgtactgctgtgggctgtaaggtcagcttcccacatgctcccatcctcttcttggctggggtccccaagggcctgtggggcacagagggcatgtgcctaataaatgctggccgaggaccctctcccaggtctcctgggaagcccatcacctccttcctcccttcaccccccaggatctgacagtgctctgccatctggaacagctgctcttggtcacccatcttgacttgtcacacaatcgcctccgaaccctgccacctgcactggctgccctgcgctgccttgaggtaaagtacccatgtctccgtccctgtcacgggtggttcttttcctcttcctctccctcagaagtctgcccatcctacaaggagatgtgcaggaccctccaccccgaacaggtaactgcgtgccttccacctccatcacgcagcctgaccctgtgagcccctctgtgctctgtggacccgtcaccctgagctcctcagttgctgaaccatccctggctgacagcgcctgtcctgcctccctgccctccctgcccccaggtgctgcaggccagtgataatgccatagagtccctggacggcgtcaccaacctaccccggctgcaggagctgctactgtgcaacaaccgtatccttccttctgggtgcctttcagacagtgggtaaagtgaggtgccaccctgggaagggacagacagcaggcagggtatgtgccaccctcttgcagggcaggagagagggggctctgtagtgtgagttgaagggggagagcctggggctgtcgggctatcactgacctgcactggtggagttgtgcggagtggacttcctcaagtcagagttcacaaatgggcagcccgcagctgttcttcaggtctatgtagttttttgaaaatcaggaactttcatactttaaaaaacatctagagttctaattcctctcttaaaaattggaagttagagcaaccttacactggtattttcactcagcagcccttggtcattgctgaatagtaaatgtctctttggaccaggctagatttccaccttatcataccctgcaccactcccctgatactacaccagcttgcgtggggtgttgcggctcattctttcctggctgaccctg

SEQ ID NO: 9082 - DNA, 1144 bp, Homo sapiens
ggacaatatgtggctctggcctgtagtcgccatggcagccgtgtgctagatgccatctggagtggagcagccttgagggcccggaaggaaattgctgctgagcttggtgagtaccagcccctctctttgatgtttccagactctcccctctcttactccagatcactgggtagctgggaagtctactgaaattcaacagtctttagttccaaagggtggtcttgctcatgggttcttagcagtctgctttccccttccctcccgctgactgattgtgtagtcctctgccctcaccctgccctctgacttctgttctttggaaagtgaagtgttcactttatcccagtggcagtcccagggtctgggggaaatggagggatctttacgtcaagtagagtctgtctttgagcatggtagtactaaacatgagtggttccctttgcaggggagcagaaccaggagctgataagagaccctttcggccaccatgtggctcgaaatgtggccttgactaccttcctaaagcggcgagaggcttgggaacagcagcagggtgcggtggccaagcggaggcgggcattgaactccatacttgaagactgaggctttggatctgggactgggtgttgatgggggagggcaaaatggggtatccaccccatccctttcctggtttaaattggagtcagaagtcttagtggtaaatatttgatatttttattggaaatgtttttgttagtttgaggggaagggtatgaagacagatctcaaggtaaagtcagagagggctgtcatcagtatgctggggagtttagggacaggaggcattggtaggggattagatgtagcagcagtcaggctgggatcaagatgcctgggggacatcttgatcttggcctttcagggcaagtgggaggccagaaaggtggctaggaaagaacagcattcttcaggtaagggtatagacttgggatgtgaggcgttatgctgaaaggttctgtcacgaggggatcagaggacagtggggaaattgggtgggttatctagcctgtactgtctgcaggtcctgaaatttgatgctgtcatagtctttgcagtgggtcggttggaatgattctgggggcagaagctcagagccccttag

SEQ ID NO: 9083 - DNA, 1148 bp, Homo sapiens
aggcagctggaaggtgtgcagtggggagactaccagacctctcaccagcatgtcctcccacttcctgtcttcccagtgatctgcaaagaggagcccctaccggactcatctctgcggggtttcccttcagcatcggcaaccccctttggcactgacatggacttctcaccacccaggcccccctacccctcctatccccatgaagaccctgcttgcgaaactccttacctatcagaaggcttcggctatggcatgccccctctgtacccccagacggggcccccaccatcctacagaccgggcctgcggatgttccctgagactaggggtaccacaggttgtgcccaaccacctgcagtttccttccttccccgccccttccctagtgacccgtatggagggcggggctcctctttctccctggggctgccattctctccgccagccccctttcggccgcctcctcttcctgcatccccaccgcttgaaggccccttcccttcccagagtgatgtgcatcccctacctgctgagggatacaataaggtagggccaggctatggccctggggagggggctccggagcaggagaaatccaggggtggctacagcagcggcttccgagacagtgtccctatccagggtatcacgctggaggaaggtgggtgtgggactgggggctgtgagtgtgagtgtgtgcaagagattgctctgcatgtttgctgagggctggagctgggcttttcagagatcgggcatccctggtctctcagggccagttggaggttcccaggaggcatgttcttgatgcctgtggctgcctgaatccaattaactgaattctgaagagtgcatggggtaactgtctcagcctttctcctgtctctgcctctgtcctctgctccaaatcataaaatctcagagctagaagcactttcaagatcattccatccagcgcattcaatttgcaagtttaggcgttgagttccagagagggatggtagcttgctgaggtcccagtcaagcacacttgccattgcctcagctttcccctaaacacggtgtctgtggtcagggttggtgaggaggagctttcctgttttgcctctccttcttcccattggctacacccatctctggccctgctg

SEQ ID NO: 9084 - DNA, 1128 bp, Homo sapiens
tcagaggctccttgactgggaccaggattgggggccagggcttgagtaggcctctccactctcctccttgggggtccagattccttaggagctttgggatgaggcccaggaggctgcatttttccaggtccttagtcttgccaccacacagatgattctgattcatagccaagatgaggacacactgatgtagctgatctctcatttacagaggaggattctaaagttcagagagggaaaggggcttgcctgaggtcacgtagataatcagcagcacattgaacgctgcactcctgggctcctgtccccagcccccattcagacacgctgactcaggaggtccaggcctctaaggcttctctccctggagtgagggtggaggtgagggagagctggcacaagccctccctctggatcctccactcctggggattatgaagatattctggaaagatttgtgcttcagaggtagactgcagaaagcaaacagtctacccagcagctctgaatgtcacctgccctggggcttacagcactatatgagttcctggcctatcctgcaaatatgcccatgctggccttctaaatagctggtacatccatcaccactgacgggcctggcctggaaacctggtttgtcccctgtcttgatggcctacgagaggccaagttccactgggctgggaaaagtcactttgtctgtcttgttcacctggagcctgacacaccgtaggtactgagtacaaatagcttgatttggctaggcttggctgcagggggacgtgcctaaaagacattccgggcatttgcacttgggaaacttgcctcaccttcaggcttgtggggcctctctatgcccaatgagtccaggcagtcctagcaagtactcaggagagcaggggtgggtgtgacagaggctggctctggattgggggacaacagaaccagagtaactcctcgcctgttgctgctttgcaatgaatttcctttacctttctggaacacaagctgctgtgaaccaaactgatatcaagtgattagctcaccgggccttggttgcttttcaaagatccccttcagccccctgccagagtcactgccccataatcaccatgtcagaagggaccc

SEQ ID NO: 9085 - DNA, 1196 bp, Homo sapiens
gctgcttcagcatgtgtttgcaaggtggggtgttcctgtgaggctggaggcagcccaggggccccagtttgcccggcacgtccttgtgagctgtgggctggccctgggagcccaggtggcctccctgagtcgggacctccagttcccctgcctgacgagctcaggggcctactgggaattcaagagggccctcaaggagttcatcttcctgcatgggaagaagtgggcggcctccctgcctttgctgcacctggccttcagggcctcctccactgatgccacaccgttcaaggtcctgaccgggggtgagtcaaggctcacggagcccctgtggtgggagatgagcagcgcaaacattgaagggctcaagatggacgtcttcctgctacagctggtgggggagctgctggagctccactggagggtggctgacaaggcgagtgaaaaggccgagaacaggcgtttcaagcgggagagccaggagaaggagtggaatgtgggtgaccaggtccttttgctgtccctccccaggaatggcagcagtgccaaatgggtgggtcccttctatatcggggaccggctgagcctgtcactctataggatatggggcttcccaaccccagagaagctggggtgcatctatcccagcagtctgatgaaggcctttgccaagagtggcaccccgctgtccttcaaggtcttggagcagtgagcgggagcagcgggggtgccccctgccccagggccgtgggtttctgctgctaggcctccccctgtcccagcagtgctctcagtccactgggggccctcagttgtgccttttgtagagaacttgcttcataaagctttgctgaattgccttgaactagggaccagcatccccatggaaacatccccagtttggggtacttggagaatttgccaaaggctgtcagatatgggtccctggcagttttacactgggaaatggagtgctcctctaggctataccaggctcagtgtcttctccccaagtatcctctttccccttcacatgtaggtgtgtggtggtgtgcacacacactcacgaaagaatctatcttggccatgaaactgtggctgttgaccttggaattggaaccacagtcctttcccatacagaaaccccaaatgtgggctcctccctccaacctgttcttttggggaccctttgccct

SEQ ID NO: 9086 - DNA, 1207 bp, Homo sapiens
agacccaggggccccggcctctgttttaagggggcagggcgtctgcaacaggagtggcacacggtgaagtgctggcatggctctacctcccaacccctcccaaccccatcccaaagcctacagtcctctgctccttctacctccactgtatcctgcatcccagaccctacagattgtgtgattgcttcatctgtatcaccccccgagtcctgtggacctgccttctgtgtagagcaaaacccaggctccctcacagccattctttgcagagatcacccttgcagtgagtgtgagttccttccaggtgtgtgcgcgtacactcaccctctgaattgctgccgctgccaaggaagtgggctccaggtgaaggccagtgccacgtcactctggctggccttcttagtagtttcatttctccggaagctgagccagtctcctggtctagcccaggttgccagaacgcttggcattgcagagtgctagagccagtggagaacttgccaacttgattgttttacagcagaggaaagaggatcacagagggaaaatgattcacccaaagtcacacagcaagttcatggctgagctgagaccaggattaagcttcctgactcccagttcaccatgaaaagggttctggcaacaggttcaagctggagaatccttcaaaatgctacacccacattctctccaactcttcatctccctgatcttccagacaaactacctggatgttgcccttaaaccatttctagctgttaaccctgtccagaaaaatgattgagtgatagctgagaagtggaaagtgtgggatttttggcaggtgctctctttcctccgccccccgcgccattctttctcttcctcctctctgtaatggtatgtccagcctcactctccctccctggtgctgtatgcgttccccctgttagctacatttgtgatcacatacccttcttttaagtgaatttttttcatttgatttgtcaataaacgaatcaaactggagctgatgtccagttctttgtttagcttcagtctcaattgtgggaatgaggagtgtggggcagtcatggggtatggctgctatatgtttcccagataaacttgcagatttgaagaaaagtaccttttccagaccatctgccccaagctcttactgtacagatgaagagaccagggcccagagggtgatatgcttaaggct

SEQ ID NO: 9087 - DNA, 1146 bp, Homo sapiens
ctgggaggaggagggttctgtgtccaccgtgagcctcccggtgcccatggctcctgtcacagggcagctcagtcccgaggagcctccctcctccagcggctccacaatgggaatgcctctcctccgagggtgcccagccctccacctgcaccggaacccccatggcactgtggagaccggggtgactgcggagaccggggagacgtgggggacaggggagacaagcagcagggcatggcacggggtcgggggcctcaatggaaacgaggcgcccgagggggcaacttggtgactggcacacagcgtttcaaggaggccctgcaggatcctttcaccctgtgccttgccaatgtgcctggccagccagacctccgccatattgtcattgacggcagcaacgtggccatggtgtgagtacctggtggggctaagggcctaggagagggaggatatgtcctgaggggctggcattgtagccagggtgccaagcccctcctctggccgaccccctcccactacaggcatggcctccagcactacttctccagccggggcattgccattgctgtgcagtacttctgggaccgtggtcaccgtgacataactgtctttgtgcctcagtggcgcttcagtaaggatgccaaagtcagaggtgagttgggcctggtcttcagtgtcccaggataggctctgtttccactttgaggagaaccctattatgttctttttcaatagagagtcacttcctgcaaaagctgtattccctcagcctgctctccctcacaccctcacgagtcatggatggcaagaggatctcctcctatgatgacaggtacttgctcctctcctggccccaggcttgatattgaaggagccctatggaagactgagggagagagaaaagctcctggtggtttacgctgtttctaagccttggtggtgggtaaggggccagttattcctctgtgtgccttatgattgggtaggtaaacctgccctgcaggtgtgatgagatgaactgtagacaaccatgtttgtctattcatcattcatcaaacaaaatgataccttgtatttatatagtgccttactgtctagaaaatactggtttagtggaaaggtgggaaagctggttacataagtagc

SEQ ID NO: 9088 - DNA, 2021 bp, Homo sapiens
tctccaggatccacaccctagattttaacactgcattctcactataacgtgccctataatggctgcatcccttttgagcaacctccaaaatctacatttacacagtaggtaaattagggatgactgcattatcaaaatactctcagggttcctataaatggcagctctcctgttgtattcaggtgttgtttacagactaacaaatgtgttggcaaatccctggttagatgcacttcctggtgttgagatgaacacgtcgatttttcaccaatcgatgaagccatgctctgcaatgacaatattaatgtgatccgaccctaacattttctctatggaagacgtatgttgcataaagcaaggcacacttctgctttatgtgtgtgtgtatggggatgggaggacttaacggaagttgaaccagttggttctagatgaaccaattatctggaaaatgaaagaaccagagttggaaggcacttgactggccaccagaccaactctgctgttactgacatgctttcttcaccctgattcctagaggtcattgccctggatctgcttgaagtcctcctgtgccagggaatttactatctccagggtagcacattccctgtgtagacggtattaatcagtactccttactttagtgcagcctaaagtatgcttttctgttacatccacctttgaggctggtcatacctccaggaacaatacagagccagtcaacttcctggaatccaagaccagataaagaagtaggacaggtgcccctgggttctgttctgtgtgggcctgtggggagtctctagacaagatcttttccaggccctgacttctgcctccctctgagtggcacagggagttgaatactgcatggcgagtgtaatgatgatggggagggtccttgtgtcctcaccccttcctttttggtgatttacaccactgtaccatactgacccaggctgggggcaggtgtgttggagacaggctggtcaaagaggtgacaatgattaagagataacccagcggtccctgagaagagattggttagtatggcctgaactggtggctgggggaactgtgtctggtcaagttatggcagatgtcacagctttaggtaggtaaaaagggtcctagatgaaaaccttggagtttttttttttcctgatagggttgtttatacttcttgattggtttcttgccattttcactttcagtgatggtgggtgtgcagtagaccaaaagtgtcttctgcccttttgtgctaagggccctggttgactgagtggccccagtcagatgagaggcaagtcctaagcttcttatagacagggatgttgactttgttctgctgcagcctgataaactgggaccactgtgtggttagtaatgcacttgccatttggtgacacagactgaaggctatcctacacctgggccttacctcttcctctactggcatcctaatggcactctgacagcatccagggtgactacagggcccattggaaatggatcatcattctctcttctagtgtctatctttatcataacctgatgtcccaaacttgtgacaagttcttttggcaactgaaggaccaagaagggaaacggtgatgagagagactgctcattgtaactttcaaaaccccgtctttggggaagaatcatctagggtgacattccttgaagtaaatcccaggagaatctaggccaaagagatgagccaaggttagtgagacaatttatttttattgcctaaactgcagagcattctctacacagcgtaaaggagaagtggggcagctgcaggacatgtagagaaaccaaactgggaaatcttacaaggagttgaaaagattaatgtcccaacctgatgagattacggccttgagacaataaggtggagcaacagaacaatgggaaagaggactgggagaggaatctaagaaccagatggcttcagctctctagaggagctgagcctattcacagtgcctaacctggaagcctgtgaggaa

SEQ ID NO: 9089 - DNA, 1855 bp, Homo sapiens
agtgaagtaggaaacaatattttgaaaataagttttaaatttaaaatgatcaaaaagcaatatagttgcataaaagcactgtaaaatatttaaaaggttaaaactgtggaaaattatattggtaagtttacagatcaataaaagcacctgttctccatctgaactagacaatggaaataatgctgcatgctggccatggcccattcttcatcatttgtaagttcaacaaaagttctcacatggagtcccacctcttcagaggtttgtacatttgtttttaagcactgaattcactactgatcccatcgcctggccagtagaacagtcattactccattaacatcctcactgtttagacacataactgtggtacagtgtattggaaattttataaacaaaagtgaaagtgccaacaaattattgatagctgataatgtttcattatctgcaactgcttgataagtatgttgcattttaagagcttataattgtgtataatttgttaacactagaaacctattagtattgtgaatgtagattttactgtgaagctatctgtgatttagctgtttgctcccatgatggagtctttgcagcatggcgctagcagccaatgcagtttctaatactcggtaatttgcatgttttgtggagcatttttatgtcaccaaccagacagtatttcctgcatgcttatttagaagaggcagcttatcttgagaggtagtgttatctacctttgtcaggctttttgacaggtcatttcagagtaagcctttgttcccaagacccaacaactgtcaccctcttctgtacctctcctgagtgccaactgtccaggccatttgacacaccatctgttaacctctgagtttgcccactcaaggccactcataggggcatccatccccaagcacctcctcatgctgtgcatgcagtcttaaattcaatggacaaaaataaaatgctggctacctctggatcatctggctgagcaactgaattacaaaagagaattacttccatctcaacttcaacccattgattacgtccatcctagcaagctaaatggcatcccagctgctcctttctgtgcaaccaattaaagaacaatgagtgtgatgctccatgtctgaatttcgtccagcctctctctgaactgtgatctttgtcctcatgaactttcccttttgttcattgaactatatggactcttcatttcatattgatttactgtgcaatttacttttggacattgagaacttgaaattatttcctgatcccttccccttccactattaataattcatttctgtcaaactgtaagagtagactcatttttttttttttagtttttaacattggactgttatttcatttagagttctctatctctaaatatttatttagagaatgattttaaaagggaatgatatgcttgtttaaatgaaagagaaaagctgtagtaaactgtgttaattggtaatgactatttatcgtcgatactctgtagctgtgtaagttttgacaaatagtgtatctcgtggaatcagtggttagcattgccgctattatatttactcattttatcattataaatgtgcttagttcatcatgtagcatcacttgtctcccgtctcattttttccttgcatgtcacaagtctcagatcatttataatacattaacagtaaataatatctatgtaaatttctttcaccatgctgtctcagagtcagcagtgaacaaaggcaaagattggggccccacttagtttgaaaaagggaaaggaagtgatctaggatgtgtactagaagcatttcaaatgttgggtctttaaaatgttttgttcagt

SEQ ID NO: 9090 - DNA, 1111 bp, Homo sapiens
taatctacaaccaacactcaaaggggagaggagcccacactttcagagcactgaaagaaagcctggctgcaaccttgaggaaatataggggagtcacaggactgagcaagagcctagcaactgatcatgcctaagcgtcacctactggatcacatcccaaagctttaacaccaaaaatacctcaataacagactcccctgtgaaaccaaagaaaataagtcagctacaaataaggactctgcacaaagccttggccctgtgaaaacatccaagaagaagtctacttcctgtactcaatttacgttgtaaataaaggaacacggctccggccgggctgcggggctccgctcagtccgggagcgcccccgggccgcggcgctcctacctctgctttcccaccgcccgcagctgaagcacatcccgcagcccggcgcggactccgatcgccgcagttgccctcgggcgccatgtcgcagaacggagcgcccgggatgcaggaggagagcctgcagggctcctgggtagaattgcactttagcaataatgggaaagggggcagtgttccagcctcggtttctatttataatggtgacatggaaaaaatactgctggacgcacagcatgagtctggacggagtagctccaagagttctcactgtgacagcccacctcgctcacagacaccacaagataccaacagagcttctgaaacagatacccatagcattggagagaaaaacagctcacagtctgaggaagatgatattgagagaaggaaggaagttgaaagcatcttgaagaaaaactcagattggatatgggttggtcaagtcggccggaaaatattccccccaaggagttcctctttaaacacccgaagcgcacggccaccctcagcatgaggaacacgagcgtcatgaagaaagggggcatattctctgcagaatttctgaaagttttctttccatctctgctgctctctcatttgctggccatcggattggggatctatattggaaggcgtctgacaacctccaccagcaccttttgatgaagaactggagtctgacttggttcgttagtggattacttctgagcttgcaacatagct

SEQ ID NO: 9091 - DNA, 1344 bp, Homo sapiens
agggctgtatgcatttcgagtaaatcaaaggcatgtaaatttgattgagtacacaaagtaaatattatgccctaggatacccctgaaaatatttgcttcctgagtacaactttaaacatcaaggttttatgaattttgacttttggtatcataagtattccatttcttttagtagttgtgtttttgacctatttaatggattgttatcatgtaagaaaactacagtttagaaaatacaaatggaaataaagtgaattgggaataggttattaattgcattttatgtgttatatgactaaactattttttaggcgtaagttcctgcctcccttaattttatacgattttgagcacaacgtatgcacccatttgttgaatacaataatgtatatactgtattgctgacaatattacacaggattctcaacataattattagtttctgaaattctgtataagtaagtctcactaccagaaaagttcagatttcgaaggtccagctctctccttggtcatagattgtgagacttaatttttagtgccaaggctccagtctgttgtaggtgaattatgagacagacacaaatgaatttcattttatatatgtgaattacagtgttttccaagttttgctttgcagttcatgagatttttttaaaataatttacatttttaggtcattttgttgggaccatcgacctgttcaaataattacatctaataattatagagagtccttaccatgcaccatttgcttggaatttattgagcctattccaagttataacatattacgaagtccttgttgtaagaacgcttggtttcatagagactgtttacaggtaagatacatattttgtaagctttctctgattgatataaaattatggcttgctgatttaaattttaaattagaaagaattgacgtgtatattacctcttactacttgttacttttaaaacagctttaaagcacttaatttgaagcagattttacatacaaaattcaccctatttaagtatacaattaacattcaataaatacttcagatgaaactttttaatgtatatttatacttaaagaattttgttgtttttacctaaggattttgtttgatttcacaatgaataaactagattttaattcctaagtttcatttacatatttatgctggaaaaccaggatatttgaaatgataagaagcttgatagcaagttaagatatttaaacattagtaggcttttcttcccaatggtaagcactttaccataacttcttaacagggagctgattactgtcaattaattaaaaatattggttctttgagagtcatcttacgtatc

SEQ ID NO: 9092 - DNA, 1100 bp, Homo sapiens
agataagtttaggtgaaaggcattctttctagaaaacattattgtcaccgcatagaacagttttaatcctaataatctatttcatcattttcaatttgaagttaaactaaattattcttcacccactggtcagggctataacaatgatatttatcattgagcattagcagtgtaaaatcattctgcctgatagagtggagaagaatttaacttatagttgaaattttgtttagctagatttttggttttttaccgtttagtctttctgtctgtatttgttatatacaataagtagttgtactaaatgattgtattagtccttctactttgagattcatttatgtactgtttgcctgttactacatctgactttgtgatttagtttgcccaaaacaaatgtgggagtctgtgcctttcagtattccaagtctatttggagaagaatctatgatgatagcaatatataacatggatttacttttgtttcttttactcttttattggtaaattttttcagatggtaaatctacaacaacaatggaagacattcttatttttgcaactggttgcagttccattcctccagctggatttaaacccactccttcaattgagtgtctgcatgtggattttcctgttggaaacaagtgtaataactgtttagcaattcccatcaccaatacatataaagagtttcaagaaaatatggacttcaccataagaaacactctaagactagaaaaggaagaaagttctcattacattggacattaaaatgtttccttgaacaaagagaagcttctttaaaagctgctattgataactctcttttatttcactaaccttttcatcatcactttgaacaaactagttagcttcttgacctaataaaatttatgatatgaatataaaggaatattatagccacttaggctaaaaaaaggttttttttgttaaagcatactagtcaaaattggtgataatttctcattttcttgatatagatacttcataaacctcaatataaatactctcaaaatggttgtatggattttatttaggtatggtagcatggttaataaaagtaaaaactgttttac

SEQ ID NO: 9093 - DNA, 3134 bp, Homo sapiens
atagaaaagctaattggttaaattttgttatataaatcagagtcatatattctgggatttgtgttactatgcatacttttctaggatgtcaccaaattagttgtttaaaatgtttttagattactgatttatattaagatgacccacactgcaattagattatgcctagtgggaagtattatataaaaagcagaattaagctgggcacatgtgcttgtaatctcagttataagggaggctgaggtgggagaatcgagatactcagccagcctggcaatgtagcaaagactccatctcaaaaaaaaaaacagaattgcacaaattttctggaatctatggacattccatgagcttaaacacttttgaggtggataacatttagttgaaaatacctaagaaagtgtgtcttctttaaagccttggctttaatcatgggaaattgttgttgttgttgttgttgtttgtatcctatgtttggtattctgtatgtctgatccataatcattttagatatttgaatgatctctgtggattggtaggtttggccatttgaccattatttattatcaagttggttgtatgctaaggtaagttgacgccatagcattatacagttatcttcattgctcttgaatgatatctgttatataagcaatgtataaataaagtaaaaaggatagaatgaaaaacccattctaatgtcaccactcagagataagtaccgtatttctgtgtatccttctataaactctttacttctgtttcctttattttttaactttaataatgctactaaaagacaatacctaaaagtaactgtactaacaaagtgctaacaatgtgaaaatatatagtcccatagtcatgtccccatatttatactcccacagaagaaaaaattggaaaacaaagtctgatgtccttaatctattaacatatttaaatgatataatggttcagttttccatgaaagtaaatcattatgggaagtaaaatgttttaaccatatttttcttaatacacaaagcaggtgtcagctgttgtattctcacccttcttaagaaaaatcattacattattgatattttttaagtaacagaatagatttgaaagagataatatatctcttaataccaaaggaaaactaaaacataattctagtgtacttttctttgttccctcatgtctttttcaatctgtacactaacatacctagcaaatttgttttactttaacttgaaatatttaagaacattaaacaagacatttctttggctttggttgaatttttttgtctcaccaatagtaattgaaagatcaattatcaaagagtttgaatagctaatataaaccccaaagtcaccatacagtttttattccaaatatgttgataaaaagatatttgtttctttatccaccttatttttattacagctaaaaaccaatacaaaccaataaaacctagttaaagctattttctggtttttagttgcaattaatttcccctagggtagaaattaaagctgattaagtcacacacacatactttgttggggtgggggtggcaggtggagaggcagtgtacttgggttagctacaattaaaaacagtatttcaattcctcatttgacttattttatatatagacagggccttagtgataagatggtgtaaataatttaggatattcatgttttaaagtgaagcataaatatttattttgcaaaatgttttctagtttgaaggatgttccattattaccatttttagattaatctgtatggtcaaggaatatcagagaaacctgtaggttatttattttctgcagtgtcattttgtcaaatggttggtattataattgttcttttcttattaattttataaccagtgcataattcttacattagattttaaaaaagaattatgctataaatctttataaatgtgtacatatatttcttaaatattgcaattgcctaaatgttgtatattttaaggctgttttctcttgctcttaatgttgaggaaaactataaattgatctataatgcatctactgttaatggttttggttagtttgatattcattgtttttaaacactttccaatatggaaactttaacaccttttatacaattctctactattcaagatattctttaaaatatctcaccagaaacttacaattttatactttgtaatttttagtttctgtaatttgaggaagtgactttttttgtttgggttaagtaaaaagcctttgattgattaccagcatgagaattcaccttggtttctattttatgcatttgtaaatttttcccctaattatatggaagctattggaacttttgtattcagtgctaaatactaagtcaaggggagtatattaggtaagttttttcagtgactgtgcctttagcattcagtcattataagaaaatgatcagaacaaaatcattacattataaacatgtaattcttttatatagtgattatcatgtactgcattgttactttaaaataagctattaaactagtttttatggttcaagtaatgcaatacaaagtttcatgcttcaagtaatgcaatacaaaacataacccatttaatgatgaattacttgaatgtatattatctgtggtttaggaaaatttggattgtcttgaagagactcagttttcaagttctgattttgaccattatctcttctaattcataaacatatcccagtacctacactatgccaggtattatgctaggtgatcgtttatatgtcagcctatttcccccccttttaaagactgccagattaaccaaaaagcgtgacatttataacaatgttttataaataaataaatgtgtttatgccactaaaggtaaactgcctatttaaactaagtaattttttgggatttaataagattaagattctgacgaaactgaaagatacaagattcctttactctccacatttgagagatcctataagcaagcagttagtgtctgacacccaggaacctatagaaatgagggaatctgtgttaaaactatgtatcctctaatgtaaaatagcttaccagaataaattatttaagccaaaaatctggactcagataaatggctatagtaa

SEQ ID NO: 9094 - DNA, 2213 bp, Homo sapiens
ttaatcagttctctgttatgttttgtttaggtaaaatgatccattctatggtagctcacttggatgctgttacaagtctagcagtagatcctaatggaatctatttgatgtctggaagtaagtcttaaagtcctgtactgcccacaaactttataaaagattgttactcagtaacaaattttatttgttcttttacaggccatgactgttccatcagattatggaatttagacagcaagacatgtgtgcaagaaataacagctcacagaaagaaattggatgaatcaatttatgatgttgctttccactcgtcaaaagcatatatagctagtgcaggagctgatgctcttgccaaagtatttgtatgaatcaacaaaaacttgcatcgtaacaagatttgcttggacagaaagagggtctgcatcactgccatcagaaaggttactgatatgacactacatgtgatctgcctggtgaaggctatctggggcaggcacaaattggtggaaatcacatcttaatgtcaagctcattaagttaactgtaattactgtattttgtgggacaaagaaaaaaggactccagtatttgtggcctgtactggatgtgaactgagcgtatatctgtttttaggtgtctttaagccaatgtggagtctgatctttcaaaaaagtttttttttttctcttcttcttcttcttttttttttttttttttttttttttggactctgtgtgctgccttaggggttaggaatgtggtgctcttgttgggggaagtgagctccaagagtagctttttttcatctcttagtgatcttctgtttatcggttgaatgccacagattcccttttaaacttattttgctttaaaaaaaaaaaaaaagaaaaagaaaatttaacttaaaatattttagcattagttgcacaaaatgtttggataaaattctagtttttataagtctttttatatatttagcctgtcacaacagtgctcaagattgtattgaagtttttctgcattatacaaccctaaaacacagagatctcactgacccgttgccctgtaaccactttctttccttcttttgcctaatacagctcagctaagtccttccataaagatgctaaataactttcatcatcacataaatgtcttcataaaccaaggactattaagtgtattaaaatgaaacagtggggtttagtactccaaatgaactcttaaagaaaaaaactaatcttggcatcctatcactatgtgatattttgtacatcttactgtatttacaagtttatttatcaaggattatccatcttgctaatggcctattatttatttcactttttgttggtctttatatccttttattaatgtgctaaaggaacctgtatatctattttggaactctttgaatagtctaaaatagactaaaaatggagtattttatagtttaaattacaaaccaaggtggttccccctaagatatatatcttggtttaccatgattccaaacaaaactaacttgtttaaaaatatttggagtaaagttttatttgcattacaaataggatacaaaaatagttgaatcaggatacagaaatctgctgtgttttgactagttatccctgttttatttttttagatgtgcttaattttatggtgtaactaaagattttgtttgtgtaatgcatgattaagacaataaagtattttttctagtcttccgagaaacttttctgatcagtttgcgagttttgatgagttttgtaaggtttttgttttacaaactatgaatcagcaaatttttaagattgtaccacatagcaaacatacagctgttgaaaaataatgtatataaaatgcatataataaatattaaattgtgtacctgtatgttactgttggctacatcattttgtgttgaataataaagtgcaatactttattctccataattaaactaggaaatggagatttcttagtgagtccttcatttttatgctgttctttcaaactttgtcctacttattgatattctaataagagtagatcactaacactattaataatgtctaagtatttcaccccacttgaagattaagaaaaagtcttgcattaaattatgcaattcaaaataacccccagaaatgcacaggtgcagttttaagtaatttgcttagacatcctgttacattattaaatctgaattt

SEQ ID NO: 9095 - DNA, 1225 bp, Homo sapiens
ctttagttcagactttcagaaagtaccttaacttgctgcctttaataatttcacatgctaatacgttttctaaatgacaactttactgttaatactgtaccgttggatatttgtaataacttatgtaattatttttcatgtaaagtattgcagcaatggtagttattttgttctcatctgacatttaatgggagctttgggtttagcttaataggtaaaaacagattaaggaactcttcatttgacctaggctatttgtaaggcgaatgaaattattctgagttattattaaatgataaagtttttttagaaagttttaaaggtacattaaatttccactggacattttagccaacagttttaaatatatgtgttaaacacaccaaaaagaaacgaacaaacactccacatgccttccagtttactacttttaccactaaatattgtgctctttccttttagttgcctgctaataaagatgcctttcgaaagacatggaatcccaagtatacactacgtagccattttgatggagtacgggcattagcttttcatcctgtagaacctgtgctggttactgcttctgaggaccataccctgaaactttggaacctgcaaaaaacagttcctgccaaaaagcaagtattttagtgttagcctggtgtatttcttccaattttgctaatataagtaattattcctcattattgttgcatgtctttaatgcacacatttgatctaatgactatttaatatcaaccagtgattcatagttatttaattgccttctcttcccctaccctttttccccctcttttaggagtgcctctttagatgtagagcctatctacacatttagggcccacatgtaagttttactgaattggtatttaattaacatcatcattattgttaaatattatttatcggtcctcaaaccttgtaattttctcaatgttttgtattagaaaagatgtattacttgaataatagctatttaataattgtattggtgagactatgaatataatagtaccattcaggccagatgcagtagttcatgcctgtaatctgaggattttcggaggctgaggcgggcagatcacttgaggtcaggagttcgagaccagcctggccaacatggtgaaactccgtctctaccacaaaatacaaaaattagctgggcatgttggcgtgcgcttgtagtctcagcaactcagtaggc

SEQ ID NO: 9096 - DNA, 1170 bp, Homo sapiens
gatcctaggttaagttccttagtttagatatggtgaaagattgaaaatcacaggactggaggagtgctatgagatcttagatcctagaaggagaattagtgtgttcatcaatctctagttaacaaccccaggtttaaacttagtatgtctgtgtgctaagatgcagttctactcattctttactgctccttggaaattaaaaaatgtgtgtgtgttgtgtttgtgtgtgtgtgtgtaaattaaaaacaatgtgtggttgtgtgtatggaaatttaaaaatgtgtgtgtgtgtgtatataatcctaaaagcattttaagacactagggcttcttgggttttgagataattggctcttaatcagtgttaaccatactatatgctttttaatttaaattttggtttgtatttggtattgttctcttagaactggaactagtctgtagagaagaaagatactgagacaaagggagagcatattttataggattatgggtttttctaaaatttgatgtgattttgagtctggcacatgttaacagtatgtggattttaatatttattttctcttacaggtatcttcaggaagtaggttatacagatacaatattagatgtacggtctcagcgggtaaggtcattacttggactatctaattcagaaccaaatggatcagtagaaacaaagaatttagaacagatcctgaatggaggtgaatctcctaagcaaaagggacaagaaataaaaaggtatgatttatacttaacatagtttatataatggatattatggatattgttattgttaatctctttagctccttgttactgccattaagaacttttttttttttttttttgacacggagtcttgctcttgtcgcccaagctggagtgcaatggtacgatctcggctcactgcaacctccgcctcccaggctcaagcaattctcctgcctcagcctcccaagtagctgggattacaggcacccaccaccactcctggctaattttttgtatttttagtagacacggggtttcaccacgttggccaggctggttgcgaactcctgacctcaggtgatccacctgccttggcctcccaaagtgctgggattacaggcgtgagccagcgtgcccaactgctattaacaatttttaaagcagatcgag

SEQ ID NO: 9097 - DNA, 1136 bp, Homo sapiens
tcgaaggcaagagattataagaaggaaggagataaaaatgatgcaagttgttttgaacttccttatgtgctagataatatggataacatgaaagatgccacatacattattccgtagtaaataggcattatcttaagtagtcattgtttttaagtaacctaccaggtcacatatctaagccccgtttttcactgattgacttaattctgtttttcctcgtaagatcttttacatgttgtaaaggtttgtttttttggttattgttttttaaatagccccacatggttatccatttatattatgattttgtaattcaggtttagtttatggttgtcctttatcacttgtttttgtcatgcttgtgtctgtgctcatcttgtatgtggtggcagaacgcaacagttgtcccttttgaattttacttttgttttgtaaaaacctaaaatgcaaagttcctttgttatgctttcttaattgtgttgacataaggttgtgggttttgttttcaagatttccttgatagctgccgtgccagtactctattggctgagctcgatgatgatgaggacttacctgagccagatgaagaagatgatgagaatgaagatgacaatcaggaggaccaagaatacgaggaggttatggtagagagagtaccccattctctttacaaagataggatgttaataattgaaatgaagaaaggaaaagctaagtcataatcaaactttgaagcaaggaaatgtggcaccagtataaaaaatgtagttaattaagaaaagcagttttaatctgagcatttatgattctccacttaaagaaaataagttgcttatatttgaaaaattttagaatgtcacatgatgttttaacaggcttaaaagggtgtgaaattaggctgggtatagggctcatgccctgtagtcccacactttgacatttgtagtcctggctacttgggaggctgaggtaaaaaatcacttgggtccaggagttgcaggctgcagtgagctataattgcatcactgcactccagcctgagccacagaatgacacaaacacacacacacgtacacacgtgtatgaacttagtgcagtggctcgtgctgccatgagctataattgcatcactgcac

SEQ ID NO: 9098 - DNA, 1194 bp, Homo sapiens
ggcagaggttgcagtaaaccgagatcactccactgcactctagcctgggcaacaggaacaagactcccatctcaaaaaaaaaaaaaaaaaaaaaaaaaggccgggtgtggtggctcacgcctgtaatcccagcactttgagaggccaagaagggtggatcacgaggtcaggagatcaagaccatcctggctaacaaggtgaaaccccgtctctactaaaaaatacaaaaaattagccgggcgtggtggtgggcgcctgtagtcccagctactcaggaggctgaggcaggagaatggcatgaacccgggaggtgaagcttgcagtgaaccgagatcgcgccactgcactccagcctgggcaacagagtgagactccgtctcagaaaaaaagaaaaaaaaaaagaatctttgatagaaaacagacatttgttcatagttctattatgtttatagttaataaatccaaatctcagttgttttagggtatatcattttttacaattctgagacagaaaccaagacgttttccagagtattttgatcgtttttgtgtagatacttacaaggagattacgatttcggttggaacgtgcacctggtgaaactgcattgattgacaggactggcagaatgttgaagatggaacctttggctacagttgaatctctggaacagtaccttttgaaaatggtgagtttctggcaagggcacggtgaaataagcattctgagctgtggtttagccttttaggacaataatttgggaagtatatatccagagttatggtaatacagtttggcccagtaattccattttagaactgatttctacatgaagatgtttattataattttgtaatattgaaatagtaaacaaaaaccttaattccaatcaataaattaatgttaaatagataattcatattaaaaatttaaatttaattgacaaatgtgtgtgataattatttctattaatttgagtatcatatagccataaaaatgtataaagactaatgataacagaaaaatgtttttgtacagtatgatcaagaatttgttttatcctatccattgaaataataaactaaagaaatactctgtgattattaatagtgaggtgctttggttgtgggactttttatttttctttatatttttaaatgagcatttgttttttgtttttgttgttgttgttg

SEQ ID NO: 9099 - DNA, 1235 bp, Homo sapiens
taagacagtatttataatcttatctgtaaatccttattgaattagcatactttagaaaataaaacttggcttttaatgactttttattgttcagatgttattttcagttgatatcatagattatcatgacaaaggtacacataataatagttaatatttttgagcttttattatccatctagattctttatatgtgttacctcatttaagctaacacaatgagatataggtaccattaatatccccattttacaaatgagggaactgaggccttaagcagtttaagtaacttcctcggattacacagttagcagtatatggagccacgattcaataggcagatcacatgcttaatcactttgctgcagttgcctttcttatagtgtcagtattgaaatgatcattactaaccctttttaggtggattttatctgtgggcattttcttcacattgttaggtttcagatggagctctgcgatgctttgcatcactggctgaccgatttacccgtcgtggtgttgacccagctccattagccaagcatggattaactgaggagctgttatctcgaatggctgctgctggtggtactgtttcaggaccatcatcagcatgcaaaccaggtcgcagcaccacaggagctccatccaccactgcagattccaaattgagtaatcaggtgtcaacaattgtaagtctgctctcaacactttgcagaggctctccggtagtaacacatgtaagaatgtttttgaatctttgctttttaatcttcagaaaaagtgtttttgtataatgctaatatattaaacatctttcttcccattctctttctaggatcttctgaggtcggagcttccagattcaattgaaagtgcattgcagggtgatgaaagatgtgtgcttgatactatgcgtttggttgaccttctcttggtgctattatttgaaggacgaaaagctttgccaaagtctagtgctggatctacaggcagaatcccaggactccggagattagatagttctggggagcgctcacatcggcagcttatagattgtattcgaagtaaagataccgatgcacttatagatgcaattgacacaggaggtcagaaaatatttttttaaatataaaaagaaagttgtgagataaccatataggcagtttctagttttcggacagtactcttagaaatccagataacaaagtggcaccccttcgatattctcccct

SEQ ID NO: 9100 - DNA, 1435 bp, Homo sapiens
tgctttggcccggcacagtggctcatccctgtaattccagcactttggaaggccaaggcgggcggatcacgaagtcgggagtttgagaccagcctgaccaacatggtgaaaccccgtctctactaaaaatacaaaaattagccgggtgtggtggcacacacctgtaatcccagctactcaggaggccgaggcaggaaaatcgcttgaacctggcaggcagaggttgcagtgagccaagattgtgccactgcactccagcctgggcgacagagtgagactccatctaaaaaaaaaaaaaaaaaattctgccttattcagtaattgtattaaactttctctgatttctccaagaagataaaatgattggagagctatttaggaaacctggtctaggattatccagtatacaatagtacaaattacttacagccttacagtgcaacataagatttggtgtctatatcatggttttccaccatcttttggtttagtttatattgggttcagaaattgagtcttactcattttaaatagaataagccatttccactatttttcaaatggatttttctgtttacctctgttcttaccaattttgttcattttcatttgtggcaaacatttgtatcaatgagttttaacctaggttcatatctacattgtatttagatcaactatgggtttatataaatgccaaatttagtacaacaaatttaggtcatcaggtgaatacaagtattttttttaacaggaaacattttattatagaaaaaagattaatgataaagtcatattggttgaaaaatattttttaactgtgttcatgattgttgattctccttctacttcagtgttatactgtgtgaatcaagcactgtgtcaaaacagagcatttccctcttaaaaattacaaaccgaagtgatagaagcatgtcagaattgagaagacattttgaagcaagaacaatgtgatgtacctattttattatgtttgtatataaatactattgtaaattgttcagagtgaaaacatttgacaaactctaacactacaatcattttttctaaattacataaataaagctaattttcattatcattcttgtatttttaaattattttaccaacaaaagatggcaggttggtttctctcacatggattccagaaaatcagccttttttctcagaagagccctttctttggagcattatttgtgatggtttagattctctgtctcttcctaagtgtctctaggcattgagtgtatatttattgttccctttacctaaaatgtccttttctctcctgtcttctgtctggtgattgcccactccttttaggcctggcttaaatatcacctttccttggtaactctccttaacacttcttaacttcctcttacaccaatttaactgcttcctcatctgtgtttcc

SEQ ID NO: 9101 - DNA, 1155 bp, Homo sapiens
ttttggattttagagttgtagataaagggatagtgcatgttatacactgtgttgcttactttaacattctataatccatattaaatctatttgtgtacactttttatagagctttagtgatacatttgaatgaaaatatattcagtatttcagttaagagatggctacctgtagctgtatgttaagatggattattaggccataccaggcttagtgagaaagagtgccgtgatataatattatgattgtaaatgtgagaagtggcatcatatttaccagatatttgttatccctaatgcatctcattgaagatagtatttttgactctttctaccccagttttctgtgtgtagttacacagacaggccttcttgatatcacagtgcatttcaagtccagtatgctcaaaggtaagtctgcctcttcaggaagatataaaaattttatagcaccttttcagcagataaaagattttcctgtttttaaattaacctttaacaggtctacataattgctgtgcaaagacataaaaaccacagacaacctttgaagactaccacctgtttagaagacggtatcagaaatggatcatgttcatcagatggactgcttgacttagtctatgcagatcttggcacactaagcagactctggcttgctgcacttcaggattttgctcttttaactttgccttcagaatttgcctcccaacttcctgctgaaggtaaggagataaaatacttagataattcctagagtgacagtaacacattttcttttctttttttttgtttttgacagggtcttactttgtttcccaggctggagtgccatggtgcaattttggctcactgcaacctctgcctcctgggctcaggcgatcctcccacctcagcctcccaagtagcaaggactacaggcacacaccaccacgcctagctaatttttgtatcttttgtagagatggggttttgccttgttgccaggctgttctcaaacttctgtaatcccagcagttcgggaagctgaggcaggcagatcacttgaggtcctgagttcgagaccagcatggccaacatggtgaaaccccatttctactaaaaacacaaaagttagccaagtgttgtggtgagtgcctgtaatccctgcaactcg

SEQ ID NO: 9102 - DNA, 1220 bp, Homo sapiens
gtgtatgtctgtgtttatgtgtctatatttttttggtatatagttgaaattggtttaatagtttcttttgtgagaaagtttaattaaagcaacatttaataaggttttattaatattgcttcataacagagtagacaccagtgtactcttaaaggttttataatctgataaggacaaaaggaagacaaatgttttaaaatgatgagatatattcagtgtcaaatatagtagtaaatctgcccaagatgagtagcttttattccagagtaaagcagtattgttttaagtagagcattttcatgaacataattatatttgattctcacagaaacctgtaatgcaatccacatagtatttatcagttttacagtctttattgattctcccctaatatccttgccacatttcatcagcaagcaaatatcccttttcctatctctacaatatttttccagtatgttcccattgttctatttccactgttcctattttaattaaggcacgtgctacttttgggtcattcattcatttatacctcaaacaattatagagtgcctactctgtcccaagtgctgtgttagttctgaagatacaaaaatgaatgagacacagaatccctgcctttgaggaactcatagactagcatcccactgcaatgaccttttacctgcccgtacttagttaaatccttccagtacatgatgccagacttctctcactattgaaatcacatactcccttgctcagagtcatagctggatgcttttgctgatattcaatatcctctgccatctggcttcaatctacctttctgggtttatctttagctattcttctaaatggcttctatgctctagctaatctgggttacttgccaaagccagtctaggctggatatactattcttgatagcttacagttattcttctacttgtctactggaatgtttgtgttacctttcaccagctttatgtgtcctatctttcaggcttccttatatggctgtgctggttatatcctgcacaaggatgcttgttgaggggattgagtgatgatagaaattcaggctaccctcctcttgatgtgcacctcttgttctgttgtttatgatctgtcaaaaaaaaaaaaaagatgtgcacccatgggctgctttgtaattcacacaaaggcactgtgtgagctagccttgctcagaagggcagctcagcagctcattgaag

SEQ ID NO: 9103 - DNA, 2104 bp, Homo sapiens
taattagaggtaaaatgcacatttggtttaatagaggtttattttaaagtttgtgagacattatgttagattttgtattttgttaggtttgccttaaattttgaggtcatcttgtatttataacagtaaatcataaactgtttatgtagttacctcttaaaatacatgtatcattattattaatttgtatggtgctttgttgtaaacatctttattgtaattcagtgtatgtaatttgtgattaagatttgttctttttctcccctctctataggaagatgatccctatgatcttgaagatgtttctgcacagaaatgagggaaatacaaagaaccaaatacagttctgaaatttgggatctgtattttgagatgattttattttcagaatgagaagcatatctggttacctttatgaatgtagagacatgagaagagagttatgatggcaaaaaacaaagagcctcgtcccccatcctataccatcagtatagttggactctctgggactgaaaaagacaaaggtaactgtggagttggaaagtcttgtttgtgcaatagatttgtacgctcaaaagcagatgaatattatccagagcatacttctgtgcttagcaccattgactttggaggacgagtagtaaacaatgatcactttttgtactggggtgacataatacaaaatagtgaagatggagtagaatgcaaaattcatgtcattgaacaaacagagttcattgatgaccagactttcttgcctcatcggagtacgaatttgcaaccatatataaaacgtgcagctgcatctaaattgcagtcagcagaaaaactaatgtacatttgcactgatcagctaggcttagaacaagactttgaacagaagcaaatgcctgaagggaagctcaacgtagatggatttttattatgcattgatgtaagtcaaggatgcaataggaagtttgatgatcaacttaaatttgtgaataacctttttgtccagttatcaaaatcaaaaaaacctgtaataatagcagcaactaaatgtgatgaatgcgtggatcattatcttagagaagttcaggcatttgcttcaaataaaaagaaccttcttgtagtggaaacatcagcacgatttaatgtcaacattgaaacatgttttactgcactggtacaaatgttggataaaactcgtagcaagcctaaaattattccctatttggatgcttataaaacacagagacaacttgttgtcacagcaacagataagtttgaaaaacttgtgcagactgtgagagattatcatgcaacttggaaaactgttagtaataaattaaaaaatcatcctgattatgaagaatacatcaacttagagggaacaagaaaggccagaaatacattctcaaaacatatagaacaacttaaacaggaacatataagaaaaaggagagaagagtatataaatactttaccaagagcttttaacactcttttgccaaatctagaagagattgaacatttgaattggtcagaagctttgaagttaatggaaaagagagcagatttccagttatgttttgtggtgctagaaaaaactccttgggatgaaactgaccatatagacaaaattaatgataggcggattccatttgacctcctgagcactttagaagctgaaaaagtctatcagaaccatgtacagcatctgatatccgagaagaggagggtggaaatgaaggaaaaattcaaaaagactttggaaaaaattcaattcatttcaccagggcagccatgggaggaagttatgtgctttgttatggaggatgaagcctacaaatatatcactgaggctgatagcaaagaggtatatggtaggcatcagcgagaaatagttgaaaaagccaaagaagagtttcaagaaatgctttttgagcattctgaacttttttatgatttagatcttaatgcaacacctagttcagataaaatgagtgaaattcatacagttctgagtgaagaacctagatataaagctttacagaaacttgcacctgatagggaatcccttctacttaagcatataggatttgtttatcatcccactaaa

SEQ ID NO: 9104 - DNA, 2392 bp, Homo sapiens
cctttttattttagggaaggatggccttgcccaagaactagcaaatgagataaggacacaatccactgatgatgagtatgccttagatggaaaaatttatgaacttgatcttcggccggttgatgccaaatcgccttactttttgagtcagttatggactgccgcctttaaaccacatgggtgcttctgtgtatttaattccattgagtcattgagttttattggggaatttattgggaaaataagaactgaagcttctcagatcagaaaagataaatacatggctaatcttccatttacattaattctggctaatcagagagattccattagtaagaatctaccaattctcaggcaccaagggcagcagttggcaaacaagttgcaatgtccttttgtagatgtacctgctggtacatatcctcgtaaatttaatgaaacccaaataaagcaagctctcagaggagtattggaatcagttaaacacaatttggatgtggtgagcccaattcctgccaataaggacttatcagaagctgacttgagaattgtcatgtgcgccatgtgtggagatccatttagtgtggatcttattctttcacccttccttgattctcattcttgcagtgctgctcaagctggacagaataattccctaatgcttgataaaatcattggtgaaaaaaggaggcgaatacagatcacaatattatcataccactcttcaattggagtaagaaaagatgaactagttcatgggtatatattagtttactctgcaaaacggaaagcttcgatgggaatgcttcgagcatttctatcagaagttcaagacaccattcctgtacagctggtggcagttactgacagccaagcagatttttttgaaaatgaggctatcaaagagttaatgactgaaggagaacacattgcaactgagatcactgctaaatttacagcactgtattctttatctcagtatcatcggcaaactgaggtctttactctgttttttagtgatgttctagagaaaaaaaatatgatagaaaattcttatttgtctgataatacaagggaatcaacccatcaaagtgaagatgtttttctaccatctcccagagactgttttccctataataactaccctgattcagatgatgacacagaagcaccacctccttatagtccaattggggatgatgtacagttgcttccaacacctagtgaccgttccagatatagattagatttggaaggaaatgagtatcctattcatagtaccccaaactgtcatgaccatgaacgcaaccataaagtgcctccacctattaaacctaaaccagttgtacctaagacaaatgtgaaaaaactcgatccaaaccttttaaaaacaattgaagctggtattggtaaaaatccaagaaagcagacttcccgggtgcctttggcacatcctgaagatatggatccttcagataactatgcggaacccattgatacaattttcaaacagaagggctattctgatgagatttatgttgtcccagatgatagtcaaaatcgtattaaaattcgaaactcatttgtaaataacacccaaggagatgaagaaaatgggttttctgatagaacctcaaaaagtcatggggaacggaggccttcaaaatacaaatataaatctaaaaccttgtttagtaaagccaagtcatactatagaagaacacattcagatgccagtgatgatgaggctttcaccacttctaaaacaaaaagaaaaggaagacatcgtggaagtgaagaagatccacttctttctcctgttgaaacttggaaaggtggtattgataatcctgcaatcacttctgaccaggagttagatgataagaagatgaagaagaaaacccacaaagtgaaagaagataaaaaggtaaggttaacttaaggtcagtgatgtttataaaaatgcttgttgttacttttttaaaatactgacatcagtgttagaatttagtctcattcattccatacataataattagtagccctttttaattttctgagtattctgtggggataagtgattttttgttatttttgtgctttattggggtagagtttgatttcatattcttcagcataaaaattcttggtgaatgtgttttttctttttacagaaacccagatatgaagtgattttgttcttaatttttccatttgtaatcatcctatttttctgtttttcccttctgccctaccagttttgcggtattaatttgacatacctgtctcactcaaggatattaataatacaataaaattgtaacagtttacagtcttggatatttattaacttttccaggaagcttctttgcagatggtggtatactacctg

SEQ ID NO: 9105 - DNA, 1186 bp, Homo sapiens
cttgttgcccaggctggagtgcaatggcgcgatctcggctcaccacaacccccacctcccaggttcaagcgattctcctgcctcagcctcccaagtagctggaattacaggctttgtcactacgcctggctaattttgtatttttagtagagatggggtttctccatgttggtcctgctggtgtcgaactcccaacctcaggtgatccgcctgcctcagcctcccaaagtgctgcgattacaggcgtgagccactgcacctggcccaggaaaagttttttacatacgaattaaagatgcttctttatgcaaatttttaaaccccaggtttgaagtaggataaaaggtaacattaaatctgagatcatttctagctctggaattctgtgattgtaatgagttttgatttctaaatgttttttcctttcataatttcagggttagtcagcaacataaaatcaacctaatgacagcagacaacttatccatctgtttttggccaaccttgatgagacctgattttgaaaatcgagagtttctgtctactactaagattcatcaatctgttgttgaaacattcattcagcagtgtcagtttttcttttacaatggagaaattgtagaaacgacaaacattgtggctcctccaccaccttcaaacccaggacagttggtggaaccaatggtgccacttcagttgccgccaccattgcaacctcagctgatacaaccacaattacaaacggatcctcttggtattatatgagtaggaagtgattgcaaacaggctggatttggacaaaaagcaaatctagacatgcatgtttcagggttcagtagtatacttcatgtttcatacagataattcacattcaaaattacattttctctttgaactagatggtattccttattcacttacattacaaatctaagaccatgtgataagcatgactggagaggtttaatttttataaacaaaaatagctataaagtacaaagctgctgctgcatgcaaccttattgcaatcagtatatcattcctgtggcaatttctgtcaccttatattgtgaataaaatttttctatagaaattaaatgatttaaaaactcacctatatgaaacatttaatgcttttcagcctgctttctggctgattttgttatttgatgtgctaatttgggca

SEQ ID NO: 9106 - DNA, 1603 bp, Homo sapiens
caccatttttaagccaattttttcctttgatgttggtaccagaattactataagtgactgctgcttttgggggtaaacattttgttagtgaagataaaaccagaacactaaattatggataaaattttcagaataggtggcacaggtaaatttcactaggttatattttgtgtagtaaagaaaaaaattatttggtcaatgttatcttaattcatactacaatttaagattatcttatgtgtattatagtaaatagatgattttcagattcaaggctcctaagagtttgatttgctctgttttttcctaaaataaatattgtctctcccaactgttaagttctaggtattgtacttccaattttaacttcagaaccaagatgttggcatgaaccaggctgctgttgaagtacatgtatattataaattatcttatttgtgttatactcttacatgttatcttttctaagaaaacaaagtccctattattcctattgcaaagcacacaggaattaagaaagtacagtaatttttaaaaaaaaatccggtaaatgtagtattcttaacctgttctatattacttatacctattgtctatatagctttaatttatagttgtcagtttaactattggcatgtctggcaaagaaaattaaactttaagagttttataaactgtttctaggttgctaaagaatttatttttctactatatatggtatagacaaagcatcaaactatgtacaggaaaaaagcctgactatttctatttggaagtaggctgaaaagagaattttcaaaactgttcgtgtcttcagttcattctgtcataactttgctattgtaatatgtgaataccagtttatttaagctgttctcttttatactgtattaatttaatgttcatctgcgtttagtaccatttttgttattaaaactggcatttaccgtttttcacattaacccaccttgcaccttcccccaaacttatctccacttttctatgcattctatcattgatttgacacacttcatagtgagtcatttaaatactctacgtttggttcaattaaccagtaggttacagttattgaaaattaaagtacagtttaaagctcagtctgttacactgaattgattgtgtttgtttttgccaagggtttagatatgcttttaaatattagaaacatctaagaacagaataacataattaaacttttttctggtaagttactggaaggtttcactgtttagggacctatcatatgagacttcttaaaggattaaaagaataggatagtctcataattgtgagtaaacatcaaggcattatattttacaatactgaataaaatttcatctacacacatgttgccattgtttcatttaaggttcagtgcttatagttaactacaatattggacctaacaggatctagattagcaatataaagaagcatagtggtactctgtttcacactttcagtagatttattagaagtcaaattctattcaacagacacttattaggatatacaactaatttaagaataaaattccaggcacaatatattttttttaaatggtatttgttagtagtgcttc

SEQ ID NO: 9107 - DNA, 1230 bp, Homo sapiens
ttcttaatccagggctgttggggtttctggagaattatcacaacctaatgacattaatacctctagaaagggctgctgtcatagtgaacaatttataagtgtcccatggggcagacactccttttttcccagtcctgcaacctggattttctgcctcagccccattttgctgaaaataatgactttctgaataaagatggcaacacaattttttctccattttcagttcttacctgggaacctaattccccagaagctaaaaaactagacattagttgttttggttgctttgttggaatggaatttaaatttaaatgaaaggaaaaatatatccctggtagttttgtgttaaccactgataactgtggaaagagctaggtctactgatatacaataaacatgtgtgcatcttgaacaatttgagaggggaggtggagttggaaatgtgggtgttcctgttttttttttttttttttttttagttttcctttttaatgagctcaccctttaacacaaaaaaagcaaggtgatgtattttaaaaaaggaagtggaaataaaaaaatctcaaagctatttgagttctcgtctgtccctagcagtctttcttcagctcacttggctctctagatccactgtggttggcagtatgaccagaatcatggaatttgctagaactgtggaagcttctactcctgcagtaagcacagatcgcactgcctcaataacttggtattgagcacgtattttgcaaaagctacttttcctagttttcagtattactttcatgttttaaaaatccctttaatttcttgcttgaaaatcccatgaacattaaagagccagaaatattttcctttgttatgtacggatatatatatatatagtcttccaagatagaagtttactttttcctcttctggttttggaaaatttccagataagacatgtcaccattaattctcaacgactgctctattttgttgtacggtaatagttatcaccttctaaattactatgtaatttattcacttattatgtttattgtcttgtatcctttctctggagtgtaagcacaatgaagacaggaattttgtatatttttaaccaatgcaacatactctcagcacctaaaatagtgccgggaacatagtaagggctcagtaaatacttgttgaataaactcagtctcctacattagcattctaatggtttgattaatatattccatc

SEQ ID NO: 9108 - DNA, 1593 bp, Homo sapiens
agatttagttttgaataaattaataataataagtttccttaactacaactcagattccatgctggtttccattgtggggatggcactatacacaggatacgtcttcatgccccagcacatcatggcgatattgcactactttgaaatcgtacaatgaccaagatgcgaccaggatcagaggttccttggggaagacccaccctacgaagttggaatgagaccatcagatgtgataagaaactcttctagatgtcaacataaccaaccttataaagactaaaattcatgagtagaacaggaaaatcatcctgactcatgtgttgtgttctttatttttaattttcaaagaggctcttgtatagcagtttttgtctattttaacattgtagtcatttgtactttgatatcagtattttcttaacctttgtgactgtttcaatattacccccgtgaaagcttttcttaatgtaactttgagtacattttaattgccttctatttttaaaactcaaaatcattagttgggctttactgttcttgctattgtatggcatatacatctgcctggatatatttctactcttgaccaaagttttgtaaagaacaatataagatttcgggtaggggtatggggagggaagatattttattgagaactacttaacaaaagatttatctgtaagcttgaactcaggagtacagttttagctatctagactctaacagcttttgctttaaaattattaaagtgtttcttaatgaaaaagaaaagatcttgctaaagttaaaataaggaacatttcaccttttaaatatttaattcttatgtggacttatttccagaaaactttggtgataattcttgagacaaaaggtggttaagtagcattattatgtaatgcttatataccatagagtttttaatagaagagaaatccatttcctccgagggtcactattaacaatgtacttccttaaatttagtttaatgattgtaatgggtgctgcatttgcacattgcattaagttatgatgagacgaattgttgttaaaaattatagcaaaaagaaatgtaaacttggttaaaatcctttcactctttgtattgttttttttaaggtttttattccttaaatgtaaaatgactacctaattttttgatgtaaatacattaaattcaaagagaaaaaaaatcagctgatgtagcagtatatcttttccttgatggttaaatattgatctagtatttatattgctgaattattttctgtggaggaccagataagcagtaagtatgtcttatcctatatgttttgcaacataaaaatattgctaattgaaaagaattaggcaattatgtgtgttgctgggttgtttttttgtttttttttttttgagacggagtcttgccctgtcgcccaggatggagtgcaacagcatgatctcggttcactgcaacctccatctcctgggatcaagtgattctcctgcctcagcctcctgaatagctgggattacaggcacctgccaccatgcctggctaattttttgtatctgtagtagagacggggtttcactgtgttggccaggatg

SEQ ID NO: 9109 - DNA, 1205 bp, Homo sapiens
agacacataagccacactccgccttcctgttaaaaagggctgccttccttcaaattttatttttgttttcttaatgatgttaagcatttatgctcactggaaacaaacaaaaagcagctgaaaaagtgcatcaactcctctttttctgagaaacatggagcagcgcacgcccaggcgatgccagtctgtgtgccgtgatgccgcactgtgttccccatgacagtggtccatcatcgtgcactcgtcatactcagaagtccaaagttcattcttctttaaagtagcctctataactctgtttattttataaatagtattccttatggctgccactcttatttacctttaaataatttctgaaatttaaccttttcagaatgcattgttgaaacaagataaagattgccttttttgaattttttaaattttgtttttaaaagcatataccaccttagttcattcatgtatcctggtaaagcatcttaatcagacttatttttaattactgaatatttcttagacgttttgggacagattttatgtaatctttataagtatgatttctgaagaaaagcaaatgcattagtatgtttgccttaaacttgtagactaaaccaagtattgtaaaataaacagcgataacagtgatagtttttaactctatggtcattgtatcactctggaaaatgtggagtagctgtaataaatctactcctgtattatgctttacagtgcaggtcttagtttttcttttttctcatttcttttgaaatggcatctcgaacaaagtccaccaatccctttacaaaagaatgaactgctcctctgtgtgtacttcatagaaggtggaatcggacagaggcaggttagtgacagttattcctgaaatacaggagcagagtacagtctgttgtggtttcccggattccgcgcctagctcagccaattaagcatgagacataggccattgagccacttagtagttatgcgagtggatagattggtatgtagagggaaagaggtctgctgtaaagaacaacacttgtttgtctgtggggaaagaaaagcagaatacttgagatgaaagttggcatacaaataggatactatcgccagtagttatattacaaacattatcggcctttctagtgtgaatgaacattagacacattattgtcattcctagtttaaagttaaggttgcgt

SEQ ID NO: 9110 - DNA, 1212 bp, Homo sapiens
gaagctaggcacaaaaatcacactattccatttttatgaaatgtccagaataggtgaatccccatctctactaaaagtacaaaaattagccaggcttggtggcacacgcctgtagtcccagctactcaggaggctgaggcaggagaatcacttgaaccgggaggtggaggttgtagtgagccgagttcacaccaccgcactccagcctaagcaacagagtgagactccatctcaaaacaaaaaacaaaaaaaaaaaacatgtccagaataggcaaatctgtagtaggcagcaaattagcagtcgtctagggatatgggcacacatggggaaatggcaagtggctgttaatgggcatggggtttctttttgggtgatgaaagtgttctaaaatcgattatggtgatcctcagttctgtgagcttgctaaaaaccattgaattacatattttaaattgtgagttatgtggtacatggactatcaagctgttacttaaaaaaacggactgagccctttcccctggctggcagtgcacaggccgggccgcatgatgcctggagttactgtaaaagatgtgaaccagcaggagttcatcagagctctggcagccttcctcagaaagtctgggaagctgaaagtccccgaatgggtggacaccgtcaagctgctggccaagcacaaagagcttgctccctacgatgagaactggttgtacacgcgagctgcttccacagcgtggcacctgtacctctggggtggcgctggggttggctccatgaccaagatctatgggggatgtcagagaagtggcggcatgcctggccactttagccgaggctccaagaatgtggcccaccgggtcctccaagccctggaggggctaaaaatggtggaaaaggaccaagatgggggccgcaaactgacacgtcagggacagagagatctggacagaatcgctggacaggtggcagttgccaacaagaagcattagaacaaaccatgctgggttaataaattgcctcattcgttaaaaaaaaaaaaaaaacaggctgagtgcagtggctcacgcttgtaatccactttagcaggctgaaatagggggatcactttgaggccaggagtttgagacctgcctgggcaacatagtgaggccccgtctctacaaaaatctttaaatattagaataactttgggaggccgaggcgggtggatc

SEQ ID NO: 9111 - DNA, 1206 bp, Homo sapiens
ctatttggtttaaaaagtattctatcttaaggccaactaatataaaataccattgttaaagaatggtacttttataaacattagtgtatttatttcctatgtgttaatatgaagatcagaaattattttttgcactttggcataaatacttttcaatatctgatttgttctctggataaattagcatagttatttttttattcacatttacatttctaagtagttgtatagtagaagcaggaagctcttattgcttatttggtcgtaatgaaaataatttgtaaaatgtcctttaaaagtttaatgatacttctgatgtttcggaacagtcatttcacctactatttctgaatatattttgcaaattgaattggaataggaattgataatagcagtcttaaacattagtagtgggatttggctatggtccagactgtgctccttatagagaatttgatctgctcagtgtgagcggtttgctgttagccagggctatttatggcaaacacatgcttttgtatcttgtcatagttatccacaaatggcaaaactggacttgattctactggtatgcaaaacaggcatgctagtaagcagtcagtcgtggctcagaacttaaccccatagctcagaggaatgcttttagcagaaaacaggaaagaaaatatcccttaaaaattttttttgaatgtgtggaagtaattttagtataattagattttttccatatttttgaaagatttttcagatgtgaacattaaaaatagggattaaatgtctaggcttccatttaaaattatatgaatggtttgggatctttttgcactgagcaattttatttcaggcttccagctgtccctgtgagttatcctggacatttcgatggtttttggtaaggccaaactctgataagcaaaacagagaatactgacgtatacttaaccatatgtgtaactgatacttggcaccatggaatttttcattgagttatttcctcattcttttaaaaaataagggactataaatcagttatgtagtatcttttgtttttgtagctgattccttaactttcttgtatgcctctagtaatttcagagattaaatattgctttaaactgtgatactttgatttgctagattgacaaaactgatactaatataattaagttcatctttgaaatacatctttgtgcgtagagccaaaaa

SEQ ID NO: 9112 - DNA, 1212 bp, Homo sapiens
cctcgtaacacaagtgaagcaaaagctggaactaggcttcaagcattttttcatattcaggctcaaaagcttggactccacgtcacacccagtaatgtggaccaagttagcacaccaccggctgcgaaaaagtcacgaatctgactttgtccttctaaaggatatatttgaagaaaaacaaattgttcatgaaaatggaacattaaatcatgctgtataaagcaataacaattgattgaccacatgaaagtgtggcctgcactatattctcaattttaatattaagcactcaggagaatgtaggaaagatatcctttgctacagttttgttcagtatctaataagtttgatagatgtattggatacagtactggtttacagaggtttttgtacatttttgagatcattcatgtgtccagagatcttggaaaatattttttcacccacgatttattttgttattgatgatttttttttaaagtggtggtattaagggagagttatctacatggatgagtcttccgctatagcacagtttagaaaaggtgtttatgtcttaattaattgtttgagtacattctttcaacactacacatgaatgaatccaatcttataaccttgaagtgctgtaccagtgctggctgcaggtattaagtccaagtttattaactagatatttatttagtattgagagtaatttgtgaatttgttttgtatttataaaatttatacctgaaaaatgttccttaatgttttaaaccttttactgtgtttttattcctctaacttccttaatgatcaatcaaaaaaagtaacaccctccctttttcctgacagttctttcagctttacagaactgtattataagtttctatgtataactttttaactgtacaaataaaataacattttttcaaataatctggaattctctaatttttacaatcagctttggacttttgctcgtgataaaaacagaccataggaaccaactttttgttgtacctgagtctctatagcagtaatttgctgctttttctgccgaaacccttgaggagtaagatccatttcatttcatcaaaaacagtaacatgatgtgcatggattctcattaaaaagaggagagaaagtttggaatacactcacctagttgagaatctggaaataattaattaaagtttttatgcatatatacacataaaaggagctatt

SEQ ID NO: 9113 - DNA, 1133 bp, Homo sapiens
aggttctgtctccaaatacagtcacattggaggttagggcttcaacatatgaacttggggttgtggagaggggatacagtttagttcataacacctaataacttggggtaactttgtatctcatatttttctaatggaaacttgaaatatgatgatgatgaaacattttattttaattacagggaaaagaggacaaaatggatttaaagaatttacaaggcaagaacagatcaactgtgtaacaagagagcctcttactgctgatgaggaagaagcattaaaacaggaacaccaacgaaaagagaaagagctcttagaaaaaatccaaagtgccatagcctgtaccaatatctttcccttgggtcgcgaccgcatgtatagacgatactggattttcccttctattcctggactctttattgaagaggattattctggtcttactgaagacatgctgttgcctagaccttcatcatttcagaataatgtacagtctcaagatcctcaggtatccactaaaactggagagcctttgatgtctgaatctacctccaacattgaccaaggtccacgtgaccattctgtgcagctgccaaaaccagtgcataagccaaatcggtggtgcttttacagttcttgtgaacagctagaccagcttattgaagctcttaattctagaggacatagagaaagtgccttaaaagaaactttgttacaagagaaaagcagaatatgtgcacagctagcccgtttttctgaagagaaatttcatttttcaggtaaattttcaatgaaaattgtttttactttttttccctccccctaatctctggtcattcaggattaagcgtttttgcaacctattagaaatacatttacaacaccttatctttgatttaggctgtccttttagtttgcaagttagagtttgggaatgtatttctgtatagaaataagattctctaaattccactggattgtatttgaattatgaggaacacatctatggtataacaaaatacatattctccctgatctccttattccttggtcagtagactctgaaacccaagaatagactctaaggctgccatcagttttggacagattatggtgagtgaggttactcatta

SEQ ID NO: 9114 - DNA, 1109 bp, Homo sapiens
caagcagagaccgccccaccctccgcggaacaagcctccggtctgcaaagccctaagccccgcccctctacggaggtctcacgtgcgcctggggatccctgccttcagtcacacctctatctctcatctttccgctcttagctgggagtgctccgcctagtcacttttcttaaggtggctcgtcgaggcctgacttcttccccgaaatcacgtccctagacagcctcctattttaccactaactttactcctgcagttattcagcggtaggaaactgaaaccaaaaaccagtgtaagcaagtaaacatctaaactgtttcaggagccgcgtagaaggaacgcggcggtgtgccccggaagcggaagtagattctcctatagaaaggctggactacgcggagtggtgacgtttcctcattgggcggaaggttcgctggcactccgttggtcttccagctggtgggagttgacgacgtggtgctgggcgttgggaccctactttatctagttcgggaagttgggttgtggggtcatacctgtctgtctgctcccagctttcttgggtttcttccgacggcgtggggcctcgctaaggaattcccggcccctcagggccacggctttagcggtgtcttttgcggtaagtgtctgctttttcccgccccagactacggagggggagcgaggggcagccccagcgctgctcaggaggcgagagactccgggggaagtcggcctccgtggccaccggccatcgttaccgagactgagtttctgtggctctttatctcgtcttccatgagaagttttattaaagatgcgctgtgccccttttgagttgtcttccgatttacctgagccaaataagatgtaggcagttgcaggcctgagtcttcgttttgctttcctgagcaagaatttagatgaagctacttccccgaaaatccttttacttgtacgagacttttatttttcctatgtgtttgtagtgcttaacacaatgtcctgcgtgtagtagacgttcaataaacgaatatggaatatcagttgaatgccaatgatgatttaagatagactgatagctctctctgtaccatttgacgctgctg

SEQ ID NO: 9115 - DNA, 1134 bp, Homo sapiens
gagcaagactctgtctcaaaaaaaataaaaaataaatgcattttgacatagaagctaaatagaatactttatagtttagctttatttatgttattcaattgaaatattttctatcttagctgcaactaaagaattttattttcaagatacaattctaaatctgatgtcaaagtaaacatttttgtgtataggtgaaggtggtataatatctgggaattccttcaaaataatctgagggaagataagtgtgtgtatagattttttaaagattggtttataaattgataattgttaaagtaggttgataggtatatgggagtttattatactatcccacttttacgtgtgtttgaaaaaattttttttaaatcgttgtttttttcccccttttgccttctaggattcttacagaagcagagattgatgctcaccttgttgctctagcagagagagactaaacattgtcgttagtttaccagatccgtgatgccacttacctgtgtgtttggtaacaacaaaccaacatcatggaggtccctggattgaaaaaggagcctctcccactcctcctaccaccgaagtggttaggactctatataaataaaaacaaggcttttggaaaataattgcatcctgttgttttcacctcctattttaaaatttatttttgacacctaatgtacatatttatggggtgcaatgtgatgtttcgatacatgtatacattataatgatcaaattagggtgattagcatatccatcacctgaaacacggtgtttttgtggtgagaacatttaaaatcctctcctctagctattttgaggtacacaataccttattagttttttgttttttaaaacaagatcttgctctattgcccaagctagagtgcagtgccatgattatggctcactgcagccttgaactcccttgttaagtaatcctctcacctcagcctccttagtagctggtactacaggtgtacaccattgtacccagctaattttattatttttttgtagagttggggtcttactatgttgcgtgggctggtctcagactcctggctagcattaagcgatccttctgcctcagtctcccaacatgctggggttacaggcatgagccacagt

SEQ ID NO: 9116 - DNA, 1214 bp, Homo sapiens
tgatcctgagctccgagactttcgaggaaatacccccctacaccttgcctgtgagcagggctgcctggccagcgtgggagtcctgactcagtcctgcaccaccccgcacctccactccatcctgaaggctaccaactacaatggtatgtctgcctccctgccctgccccaccccctcggagggcaggtgacgtggagaaggggcaggtgggccaacttaaggagtccaggcaagagcttaaactcctaacatttggaaggttgagaaaatatgtgtgcaaagtgcctattggatgcctttataaagttctttcagaacccagactgtgggttcttaaaattcagaagataagactacttgttccataaaagaataggtgaaaggagtgagggttgaaacaggtggttatacttttttccttttgttcttccaggccacacgtgtctacacttagcctctatccatggctacctgggcatcgtggagcttttggtgtccttgggtgctgatgtcaatgctcaggttggtgcttcctgcccccgacgcactgagtcaggctcctcgtgcttatgttgtgagcagaaattccaaatgcagccataagcatctcaaattccttttggtttcaggagccctgtaatggccggactgcccttcacctcgcagtggacctgcaaaatcctgacctggtgtcactcctgttgaagtgtggggctgatgtcaacagagttacctaccagggctattctccctaccagctcacctggggccgcccaagcacccggatacagcagcagctgggccagctgacactagaaaaccttcagatgctgccagagagtgaggatgaggagagctatgacacagagtcagagttcacggagttcacagaggacgaggtgagtctgtgaactccttcggcgctctaactaatgaggtgccattcccttcaccctcccaggcccctagagctgctccttatcagaggggtatctacataatgagtctctcaaatttctgtgcataaccagtatcccaagaatgtacctgccccccctctttttttaaagagaagcattaaaggcaaactctctcagcctgtaaagttcattatatttgggctatggagaatggagtccaagagttatttccagtagtggcctccccatcccggtagcttggcagagctccgctccggaagcttaacgtgtctt

SEQ ID NO: 9117 - DNA, 1258 bp, Homo sapiens
acgccattctcctgcctcagccttccaagtagctgggactacaggcgcccgccactacgcccggctaatttttttgtattttagtagagacgggatttcactgtgttagccaggttggtctcgatctcctgaccttgtgatccgcccgcctcggcctcccaaagtgctgggattacaggcgtgagccactgcgcccggccaatttacactcttaaatatagtttctgcccatagattttaactttttaaaaaagttgtggggaaatggcggcttcaggagagagcgggactttgggcggcggaggcggcacagaggaagcatttatgacctcctacagtgaggaataaagatggcatacagcatacctcatattcattccaaccctgacagtgacaccaagaatgttttcctgggactgcctggtgcttgttctcccgggccttgtcttcaggggaaacaaatagagaagggagacttggttctaacatccaaaaaccacattgaaagactgacccgtcctggttcctcttacttcaatttgaacccatttgagtttcttcagatagatcctgaagttacagatgaagaaataaaaaagaggtttcggcagttatccatcttggtgcatcctgacaaaaatgaagatgatgctgacagagcacaaaaggcttttgaaactgtggacaaagcttacaagttgctactgatcaggagcaaaagaagagggtcctggatgtaatttaggcaggaaaagaatacgtggaacacactgtgaaagagagaaaaaaaaaaaacaatcaaagaaggaaggaaaacctacgattgtagaggaggatgatcctgagctgttcaaacaagctgtatataaacagaaaatgaaactctttgctcagctggaaattaaaaggaaagagagagaagccaaagagatgcatgaaaggaaacggcaaagggaagaagagattgaagctcaagaaaaagccaaacgagaaagagagtggcagaaaaactttgaggaaggtcgagatggtcgtgtggacagctggcgaaacttccaagtcaatacaaaggggaagaaagagaagaaaaatcggaccttcctgagaccaccgaaagtaaaaatggagcagcatgagtgaccacccggggtcacaggcacagaaccttccccctgctatctcccttcctgcttcgaaggactcattctttcctcccacttccacctcaacatagagtagtatttgctttttagtctgt

SEQ ID NO: 9118 - DNA, 1159 bp, Homo sapiens
tttcccacaatccaagctgccatattttgagggcagggggagttttattctacaccctttaccttcctagataattatgtctaagtagttttatctttaatttcatggttaactgtgagccaaaatacaattggacaattagtctcattatttattgtgccccattgcaactttatggttcaataaatatataattttttacaaatgtaaaattttacatttaagcatttgtaaagttacagcaaaagatgtacctgttaatacacagaatgtgtacagattatttgttatgacaataaaacactcaaaataaatggtctttagcatctcaaattccaactgaaatcattttagtattaactcttcttcccaaagcaatgtctcatttcttggctgtgcaggtgatgccatgttatatccaataactagaaaaatcactgtgctgaacttttatgtttagcttccaagtatttttctaatgttttgcatttcaagtggtatcactgttaaatgccatttgttttcagattgtggccttttattattggctgctagatcctggtgtttctatgttcttttttaagcaccaaaaagaagatggggaagaaaagaaggaaaattttctgatataaatatgttgttcaaattatgagtattatttaaaaaagaaaaaggaacataacccaggagtctaagttaaatctaatattgttaatactgaacttgcaggtccaggttggtatacattccaccctctagaagtattttcttacagtagataagctgctcacattttgttttgaatgggcatctcctgaggaaatgtagcatgacattggtactaactgcatgtgtaaatacatcatactggcaaaccgtaaaatataaattatgtatcatcattcatgtagtatctataatttgtaacagtgggggggaaagatgacatggtatttaataatacaataaaaatattcttatcacttcctatccatgagtgttgatttgtcttctatgtttcatatattttcaataagcagggctatatgagtagtgaggagatttaaagcatgaacctagattatcttagctaatcatcaaaaataaacttgaattcccttttcaagatacattccaacttatttctcacagatcctac

SEQ ID NO: 9119 - DNA, 1152 bp, Homo sapiens
tgaattctcttggccactaattcttaaaagtttgattggattagccattcctctactgttttaaaaaaactgtcagaaagatttatttttttctccacatcttaagggatttacagaatttctcatctgcaacttaatatattggcaaatattcatgttaagtgctaaaacatttttgaatagctaaaacaaagataaggttgttcctttcaaaatattttagagtggtgccatacccaggatgagaagttcctatttcagaattcttgctttgctgtaaatacataattcagaaagtttacctttttaatgattttatgatttaaacatttatgagcactgttggaaaggaattttctaaatggcaattttatttgttgtattccttttccctatctggggtaatatgccttctatgataaatttaaagatttagatggtgttgagacatcagtcactaaaacaaaacaaactttatatctgattatcaaaataatgttcattttagaaaacatggattatatggaaaagcatatgcaaaaatacacataatcctccaaaaccagtgataatttattgacaacttcagatgcttttactgccagttttttatgcttgtgtacatttaaaatataaaagcataattacagttattttgaattaaaaatcatttttttctcttagaatttgaaagaggcaaggaacctgtcactttaaaatagcaaaatccctcctttcctgattgcaaatgaagtcaggatttttcaagctgatacgtaaatttagaacactttccaggagatgcaaataggtgtgtagaggaaaagattaaagattcatagtgcaaatcaacataccaaaggcccttagaaaacctgttaaaaaaaaaaacaaaactgttggccaggcacagtggctcacacctgtacccccagcaactttgggaggctgaggcaggcagatcatgaggtcaggagtttgagaccatcctggctaacgcgatgaaaccccatctctactaaaaatacaaaaaaactagccaggcttggtggcaggcgcctgtagtcccagctgctcagtaggctgaggcaggagaatggcatgaacccaggaggtggagcttgcagtgagccgagatcgcccactgcactc

SEQ ID NO: 9120 - DNA, 1201 bp, Homo sapiens
tacctgtatttctagtgaccctttagcggcaggtatttatacctggtatttatgatgcagtatataagtggtgaacaataactgacagtattgtgcttgctgtacatgtctggtcttttgaaacagattttagtaagcattttccagaggtaaaactgtgtccttattctaattttattcctagggcaaagtagacagggattatttccttgaatctatttccaaattaatatttttttctttggtatttctacactttaaggccatttggtgcaatttagaaagtgttggcctcccttccgctagccacattcaaaattaacttccaaaacctcaggaacagtacaaagaattgaaaccctcaatatggcagcacagccggctgtagtgtatatttagggtacaccaaatcaggtattcctggtggtcttgtgcactttaatttctgttacaatgagttaagaggatgaggaagaaatctacttattaacacttactgcagaaatgtctgcattattccgtttgttttcttattattttacctctccaaacatcttcctgtgcagatcactacttcatagttgccaaattttaaaacacttaactgctgaaattcagtgtcagcaaagtgatattacgttgttctgtttctaattaaccttagcaaatgtacataatgtcaaaacccaatagtatttgacagtacttatgtatacaatgtttgataagcatttttaataagatttgtatttttaaatttagtatataataaaaagatgtgtttcagtgtgatttgtagtgtcttggattacttatgtgtatttagttctttttataacctatccacttgtaagaaagatttgaattggtttacgttaatagatatggagtaggctgggtgcagtggctcatacctgtaacctcagcactttctggggtatatttagatgttcaagacagctaagttatacttaattttaaaatatatgcatatgtgttgtactttgattaaaaggtactgtataagttaatgaaattctaaatagaaaatctttatttttttatttttattttttgagatggagtcttgctctgtcacccaggctggagtgcagtggcacgatcttggctcactgcaacatctgcctcccaggctcaagtgattctcctgcctcagcctcctgagtagctgggattacag

SEQ ID NO: 9121 - DNA, 1519 bp, Homo sapiens
atcacttgagcccaggaattcaagaccagcataggcaacatgaagagactccgtctctataaaaaaatagaaaaattagcctggtgtggtagtcccagctagtcaggaggctgaggtgggagtattggttgagcccaggaatttgaggctgcagtgagccataattgcaccactgcactccagcctgggcaacagagtgagaccctatttcaaaaaaaaaaaaaaaaaagaaaaaagaaaaccagagctaggtaatattaatagtaaaggtggtaaaagcagatgttacttaggaactaatgcaataggggaaaagaaacctcaatatagaagtgggttgggttcccatgagcataggcaaatgggactttacagctaaggagcagggagggggtcagtggatggaaagttactaacaggaatcatcagggttagagaagattgtggttaaaccaacttgacaggattcttgctgaagtcaggctacagtgatcaaagatggaggattctcagtaaactgacttagcagaattcttgctaaaactggatgatgcagagacagacacagaaacccaaaaggttgagggctagtatagtaaagggttcaaaggagcctcattaaagtttggtcaaggcaagatcctttttatttattttttatgtttttgagacaggattttgctttgtcacacaggctagagtacagtatactggtgtgatcactgttcactgcagcctcaacctgggatcaagtgatcctcccacctcagcctacagagtagctgggaccacaggcgtgtgccaccatgcctgcctaaaatttttttaatgttttgtaggaacgaggtctcactatattgcccagactggtctcgaactcctgggctcaaacagtccccctgcgttggcctcccaaagtgatggaattacaggtgtgaatcactgcatctgactatggcaaggatctctgtcactgaggtattaagtcttctgtatccctactgattttctgagcatgtattctgatgactgagagaggtgtgatgaaatttccgactataattatggatttgtctttctcttttcaccagtttttacctcaggtactttgatgctgttttgttaaatgcttacatatttagggttgcttatgtttagctagtaagttgaaacttttaatgtacttatttagtttgagtaatatctttgttttatattgtctgatatgaatatagccacccctgctttcttttgattagtatttgcatgcttttttcattgtgctctattatcctaaataagacatcgttaggaaagggtagtttttggaatgtttttactttgtgtgccttttgttattttaaataacattttgattttagaatgtatcattttatcaaatgtgacctaagatcctttaattttattttaaggtatgaggatataagtgttcgtcacataattagaaaaacttttgtattattacgttacattcttggagggaatctgaaaggtaatt

SEQ ID NO: 9122 - DNA, 1476 bp, Homo sapiens
tgcagacagacccaaagtggcactgaattttcttgctcaccttttaaaaacttgttccttaattttagccagaaagcaaaaaaacaatagtaatgataaatgtgaacatttttgcttattcattgaatatttttctgtaattttcagcacttatgtatacactttttctgtacttactaggttaaggcagatttatttttatgatttgtttaggaattatttgattttataatggtaattttcatgatgataatgtttttggttatttggaaagatagtttagagatgaaaggtttttttgggtaacaatcccgcagctgacaaaaaatgtgaaatttccacaaaatatccaacttatgtgactaaacgcagtagtttttttaaaaggggagatagaaaataaatggttttgttggagtgcattttagtaagcctttgcagtaaaatgacggttgtaactactaaaccaaatttagttttcacagcatggttttgttgttttccccttgtttttcagaggtaaattttgcattatatccttcagtattttaacactattttggcagtttacacattactttttgtttttccttcctttttgtgaaatgtattaagttgtggttcttattgaaacagtattatataatgtttgcttaattatatcatgtgatgctcagttctattttgatttattcattagtattcacttttacctttaaagtttacttgtagcaaatatgtttacattgataaagccagatatgttttgacaatgaaatttacatatcaagtactgcaaataaaaggtggtgctatgatatatgcttaggaggacagttttaatgattgtacttgcatgaacacaatcatatgatggtaaagcagaaacttaagaaaaaattgtttatgtgttatattcaattagcttaaataagttgctttgttatattttatttgaattgaactacgctaggcctaaatgccaataaaatatacttttcactgtttttctggctattttgaaatctagtaaaacctgagaagcctaatgtaaaattagagtatttaaaatcattagatttaaaagctactcatttaaaaaataacaactttaagatataattcacacatcatacacttcacccacttaaagtgcacaatttaatagttttgagtattttcgtgaagttatgtatgtaaccacatcaccacaatcaattttagagtattttttatcactcccaatagttactcatttttgttgtaaggctagtgtgtttttaaaaagggagatagaagttcatgtagttttttgttgttgttgttgtttgagacagagtcttgttctgttgcccaggctggagtgcagtggcacagtctcagctcactgcaacctccaccttctgggttcaagcgattctcctacctcagcctcccaagtagctgggattataggcgcctgccaccacacctggc

SEQ ID NO: 9123 - DNA, 1148 bp, Homo sapiens
gagttggaggagacaggtaatcagcacaatgatgtagaaatagaggaagcaggagaggaagaggaaaaggaaatagcgattgttcatagtgatgcagagaaagaacaggaggaggaagaacaaaaacaggaaatggaggttaagatggaggaggaaactgaggtaagggaaagtgagaagcagcaggatagtcagcctgaagaagttatggatgtgctagagatggttgagaatgtcaaacatgtaattgctgaccaggaggtaatggaaactaatcgagttgaaagtgtagaaccttcagaaaatgaagctagcaaagaattggaaccagaaatggaatttgaaattgagccagataaagaatgtaaaaccctttctcctgggaaagagaatgtcagtgctttagacatggaaaaggagtctgaggaaaaagaagaaaaagaatctgagccccaacctgagcctgtggctcaacctcagcctcagtctcagccccagcttcagcttcaatcccagtcccaaccagtactccagtcccagcctccctctcagcctgaggatttgtcattagctgttttacagccaacaccccaagttactcaggagcaagggcatttactacctgagaggaaggattttcctgtagagtctgtaaaactcactgaggtaccagtagagccagtcttgacagtacatccagagagcaagagcaaaaccaaaactaggagcagaagtagaggtcgagctagaaataaaacaagcaagagtagaagtcgaagcagtagcagtagcagttctagtagcagttcaaccagtagcagcagtggaagtagttccagcagtggaagtagtagcagtcgcagtagttccagtagcagctccagtacaagtggcagcagcagcagagatagtagcagtagcactagtagtagtagtgagagtagaagtcggagtaggggccggggacataatagagatagaaagcacagaaggagcgtggatcggaagagaagggatacttcaggactagaaagaagtcacaaatcttcaaaaggtggtagtagtagagatacaaaaggatcaaaggataagaattcccggtccgacagaaagaggtctatatcagagagtagtcgatcaggcaaaag

SEQ ID NO: 9124 - DNA, 1525 bp, Homo sapiens
atacagactgtttgtttaccagacattcttgtactttttgcataattttgtaagagttatttatcaaaattatgtgaggttccaaaatatgtaaaaatgataataataaaaaaagattaacatcccttgtcatcttttttaaatatcctatactcttcagtaagaatctgtatattttaataggcaaatctttaagtctgttcccttctaattctgtatcatacattgcttttgtagaaataaatgtgtgtttatttcattatttttgggatgtcctcgttgacacttgtataataaatatcctctttatcattttcagcttttaacactagatactgcacgtgattagaatgtttttgaaggtttcctcgtttttatttgccttggacagtttttagttgtcagagtcagagctttgcagctttgagggggaacagttctctttaaaatcatttgctattttctattctcccttgttattttaatctaagcattttcccccgtttctcatattttaaccatatgttcggtagataactaaacagtatgatctggttggcattttcttcctgatgatgggagcgtcattcttttgtcttcatggttacttgtgtgatataacatacatctgttaaagaaaatcacttctttctaggggagggaggtagaaaagtatctttcaaacttggtttttgagtttgtgtcttgtcttaactttgtgttggctctaacttaaacatgctgatatgtgttttcaagaattttgtttaaggaagtattgtatggaagtccacaaaatgaaggaagttcatctaggttttaatatgtaagcaagataacacacaagtgtaccaagtgattattaactttgttgttttacaaatttgtatgaacttggagtatctgttggccattactatacatgtgcaaataaatgtggcttagacttgtgtgactgcttaagactagtacttgtattaactttctgatgctttatacaagagagcacttaaattgcatccttctttgagtttaacactgtagctttagccttgactttgaatattcattttgccttcccttgacaagtaaatggttacagtgaaaatgtgaagaagtatttccagttagtttttgtgtgtatataactcacttgtgtaagtggatgtgttaaaagatctctttttaaaaatccttttattggagtaattattaaaacagtaaatgcatagagctttgcacagcaatctgtatccatgagccagttccaccactagtaccttcatctgtggcttatccagcaaaatgtttcatttcctgtgtgccctggcaggaaagaggttggtaaatagtgaattaaagggatgatcataaaatttaacctggttaaaaagcaccttatttgatgacagtttgtatgcactaaaatcctttatacaaattaagttttgtctactgatttgtacctggaaaatctgaacaatattcatgttgcttacagaaaaggctagtattggcttgaagc

SEQ ID NO: 9125 - DNA, 1137 bp, Homo sapiens
tcaaaacttgtttttattttttgagacaggtcttactttgttgcccaggctggctttgaatcaaactttttatttttaaagctgcaaattgattttttcttcctgtagggaaattgtatattggggaactgattatactttacagataaaacctgaactggttgaaatcagggtaagagtacctgaaccctaggtcactcagtttctttctttggccttctcttattctcatccttggaaactttaagtcacctctgtagaactccagtttgaagataattgcatttcaccatactgctgttctttacttggcgatagtgattgaaagttgacaaaaaaatgtactctgatactttctgtttggtgttagtctggcagcccattttgtgttgaccacataaacttgtacctatgtttgtaatcaatatttttaccaaaagtacatttttaagaacttacttttctttatcttgaaggttgtggcagcactgcctgaaggtatgagaccagattctaatctttatggttttccatgggaattggtgatatgtgcagctgttgttggattttttgctgttctcttttttttgtggagaagttttagatcggtaagtaaccagtgctatactaagagaatgttcattttgtcactgggctgaacaaataatatgagaaacatatttgttattttaagtaaacaagttagaaactacatagggattcagaggtttttgttttttgttttttgttttttttaaaagagatgagggtcaggaatgagagtcaggcccagtgctgtggctcccacctctaatcccagcactttgggaggccaaggcagaaagatcacttgagcttaggggtttgtgaccagcctgggcaacacggtgagaccccatcactacaaaaaatacaaaaattagctggacatgaggacacccgtctgtggtcctggctactcaggaggctgaggtgggaggattgcctgatcctgggaagtcgatgctgcagtgagccatggttgtgacactgtactccagcctgggtgacagagagagaccctgtctcaaaaataaagagatgagggtcttgtgttgctcaggctggtctcaaactcctgggctcaagtgatcctcc

SEQ ID NO: 9126 - DNA, 1232 bp, Homo sapiens
aagattcaaaatatggattgtaaaaaaactcagtgagaaccaagaaaaattgaaaaccaacacaaagaaattagaaaatccaggatataaaaaagaatatatatataaatggattctggaactgaaaaatttactgaaggaagttcaaaatatagttgaaagttttaataatatagcccatcaaggagaagaaaaaatttcagagcttgaagattggttttttaatttatccagttacagaaaaataaagaagaatttcaaaaaatgaacaaagccttcaagaaacataggattttgtaaaatgaccaaattaagcttggtaagcaaaagtgagcaaactaagcatcataaatggagacataaagcctttctcagataaacaaactctaaggaaattcatcaacactagactggtcttacaagaaatgctcaggtgttctggagtggtgctgcttgggccggtggaggattgcaagctgctggtgttgtggctggggagagcggcgagagggtttggcattttttgtcgggatccccacaaggatgagtgctgccagagagtctcacctgcatggggtgaagtgttcagcctccccagatgatgatctgggatctagcaattgggaggcagcagacttgggtaatgaagagaaaaaacaaaagttcttgagacttatgggtgcaggaaagaaagaacatactggtcatcttgttataggagattgcaaatcaacgtctcacttccaaacaggggaagaagacaagaaaattaatgtagaactggagacccaatatcagcaaagtatggacagtaaattatcaggaagatatcggcgacattgtggacttggcttcagtgaggtagaagattatgatggagaaggtgatgtggctggagatgatgatgatgacgatgatgattcacctgatcctgaaagtctagatgattctgaaagtgattcagagccatagaaagaagaatctgctgaagaactccaagctgctgagcaccctgatgaagtggaggatcccaaaaacaaaaaagatgcaaaaaacaattataaaatgttgtttgttaaatccagtggttcataactcccaaacgcttagtctttgtattaaaagtaagccttattgttataatgcacagtggaggactgcctatagagcacagacctttgtattataatttttaaaaaggcccttttaaataattacaaagagtgtttgct

SEQ ID NO: 9127 - DNA, 1151 bp, Homo sapiens
agagcttaaactatttctttataatggcaaattacttttaactacttcctaaagtattataaacctgccagtggattttaagtgatagctaagcttccaagcttaattcacgttattacaaataaattatataactatcttaaatgtttatcttataattaaatgtaatttgaaatgctctaatgtattttgcagataaaacaactataaacaatattaggcaactggatgtttactagtgtcggactagcaatagaaatgcactttaaatatatatttaaggggaaatgcgtgcctggaaatacttcttttcctagtgaagttttatattgacacagagaaaagaatacttaaaattttgagtgatgtctactggcttccttgtaagtagtgattgatagcatgcggctttgacttgcaatacaaatcattacgattttatagttatcagaacattacgtttctttataaagaccctaaggtcactcttctttttgcaacttaagggaaaaaatattctcaagggaaaatactttttgaaatttatcaccattttagtgtttacatttcaataaatagttcacttcaggtttgggattgagattagttgcaatatatttagaagctcctacatgacagcacagatcactgccatctgctgaactgctaaagtgcttggtgccatgttgagaaaacttacccaagaatggataaatatgggtgaaacattactgagaatgcctcacgttagcaaatactatgaaaattcttgtttatatatcaaactgatttattttacaaaaaaaaaaaattcaccccaagatttatttagtttcccaagtgtatctgattaggatttaatttagagtaaacttttctggggacacctgattgcatgaactgaagtatacaataacacaaatattacagtaaacataaatggtgtcattaacaaaattattcctaatgcagatttattctttcaggaaatgcactttatttggaatactagtttatcatgaaacaatgacttacctacctcacagggttgttgtgaggattaagatgtttgttaaaatcttgactaccttgaacatgctaataaaaaaacatttttctacctcttttatttgcaggcaaggctcccagat

SEQ ID NO: 9128 - DNA, 1218 bp, Homo sapiens
tgaaggctcaaaagttttgttgggtacttttaattgagaagtagttttggttgctcttgattacacagtaaatcaataatcaaaaagaaaaaagagaaaaaaaaaaagtaaagactttgccaattgaattctgcactttttcccccaagactgagatgtactagttttatgttcataagtgtacatgtagacaaaacgtggctgctttttttttttttttttttttattttagctctccttccctgataaccatgattttctaggatgagcgatgctttaggtgctggagtgtattgaatgaatggacagagtgctgatactgcttcttggatgtaaatgcttcacatttttcatttgttttaaaacaaacaaagggctgctttttattttggtacttttaaaggttgtaaataacatgccaataggtagtcatctgaatactttcctgctaaatggttttagggctacggatgtaataaatttttaagacaattgcttttattatcatgatatttggggccctattttaggaaatcagatatttactgtttatgccttttgtatatgggcaggttaacgttggatgaatttaattacctatctatgctatggttagcatggataggagtttaagcatatcaggtgtttcagtttttcttcagtagtacagcaggcctcccagtgctgatgtaaatatttgagcagtgtttagtaccattcttagtgcatattaatttttttatatatccttataattttagttttttaagatctttgctttttcaaagtgttcagatataaaatggtgctaactgtaggatttataacaaggctataactgatgtccttttggatgttcagtatgagatatgcatgacatgttttgatagtcttttgcatttttaatggcttgattcatttgtgcttattaaaaatgttagtgattacgccaatgttaacatccaaaaatcatcagaatggcctgtgttatgcttttcatggttcctgaatagtgatttaaagaaagttacacttttgatcttctttcttcttgtgctagatattacatgtctttcttaaaaacagaaatatatgcattaaatataaagcactaggcagttatgcattactttgtacatttcttaggtaactgaatattttaaggttattgaggaaaactggaactcgatgtttacttgagtaatagttctaagttg

SEQ ID NO: 9129 - DNA, 1851 bp, Homo sapiens
tgcctcttctgcagcttggggcttggagaggatctggaagtctgggctccatcgagccctttggagacggcaatggtttcttccaaccaccaccacctgacaaccctgcatggcggctgccccctccgcgctgcttctgctgccgccctttccagtcctctctacctatcggctccagagccgcagtcgtccttccgccccagagaccgatgatagtcgagttgggggcattatgagaggagagaaaaactactacttccgtggagctgcgggggaccacggttcctgccccactacaacttcgcctctggcctcggccctcttgatgccctcggaggcagtctcaagcagctggtctgagtctggaggcggtttgtcagggggagatgaagaggacactcggctccttcaactcctccgcactgcccgggatccttctgaggccttccaggctttgcaagctgctttgccgcggcggggcggtcgacttggcttcccccgacgcaaggaagctttgtatcgggcactgggccgagtgcttgtggaaggaggtagtgatgagaagcggctctgcttgcaacttctctcggacgttctccggggtcagggggaggcaggccagcttgaagaggcctttagcttagcacttttgcctcaactagttgtctcgttacgggaagagaatccagccctgcggaaagatgcgctgcagatccttcatatatgtctgaaacgtagtcctggagaggtgctgagaacgcttatacaacaaggactggaaagtaccgatgcccgacttagagcttccacagcactactgcttcccatcttgcttactactgaggacttgttgcttggtctggatctcaccgaggtgataatatccctagcccgaaagcttggtgatcaggagacagaagaagaatctgagacagctttctccgcacttcaacaaattggggagcgacttggccaagacaggtttcaatcttacatttctcgtctgccctctgccctgaggagacactacaatcgccgcctggagtcccagtttggaagtcaggttccttattatttggaacttgaagcctctggatttcctgaagatccccttccctgtgcagtgactctttccaacagcaatcttaaatttgggattattcctcaggagctgcattcacgattattggatcaggaagactataagaaccggacccaggccgtcgaagaactaaagcaggtgctgggaaaatttaaccctagttctactcctcattctagtcttgttggcttcattagtttgctatataatttgttagacgattctaacttcaaagtggtgcatggcacacttgaagtcctgcatttactggttattcgccttggagagcaggtacagcagttcttgggaccagttatagcagcttctgtcaaagtgctggcggacaacaagttggtgatcaaacaagaatacatgaaaatcttcctcaagctaatgaaggaagtaggacctcagcaggtgctttgtttactcctggaacatctcaaacataagcattccagagtgagagaggaggtggtgaacatttgcatctgctccctgctgacctatcctagtgaggattttgacttgcccaaactgtcctttgatcttgccccagctcttgtagatagcaaacgcagggtacgccaagcagctttagaagcttttgccgtattggcatcatcaatgggctcaggtaaaaccagcatcctttttaaagctgtggatacagttgaactgcaagataatggagatggagtgatgaatgctgtgcaggccagattggctaggaaaaccttaccaaggct

SEQ ID NO: 9130 - DNA, 1189 bp, Homo sapiens
gccacgtgttctgactttcaggctttgtaagccattgtagccccgaaacagccataggcagtgtgtaaatatgcatggctgtttcccattattagttgctggatttagcccatgggtgattgttgccagtatctggttataaacgttattttggttgtttaaaccaaagcataaacatttaattactgtttctaggtaatattaatgaagccaggaatatcttgaaaacatttgaagaatgtgttctaggattggcaatggttcgtttacgaagagtaagtttagaacgacggcatggaaatctggaagaagctgaacatttgcttcaggatgccattaagaatgccaaatcaaataatgaatcttcattttatgctgtcaaactagcccggcatcttttcaaaatacagaaaaaccttccaaaatcaagaaaggtgcttttggaagcaatcgaaagagacaaagtatgcatttgtatttttaagagtatcttctattaaaaaaaccagtggtcagtgtattttcactgtggcaactgtgatgaaagatttggtctgtatgtaatagattttattactaaatgaggacaacagtccctctaaactgatgttgccatttaaaaatttttttcaaattgttttgaattaaaagttttagacattaagattattgggttaaaattgttgtagacattgtgatactttatattttccctttagaaattatcaacaaatttactgattactaagtagaacagaggacttgggagaatacttcataaacaaaagcataggcgttgcctatgttgtaagcacatttagaagtgagatgattttgcttctccatagagtactttttatattttttatatatcaattgaaaaaggcagtgtataggtaataggtaatttctcaagttttaggattttagttattgccaggtctgtttaagatacagatttatagcagtttgcttctagctgcagtttaagatgtttatctttttttttttgagtctgtcgcctaagctggagtgcagtggtgccatcttggctcacttcaacctctgcctcctgggttcaagtgattctccagcctcagcctcccgagtagctgggattacaggcatgcatcaccgcgtccggctgatttttgtatttttagtagacacagtttactatgttggtcag

SEQ ID NO: 9131 - DNA, 1189 bp, Homo sapiens; identical to SEQ ID NO: 9130

SEQ ID NO: 9132 - DNA, 1164 bp, Homo sapiens
aaatattaaaataatgggttgccactcccagcgcggtgaaaaagagacttggcattttgttttctcagcccagatagagatataagacaaattattccatctacacatttttgcttttcactttatattctgatttaaaagtacaaggaatgaggcacgttagacgctcaataacattaagttcccaaactggtggctattccattgtccccgggtatgtaatattttacaataaatctctattataacattttaagtgatttatcacgttagcaatgacgcccagccatctaatcattggaaacggaacttaaatttagagtttgttaaaacaaaacaccggaaccgcaccggggaccatatttagagtaacgccttaataatgcgcatgagtctccggcagggctgtgaaggtttccgggaagccagccaatcattcccaacggaaactcagtagcggcattttcaactggataaactggccttagtcccgccttctcgttccagagttttgtgcgaaggaaaccgatggggatcggaaccgtagcggttgagctgctgctgctacggatatctgacagaagccttcggtggttgtcggcctaatgagcggacggcaaagaacgctttttcagacgtggggctcaagtatctcccgatcatctgggactccgggttgcagctccggaactgagcgacctcagagccctggcagctccaaggcgcctttgccagcagcagcggaggctcagctggagtcggacgatgatgtgttgcttgtcgcggcgtacgaggctgagcggcagttgtgtctagagaatggcgggttctgcacctccgcgggcgccctgtggatttaccctaccaattgcccagtgcgggactaccagctgcacatttcccgggctgctctgttttgcaatacgctggtgtgtctgcctaccggactgggaaagacctttattgccgccgtggtcatgtacaatttctaccgctggttcccttcaggaaaggtggtcttcatggccccaacgaaacccttggtgacacagcagatcgaggcttgctaccaggtgatgggtatcccgcaatcccacatggccgaaatgacaggtatcttagactggactaattttgaagtaagagctgggaattcctgaccca

SEQ ID NO: 9133 - DNA, 1164 bp, Homo sapiens
acgccctccctcttaaaacattctctacttgcagcaagcccaaaactgatgaatagggttgctttattcaatcttcagagaatatctgcagcttgtcatagtattttgaagctattatgtgcgtataccccatgggtaactgaacatgatatttcctggcattcttcctgaaaaagatttctcagttgaagaatttgcctctcttcaaatatgccattttgtaggaattttctaaagacaatttggttgtagtcctagataagtgccagctttgatatttggaccacaccagaactttaaaatgtagcattccgatgaattgtcaaattgtttttctcttaatgttaccaaagcatgtttgcattctgaaaaagccagactatttatattttatagataacagtctgaagtttagaatgtagaatgtcacttttattttcagggtctacacaagcttccaccaggaaggaaatatggtgcagtaagagagtgctttttcttacacctcaggtcatggtaaatgacctttctagaggagcttgtcccgctgctgaaataaagtgtttagttattgatgaagctcataaagctctcggaaactatgcttattgccaggtaataattttgttaaacggtattttgtattgtaactgtactgttaaagagaattttggcgaatagttactagtgatggaagttattgacaatattattataaaaagcctttacgtctattatctcagaacagatggtgataaagaatatctgtactttctgtcatccattcaaatcagtgtcttcactgccttttgctgttattgttgttttctttttcttttcttctattttaagactaaccagataattagtgtcagatgtagatcatgagagcctagtcatggttgggacagtgatctaaaatagggtatgaaaggagttttgaaattaataaagattggtagtggatatgcggtgtctcttcttggcggctaggtaaaataatgacataatgtatgccacatacctaacacagtgccttccagttgagtactccaggaatataaaataagatgaagtagtgggatgtggttgcaaacatcattcatatctttgcactgaatgaagttgactttctgtttccctcttctcctaagggggattttg
